United States Patent Application Publication US 2021/0254056 A1 - sequence listing, part 24

SEQ ID NO: 48282 - DNA, 1878 bp, Homo sapiens
tgaaggcccttctccctttctcattaatatttccattttcagagggacctaacaaggatgtctgcctctagacatttatgtctaatgcttaccattactgttatagtgggaatgttaggacaggtagagattttagcatatctcaaatcatgggaagaagctattttctcagttattgatttcagagaagcctctacccctttgggactagaaaccaggtctcctaactcataatccaattatcttcccagctcacctgctgattcttggatcagactgaggcttaagtctgacagtctgatttttccttgcattaaaaacacatttaaaaaaaaaaaccttctgatttggttacctaaactcagtgaccatttctgatgtttatagctgggtatcaaataattcaaatggcattttgagctttaaacactttctgtaaatatcagtactaaaaaatgccttgacatcactgaactaaataacaattattttagtgttatttttgtttttatattttatactgtgtttgatctttgtaaagccaacaggattcaggatctgaggtctaggtcactgaagagattgcatcagcatctacatctaccctttgataggccccattgagggagaaattcacaaggagcccagacgtgtttactttgctgttatccagcactgcaaacaagcaactgggttctgtgatgaccctttactgcctaatgtttaaatattgccagcgacactggtccagttttagcctgattgtgccgttaggtttgttactaagatgcattgttttgcattctagtacactactttcatatctaaaatgaaatcgaaaatgagaggaaaatatttaaccatggtcaggtcctgtgccacagtcgagtaaatattctgtgtgcttccaaacatcatttgcacacttaccattttataattaacatgttttgaaactgagatcataatcaataacaaacctaaaagatcaaagttcttctttcagtctttttagtcagattttgctttgggaacctgaggaaaatacgatccccatgatttgctctctaaataatgtagcatatcagacagataaccagtcatttagcttcagttatctgtcctaactacattatatgcaaaacaaacaaacaaaaaatcatatctactgtgtaaatccagatctcactactggagattcattcttcctattgtcagttgaattctctgtcaaatctccaagcaagcaagcctcatatcaagatgactaagaagttttatattcactagttgggacctttgatctgtggctctaattggaagagacatttttaagattacccaagctccaaagttcattttggtgtacagagcaaggaatgattactacatggtagaaattttttaaagagataacttggtgggtcttcagcgttaggggtgccgtctacatcaaaagattatattcctgtgcctgcttttttctttacttttagagttctactgttttacaaaggatcgatggacctaagattcaaatgctttatcttttgatagagtttttactgcaattgcatatggagctatggccatcggagaaacgctcgttttggctcctgaatattccaaagccaaatcgggggctgcgcatctgtttgccttgttggaaaagaaaccaaatatagacagccgcagtcaagaagggaaaaagccagtaagcacaactgtgatcttaaatgtccaaataaagatggcaacagtaggaactgggggccactgaagatgggagggagagaggggcaagggctgaaaaactaaccattgggtgctatactcagtacctgtgtgacaagatcattcataccccaaacatcagca

SEQ ID NO: 48283 - DNA, 1001 bp, Homo sapiens
tgtctgtgcagcagtcagagggaagagcgacagttccagacgaggggcagtcggacttctccgcagcctaccgccagcttggagtgcagatctccaccgactgcgccacagacagtctcagtccccagcagtcacaatatttgcactcccctttcttcctggcctttcaacccctccctttccttcctcctcacccctcccaccccgcacccgagagacagcctgccgtcccaggtccagcccgcgcctctgcgcacctcccggcacccggcgcaggtcgccggccagggcacacacgcgtccccgcctgctcgccggcccgcaaggcccgggctgcggcggccgcgggcgcgggaggcggaggcgcaggcgccgggctccgtggcagcccggcccagccccgccccgccccaccctccggccctcccctccgcttagccgtgctctcccgccgagctccgccgccagctccgtgctctgcccggcccgtacgccgctcgccaccgcggctccccgggcgggaaggctgcgccggctcccgccaagggggaggcgccaccccgccccggggcggttgtcttgctgggactcctgggccggtcacaaagcccctctccgctgacccggagggacgggagtcgggtgcgcgacggcggctccccacccctgcactcagccgcccgccccgctcctcctccttccctccctgtccctcctcctctcccaccccccgagggctcgcacaccccgcgggcgggaaggtgccgccctcggggcggacaaaggggcaggccgggcgggaggggctgtagccggcacgcgcggccgcgggagggcccgcctcgccccgggccgccgacctgacacctgctgggcagcctgcgcggcctggggcgaaggccagcgggcggcggggtgggaagcgccagcgcaggggcgtgtgttcgggagggggtcgcggacaggtcaggcggcttgggacccaccccacccgggcaata

SEQ ID NO: 48284 - DNA, 948 bp, Homo sapiens
actcccacagattttctcaggaagaaattttctattcttctgggatggagtgtgtgcgacccatccactcttattttgttgtcctctcctggtcatgtgcgacttgccatgacttatcttattttcccttggtgcacttactacttcctagtaatgtgctgtaatccttcctacaatgtgctgtaatccttatctgtgtttctgtgcttattttcatcattaaggagtggacttctgagtgagtctttggaattcattagttaatgttttgatgattaaacacttgcatttcatgacccaattcacatctcttattaggaagaaaatatattctaattcaagagtcttcactaattcttcagattactctagcaggcaatgattttgaattctttcagatattgattgtgtaattctaaaggactcttgagttggaggtactggttgtttgatttggagcatggttgtttggataatgacttcagaggcagtggagagaggccatgacctggtctactctttattggaagatgagtcagaggcttgtcttcagcaattacagaagcccatagtgcttaccttttatacttcataaccaagtcttccttcctcttttactttataagcccaatatttgtcccattttggctttcaactgcctaccagttaatcttggtaaggtctcaaccttatcaaggtaatatctgcctatgttgaatgcataactccgtccagggatgtctgcatgataacaggaggctgtcgtggactgcttccaggatagggagagagaaagtaactgccttgattaccactccgtcctttcccattttttgctctcttcctgggaggtcagggatgtttgagccatggtaacccgtaggaagtggtctctaacattcttacatttattcctttgataaaaatgaatacatttacaggaggtat

SEQ ID NO: 48285 - DNA, 982 bp, Homo sapiens
tgcctgattttagttcccagacaagtgacaagccaaaacaaaaagataaataaaaatcaaacacatatacaacaacaaaaacaacccctcacattaacataggggcctcctggtgctggaagctgaaactcctcacaggatcttctatacgcaaaaatctggtcttatttttctttaacataaggagagagtaagatagggctgagaaatgtgatctctgctggcagaaaagagaatagaatcagctacttttatgaacacatttaaagcctgtgtcataacttcagaaaccttgatgtgattgaagcttagtaaatttcaggagatctgctttaaaatggttttgtactattctttgagaagtcactttgttttgccagctctggatgctaatagggactggtattttttcctggctgtgtcaatgacatcacacaagttgcactccacgatgacaaacatagaggaacaaagtccacagaggcatgggcagcagcgatcagggaaaatgccatcatgcaaagctctctctggttagatagcttgcattttctgagtgttggttgcttacttgttcttaaagatatacatctttctttaagaaattaaagaaatgttaatctggaaatcaacatagggtcttttcttcattgtatgagaaacatcattgtaaatatcacttctctctgcattcatgaaatgctgattattaagaatatatatcataatccacaaaaatctagacactgatctttgttagctatttcacatataagataatatgttcataaagatgtatacagataatttaatgtagaatttaataatcagcccagtttatgtgccactgaaagacatagtacttaggaaatacagtatatttctgtttttctaagaaagttagggagtatgtttaattaatgctaaaatgcaatagaattcctatggaagtacttatgacatccccatgaataccaaatga

SEQ ID NO: 48286 - DNA, 381 bp, Homo sapiens
gttcctatttcataaacttgccataaggatcaaatgagttaatatacgcaaaattcttggaacagtgcctggcacaaagtcaacaccacagaaatgtttgctattacagttttgttattattacctcgatggtttccataaagtgtccctcagaccttttcatttttatcatgtatgataaaaccaggtgctgtcttatctggaatgtttgcccaagcacattacgttttgttaacagaggatgaatcattgaaacctgacctcatgggaaatagcattatctgccatttcatctgtattttgcaactacaacatacatttccttcccagttgctttgaatacagagaaaaaaaatgttcttctcagacttctttgtactt

SEQ ID NO: 48287 - DNA, 634 bp, Homo sapiens
agaaagatgtgagcatgactaagtgctgaaggcaagaagccagagccctgagagcagggatatctgtggagcaagtgcctaaggtgggagaggctgagaaactgagcaagatgaaggcattagcttcgttctgtgggatttgaagaaagaaggagggatgagcgtggtaaacagggtgacaggagtttgatgcatttcattttaaaagtcactgaggaggcaagtaggatgaagggtttgcgaagtgtgaagaatgtttgaaatagccataatgactgtagaaggattgagtaggaaggattgagttagattgaacaggaaatgagctggtgttttccatgaagttggggaatacctgaattaggagtaaataagcaagaaaactgcaaaggcaggcaattggaatttgaaaatggaatgtttacttaatgatttcaaaagtagatcaaattccaggtgaaggtagagttttgacctagcaatgagactgaatggctaattgggaaaaagatgtgaagatatttggaataaagtcaatgagctaagaagacaatcagttgaatggaggacccgagtatgaacaaaattctgtttgatggcaagtcttgagaagaggaaaccttctcatgaaggc

SEQ ID NO: 48288 - DNA, 2096 bp, Homo sapiens
cccggagactcttgtcagataaggcttagaactccgccaaccacttaggcttttaggcaaaacgcgatgcaacccttcttagaaggcgggtcactgctctgcaccagctgccagccagagagacaacaaataaaaatggaagatccttctccgtgagaaaacaggcctcggactcaaagcagggggcctgaggggaaggtgagcaaagaaaggcaaggcgagggcgctgcttcaagaagccgggttcattcaaaccccgaggacagcaaaccccgcctccccacgccgccgcccgctcaatcgccgagcgctccgggtgtgagctcgccccgcggggagcggcttggagccgaggaggcggcggcagaggtggtttgggcagccccgcgcggcggataggcccaggcaaacaacacccattccccctcctcctcgctcagttcaactcccactcggccccggccacgccctgccgccaccgccccctcgggcagctttccgctcggcagccaggcctcggtcgggggcgggagagaggcggtgcctcgaagaaggcaccgcgaccgccggaaactacgagtaccgacagccttcgcggtagtgccccaccccctttctcccaccactcagcgcgcgtcaccctgggctcagccaatggagacagagccagggaaaaagggcgcccgggtccggatgcgcctcaggaaagccatgctccctgcgcgggggcagcgggcagttcacccagcgcgccgacctgttggtggtccgcgcgcgcccacgtccgccgctctcgcttgcctggatcaagggccctacttttttctttagtggcaattggagggattgctggagggggtttttgagtggagggcgctgggaaatgagtagggggcgggatatcctgagacaacaagtttggctgtatggagggcctaccggcagcgctcctgagctagaacgccgagagaaagagcgccagaggagccagggaggaggagaagagctgctaaaggaataaccccgagaaagggggtggagaggaggcggccccagcgccccggcccccggcaggtcggcggccaatccgctgggggaaggggtggagagtcggaggctccggcggagagaggccgaggggggtggggagtcggccaggctcgcaccgccctggccccgcccccgacccgcgccgccgcccgcgccgcgcgccgccgctgtcaatcaagggcgagtcagccgggctcgggcggagagaggagctgctacgccacagcccagcggcggccattcgcggaaaaagaggcagagcctgtgccagctacagcctcctccgagccaccgcgggcgggcgggaccggcctctcctcccgcctcgcccccacccccacccacctctatcccagtgtctccgtctgagggtttgtcctgttaatgcgggatgagcggtacgtattctccacccccctcagtctccttcgccgcctccctctctccctccctccccagaccctgctcggttctcccccctcccccggggccgctgagatgctttaaggggaggaggagagggcgggagggaatcggggagggaaggagggttgtgttttgtcttaatgtctgagagagaacaacctccttctgggtgttgctctggagccgatgggtcgggtttcaaaccacgttttgtgatatccccctcctcccttccctccttctcccccaccccctgccggtgtgcgtggatcgcgggtttatggagattaatgttcggggggaggggggagaagaggagaggaagaagacgaataataataatcctaataacctgttgtcgtgtgtgtgtggtgggggggtttgttgcagatcagaagaaggaggaggaggaggaggcggcagcggcagcggcgatggctacagaaggagggaaaacctctgagccagagaataacaataaaaaacccaaaacctcaggctcccaggtaaaagcaaacaaattaaaaaaattcatcacgacacattaggagagagagggagttatgccctttgaatgtccagaagtaacagaataaaatgtttatccactcaaagcatct

SEQ ID NO: 48289 - DNA, 1032 bp, Homo sapiens
tcttccctctctgattctgaaaagatagagtggtgtgtgggaaaggctttggacctagaccaacctggattgaaatctaattttctcacttaagggaagttcaattactcctcagttcccacatctatcagtggggataatgcctagtccatggctattgcgaggattcaaagataacctaagtgaaatgcccagcgtagtgctcggtgtttaatcgaggctcagtaaatgttagttgccttctgttcttttgcccaaactattgacttacaggctagttgcagctggtggtagcagataacaacaggtcgattccttgctatattttaccatcatctcctctggttttgttcaatatctgttactctgttgggcaaactcagttttgcccttttgttaaacaggttccctgggtcctaatggcgcgggtctctatgtaaaacaccacaatccctgttgcagggccaaaaactacgaccaccacttcccccaaacccctttttagggacctatttctcattttgagaataattgaaactgtttcactgcaaatccttgttaacgtatgaatcacagaggagaccatttgttggcataggtgacttattttaagtcctagttacccgtaagcctgtaaacttctcatccctggcttctagtctttcaacagccagagtctgccaagctcctgataaaataatgtggcttctcttgttccttagttctggcttctatccaaaggtttcattgacccgattcctttgattctatgaacggcagatttcagactttgtggtaaatatgcccaacatgttaggagtcaaaagttaacaattagccaatgtccatagctggttccctgaagcactaaccaccctgccaccaattttactacttttatatagttatttaacaaatattatatagtacttattttgttcaggagcttttccaagccctttacaaaaattcaaaagttacaccctcatagcaacactatgacgtaggtattattagtagcttcattttata

SEQ ID NO: 48290 - DNA, 2061 bp, Homo sapiens
ctaataaaggcaattatgcagttttcagaatacagcaacatttttataatgatttctgaacaatactagcacatcatttattctgtaatatatatttattgagaaacagctatgtcctgggaactccattaaatattggtactgtaattgtgaaagaaaaataaacctggcagttacactcagagattaaaatccaagggagaatgtagacaggcagttatcatatgggtgcccggtgctggagtatgaagagtacagagtgctctgagaacatttacatagggcccctttccagaggaggtgaaatgtaaactgagacctgtaacataaatagaaatgaagcaggtgagaagtgggtgaaggagagagacagaatgtgataaggctttgtggctggatctgagagtgtgaaattgggagagatggcagaatagttaggagcagtaagtggcatccagaccacatagggtcttatgcagtagattatgctaagacctttggacgttatcctaagaaactgacaattccgaattaagattgtgagttaaaggattctaaataagaaagtgacatgataagatttctattttaaaaaagattatttagtcagccattggaggatgaatcagagataggactagaggcgaagagtagttagaaagtgattaacagatacccagatgagcaataatggtgacttggaccaagggcatcctggagatggaggatagtagagagactccagaggtagttagaagagcacttgacagagaagtcaaggaggttgcccaagtttctattagggtgtataaaaagaagagcagctttgtagagaagataacaagttcagatttgtacttgaacaaattaggtatgaattttttgtgggactttccaagggagaggtcccacgtgcagttctaaatttgttttcaggaatgagtgagtgagaagggagggaggtgacagatatcagggagggagactagcatatttttctctccctgagatgtttatttctaaatgttcagttaatgttttgtgaccttaagccgtatgttctctattactatactaagaagagggatgttaggcgtgttaaaacttgttgggaagttgtgtttactttattagccaatgagccttgaataaagagattgcttggctctaattcagaagtggaaacttcctcttgatgctaaatataacattgtggtgtatgacacatagtgtcctagaactttgctgttacactgcttttcagcttgtgtgaaattcagcataaggtgccctctgtttaggttgctataacaaaacacgataaactgggtagcttataaacaacagaaatttatttttcagggtttcagaggctgagaagtccaagagcaaggctcccgcaggttcagtgtctggggagggctacatcccagttcacagatggcactttctagccatgtccttacttggtggaaggatggaggagtctctctcaggcctcttttatatgggcactgatcccattcatgaaggtcccacacttattacctagtcacccctgaaagcaccacttcttgatactatcgtattgagggttaggatttcaaaataaaattttgcaaggacataaaacattcagactctagcaggtatattccttcaaagaaacatagcatctgggatcaggagccaggttgcctggctttaaattccagccctgacatttaccagtggtgtgattttaggtgaatcatttaacttctctgagtttgttttgtcacctataatgcacaaaaaattataacctacatgaaatgttgtaagaggtgagttaatcatgtgaaatatttagaacagaattactcacgtgctaactgtcattaattctattaccgttgttattgttaatagattgaggctcagtttacagaggtggcaaaggccttcattgtgagaaatctgtggtgtgtacttcagaggccttttgactatgaagcaccaaaatgtttctgaaatcctgggacttctttactggagactcaactctgatgctgtgaagat

SEQ ID NO: 48291 - DNA, 1006 bp, Homo sapiens
ggagatggaaaatataaaagagcctaagggacgcatagaaagaagttagaatgccgtccaactgttctattcatacttcctggaagagagaatgaacagaatatagtctgcaagataatagctaagacttaaaggactggttgtgatggttaaatttaggtgtcaacctgactagattaagggatacctacagagctggtaaaacattatttctgggcatgtctgaggacacaggagagactggtttgtaagttggtggactgagtggagaagatccacctgcagtgcgggtgggcattgtccaattggctgggggcccagatagaagaaaaaggcaaaggagaggcaaatttgctgtctcctctggaaaaggaatacctttctcctggtcttggacatcagaattccagtgtccctggactttggactccaggacttgaacctgcagcctcccaccctcagcatctggttcttaggactttggccccggactgaggattaccctatcagctttcctggttctgaggcctttgaacttgcattgagccacactgctggcatccgggtttccagcttgcaaatagcttattgtgagacttctcagccttcataatcgtgtgagccaatacccctaatgaaacttccctcatgtatctatttattttttcctattggttctgtctttctggagaaccgtgactaatacactggtcaaaacatgaatcgatagattcaggaaattcaccaaatcccaaccaggataaatacaaagactgcatctagacacatcacagtgaactgcagaataccaaaagcaaaaatattttcaaagcaaccagatagaaaagactggtcacttgttagaaatgatgattaggctaagagcatacttctcattagcaacaatcggagccagaaggtagtggatgatgtctttcaattctactgggaaaaattctctctcaataatagtgaaatgaagatatttcaggtaaacaaaaatgca

SEQ ID NO: 48292 - DNA, 2860 bp, Homo sapiens
ttttcacccttagccagttgcacttctaatcaagcctgtctttctgtgagtgagttgatagaagcatattagggttaatgaatttatgagaagctactctaattatgagcttcctacagcttcctagaacagagaggaacattatcagggccaaggggtcaggcttctgaaagcttttgatttctttgcttagcaaccataaacattttgtatctgaaaaggtaccttttggctctggaatttggggcaactaataggagcatgccacctctggatttatgcggaatactatgatctttgttcttattaatgactctggtatcccaagggggctcaacatatacagaactgagcctattgtaatttggtacttattggaatttgatgtctattctgcatagccgtatgccctctgaagacagagcatctttggataaaggcaaaatgcatatcagtgaaaggcagttaaaagtgacaggaccatttgctttttttccaccccagggcttccttgcctcagcttctacccactctcgcctgtattttcccccatattatgccagtcccaaagacccaaactaaaatgtcccttcattctttcggatgtcatggggtcacattgtcctttatttcgtgctaagttctagttgttttcttatgggttttctcattcacaattgctgatgtttttccttgggctgagaggaccagccaagtcaaaggacctatttggcattttaagatgatgaaatatttaggtttcaagaaacaggcactcaaaggtaatcaacattccaaggctgttgtttaaatgagtcatgtattccgaaggaggtcttagtaatctgataacagtctgtttccatttacttatgtttatagaagaaacattcttcattgcacgtgtcctgtgaactctgttacttacctgtgtttcctcatgggacattcagttagatcttgtgaatgagaaagcagtgtatacaagtggcttgtacggagtgggcttgtaatgtacaaatgagtggatcccttttcgtttctctggttttgctccttggtctaggagttcaaatgctttcactcttttctaatccaggagttgggaaatatatgtcaaaggaggcaaattattaatatatactgtgttatatcttgggagctaggttttttcctccacttttctttaggaaatttggtcactcaacaaggaagtccgcgtctgggatgcttacacgggcctggaaggcacagttaaggacatgacagcctccctgagggccatcacagagttacagagccctgccctcagggacaggcattggcaccagctgatgaaagctattggggtcagtatccttggtctcactaatgaacctttttatgactgtgaagtgttacttcttggtttgcatcatctgagatgaagtgtaatttatgaaaagacccccctcagcatagcctctacttgctgtgttatgcctttttgctgtctagaaaaagtcgcctgatccgaccaacaatttagaaaaaggcaccctcctccaggctgtccccaggacagcagagcggaggctggcttccatctccatttgtcatctgggctggtgtccacgttcagtacacagattgcacaactaatcagggtggccctattactcatctctcctcattctttctcaaggacagacctagctccctggctcccagcaactctggagtgaggccaaagttgacacagagatagtctggcaaactcatctagctttctcaggactttccagattttagcactgaaagtatcacatccctgaaatccacttgctagaaacccctcagtccggagcaaatcagggcatttggtcctcttatgcagaggcgtggatggtgctaaggaatgttagagggtagggaggggcagagggtggcagcttccaagaagcagattctggatattcttagcaaaagccggaaagaaaatggctttcctgcaacccatatggctggctcaactcttcacttacaggagacatgagtgagtttgggtatgtcgaagagctgaggatgtctcaaggacccaatataggggagggaaggagagtcaatgtgagagaaggggagtcattgtcacaagacaatgtggaaatgagaattatttttcacatggtaaatatgaataatgacactgtaagactattttttttgccaatgaactgagattaaattagtgataaaactaggttaaatcacagaagcagctgggaattatgttcagtgaatagggttctttaggaagaaaagacaaatgagccactacctgattcctgggatttcaaccaaattataataaatgaacaatgagattctctttaaaaatgggttttgtgggcaaaggagataagaaacgtgccgacaagggaaagatgtgaaacaaagaaaatagtgtagcacggatgtgactaaactgtggcccttgcttccggcaggtgacgcctcaggaattgtgagttaaaaaggagtgtcttagattctccacgtatttcaagacgagagatgtactcagcacctgacttgagtatattttagttaagattcatttcaccagcctttaggcaaaaggaaccgttcatatatgtggaatataaagtctaactttttttcccccaatcaggtcaagtttttaataaatgaagccacaactttggcagatttgttagcactgcggttacacagagtggaagatgatgtccgaaggattgtggacaaggcggtgaaagagctggggactgagaaggtagtgtcctcgggactgggtcatttctacttggctaattttgggtatttgcatagaagccaactt

SEQ ID NO: 48293 - DNA, 525 bp, Homo sapiens
gacatccattgcctggttagcagctttcctaggggagaaagggtcacttggaacaagatcatagctggtaccttcttactcctccctccagagtcaccttcataattatgacattgggcttatcttcagtgctgtccaagttagatttgtatcatttcaggatcatcccgaattaaccctctaattttcccctatctctgcaaaaataatgcatcacctttttgctgattcccatgtcaatatttaaagcaaataaaaacagatactatcttgtgtaatctgagagctcagatcagggacaaactgtacaaattccaaagcactccttcctataaactttaagagaatgttgcctttcatttagaccaactcaatcattcctattcacttagatcttacagttgtggctgacatagctggtcactcctagagttgagtgtatattacagattattttaaaactgaagcttgtgctatataattgtggagttttctccatgttttttttttctcagaaaaatttta

SEQ ID NO: 48294 - DNA, 618 bp, Homo sapiens
tgctgccaactgtgttttgctttgcaggaccacatcgctctggatacagtgctctagtctctgtcctccattttctgttattatttgacataagtagaatgaaaagaactttagagaaagacaaaaggtgcaaccttgtactctgtatctgaggtttaccctctttgagattagataaaacagcaaaacctcaaaagaattaggatacaaatatcaatgttttattttacccagaaaagtttttttcaaactgctgtatatttactcattcatgtagccattcatcattcagcaaatatgtactgagtgcccgtgatgtgctgagtccttggaatgtgacagggagcaaaggccaacccagccactgcccacctagagccacctcattcaatccaataatcacacacaaaaagtaaaatcacaacgatgtacttgagagataaaggttatgtaagataacagaagacagggcaagaaagatatcacgaaaaagtaatgatcaagaagagaattccaaagagtgagtagaagtctttccattattttatattgtaaaagaaaatttttgcagcagaaatccagtgcttaatcccttgagtaagaacatcactgtacgtt

SEQ ID NO: 48295 - DNA, 2208 bp, Homo sapiens
ctaatacacggtaaaagccagtggcaaaaaataaaaaatcgaaccctgtctcattccgtaggctttactgtttcccttgcttttaatagtttatctcacaggaggcattttaaaaatattctcagaaacatcaacaacagatttttctcaagcgaccattttcaggaaggcttcagaaattactaaaaggccaaagctaccgttagtggctcagtctttgccgccagactcgggcaggtgacagcggtttgggctcgggcgccgggcactctgcgccttccaacgctggcggccccgcctccccttctcccgggccaggcacgcaggtggaggaaagtaaacaccagtcggaagcaaggtggaagcagtgagtctcgcgactctcaataaaacaagtggaaaaaaaaaaaaaaacaatcctcgcacaaagcatctccgtgctcccacaagcagaggcgtggctgcttgtttccctttttaaaggttgtatttttagttcttatgaaaaatgtttttattgcttacttctaagtaaacatgtatctccattacgataacgtagagaaaagctcttttaagaagtaaaaagagaaaactgaagtcacgttcacattcccactactcactgaaacgtttgggggaacttactcaagtgtttgctaatgagttttaaagacgagttaggcccttaacgcgtaattggggtcgtgctgtgcatatgatttgggatcttgcagcttgtttaactcggcccaatgacgttaccatttcccccaaatggttactaattccttgaaaacgtttacaaaagttctagaataaacactaaagttattatttttaaactccattatccaagttggactggtctggcgatcgactgttaaaaaaaaaaaattacaactttcttaagcttcctgatctctgtgccaattcccggagaaagtgtggggagtgcacaaaaaaagcccctcccccgtctcacgagggctgcaaacgcaggcgctgcgccccgctagctccccgcctgcacccccggcggccacccgagactgagcagagcgccaggctgagcgcggttgtgtgctggggcgaccggcctctgtggtccgcgtagcacaaacgtgacccactgcgcacacctgcagggcgcgcccactccggcactcaaccggctgggcgcgccagatccccagtgccgcagccaagggccacgtttccagcccaaggccagcaggaccgggtggcaaagggaagtcaaactgtgggtgcgtccggacggcggcgggcggccggaccctcacctggtagcgagtcgccaactccattcttcctaaccgggctccagtctcctcccagcacgcggccacgggagcccggactcaccacggcccggcgcaccaagaacgccccgcgcccgagcagctagcgcgctccgcccggagcacaggcgggccccgggaggggcgcacttgacgccctggacagggggagcgcgttgcgctgccccctcggtgccgcctcactgggcctcgtggctccgatcacgttccaacttcgcggccactgaccttgtcttcgcaggcggcgcgagagggggctgcagttgggcgcggcaagagcaattaccagtgttagggcgccgggctcccccctgcagcagagggagggagtggagccgtccggcggggtttagcgcgggagaaatgagggggctgtcccggcgcagcctccagctggcacgcgcgctggatacttggcagggtttattccaggtcatgccctggggcgcgagcttctgctgcaacccctgtctctgatccaggcaaatattgtagggcggctttggggcttgttttgttttgttgttgtaacggggcagggttctctttgggaagattctgtctcccaaaacatttgctacagggttcactttgcagaacaggcaacccaggtttctttaccaaggcccaggtggacagatgcaaacccgcctgaaactttagacggccattacacagtaggcctccacacccaccagacaaagagtttgtagaggtcaggaatgctgactaatttaacagaattgaccccggcatctactaagcatcaggcactgggctagtcctaggaacagaagggtgaacaaaaacaggcccctgctctgttggagtttacagcctgagagccagttaccaacctaattgc

SEQ ID NO: 48296 - DNA, 467 bp, Homo sapiens
ataaagtcatgagggtgggaacctaagctgataggactgtggccttataagaacaggaaaagattctctctctctctctctctctctccccctcccaccatttcccacccccaccccccaccatgtgaggacacagtgagaaggtggccatctacaagccaggaagagagcccccatcagaaacccaattggccaacaccttgatcttggacttcaacctccagaaatgtgaaagaataagtttctgttatttaagccactcagtcaatggtattttgttaaggcagtccaagctgactaatacatcaaatatgtaccggtcacacacagggaaaaaggcccctggtacagtcagccagcccacactattaaaggagtttagaatatgtcacaccaaaatatgctgctctggcatattcactgttttaagttaaaggcacttaaaaaaaaatacatagcaggtacac

SEQ ID NO: 48297 - DNA, 1858 bp, Homo sapiens
aataatataagatggtgggaattgtggagagggagcgcttttcttgggtagtgtgatcagaaaagattatccggaaatgacatttgagtggaggcctgaatgagtggacagcagacgctgctgagatgagggggagtgagctataggatcaggagtgagaatggccactttctgcccttctcagaggtaaaattacgaatgtaatttcctaattacccgatgaaacatattttgaactagaacacagatgtttgggaaaacctccagcaaattgacttaatctgattgattttctgatttagtgtttttctaagcaagaactgcacccgttgtgacagaagaggcgctaaagctgcaaattcctgggcctcgacccactagttcctaatcagaaactccagggtggagacgcaggatctgcatccctgggatcacactgcctttcgagaaccatccacctgccagctccaagtaggtcgagggagcagcggcacctgggatcccaccggaccgggaagagtcaaatccaggtttctccctgcttcaccaaaaggccccctgcctccaccgcaacaggaacagtctctgtctgggaactgcggttgcctaaggctcggtttgctcttcagcactccggtcccccaacaccgcgtcaggcggcgcccagcctcccggggactcgcagacgctcactccccagaccacagcgacacctgccgaggccccgcggaaccgcgctgcacagcaacccagcgcggcggggggagtggcctggggccattctccggcccccaccccccgcccgtgaccaccgtgcgctgccagaggggaggctgcgggaatggccagcgaggtctcgcagggggactggttgtcttttaggaaatcaaggggccagcgcccccagtgccggctgggagatgccttcagagttcgaagagaaaagatgcgaccttcaatccgctccattctccgtcagacaggccctgcggacggagctcctgccaccgctgcagccccatgatgtgtgctcctacgccccgccccgctgcagcccagcccaccccacccccatacggaaatcctgcaggagaaactgaaacactagcgacagtgggacatatccccgggagcagttgcgggagggagagaaggaaggagcaaaggggaagaggaagagagagagagagctcaagggagccttcttggaaaggtttaacccgacagcttgaaggcggcgggtagtaaagcagcgaactggtgaacgggcgtcctgacccgccacacttccctcaccgacacccctcatccgcgataccccacaggacaggatgtccagctgccctcacttatcgtgcccctgggcatttgaggggttcagagagagaaacgcagtaacttattaccctcacatgatatattttcactttcttctcctgattgtcagctcaattagataagggaccttgtgttttattccgttgtaccccgtgcctgacacatggtagctgctggatagagatttcttcgatgattgattataaaacacactaatttagagcttactatgttataagatctccatcttcagtgactcacttattcctcacaagaagcctaggaggtaaggttttccaataaggagagccaggcaccccataatgaacgtgcacggtgtcacattcccagcaagtgccgaagctggggtcagattcaggcaacctggcccagtgccctcacagttcatccggcctccacatggccattttgtccatgaataaatgaataagtgaatgagtgtatgctaattttgatgagttgtctgggaaaatgtacaggttttggggctggaaaaagg

SEQ ID NO: 48298 - DNA, 650 bp, Homo sapiens
tttccacatttactccctcctcagttcttatggtcattgccccagttcaggctggcacctctcacttgactcactatggtagctttctaaaggttctttccaacatttccctcttcttcactcaattcttcctctaaagcaatgccagagagatcttacaaaggccacatctgattatgccacttcccttctttgatggctttcctttgaccaaaaggcaagtttaagctccttagggtagctggtagacttttttagcttaccagtctttcataatggaattttaggctgactcccagcccacccctctccattccctaggaatcaccaggactgcagtcatgtatcttcccatgggtccctctgcctgaaatgctgtcccctgccttcttctatgaccattagtcattcttcagggtcaagctcaaaggtccccatctgataacacacgtcccttgctctgttggcacagtcacagaattaaggctaggaaatacaatgcctacatcagagataatttctttaaagaaccaacaactcaatgttaactctactatcataatgtttagaagacacagcccatttctttccccttctgaaagtcctcccataataattttcaacacataggaatgagtgcttgctcattg

SEQ ID NO: 48299 - DNA, 706 bp, Homo sapiens
ctctagaagtcactaagtcatgccaagtggctaagccaggactgaacctgagtcttttgatttgcttttcacagctacttgatgctgccatggggattgtaaaccagaaaactcaacaggtcaggtctaaaggacattcttgttaactaaagtttattgcagacatctacattttaaaacatttattgcaactttttgccacttatattatgctcattaagtttttttgtttctgaattgtcagtaattttactgccaaatcttcccagtagacattacagtggaattttaaaacatacagtggagccaccaagaattccccaggtgtccttgtgtttgcaaatacaagcagtgacaccaaatgagccactaaataaatagagggggcaggggcagtccaagataagtccaggaaataagactggaaaatttgccttaacccccatcaaaacctatcctgctagaatttaaaggaacttccttttattatacattagggaaaaataaagcattattcctacaatacttcttgtacaattgtttgtgaaattacatcaactcaccaagtttcaatttcattacttgtaaacgggagatgataaaaacctatgggatggatgtgtggaaggagggatggatttaaactacttaatcaatgttagtgactttatattattatacaaaacatggtgatatgcttttttgc

SEQ ID NO: 48300 - DNA, 2293 bp, Homo sapiens
ttaatccactttcctttgtcttgtgtttagccttatattcccaaagctattataattgtttaaatagaagcttctacatttattacaatcattacaaaatgaaactggttttgactttcacaatttcacttctcacctgagcaataccttctcatatgtatcctttgaccaaggcagaggtcactatttaaagcaggtagttttgaaaatattatgctaatcagcaatcaacacatttgtaactctccaccccctaaagcagaccaggtggatggttactcaagcctttgcaacagttccccttttcttcttatgggaagtggggaatgtgagaacttaaatattctaaaaaaaattaatagattgggtggggtgagggcttctctgacagttttaacatgcagaggtgtgcttcaatcatccaaactcctgaaaagggcatcaagcaccctctcccattccaaatggagccctcagctggggccaggcaaactgatggtttggtgccaggatgaagaaacaggagtgctgtgctgggaaacaatgacagcaaacaagcgcctgagctgattcagagaagagagactgggaaaacagcccaccagagaagcctccaggagaaaagctcgggagaggagaacaagacaacaggaaccacaaagccaaaggaaacctaacccaaagtgaagatggatagctcatccaaggggaagtaaggagatgaatcttcacaaaccaggaagaaggccgatcagagacttctgaagaccaaaccagagaaggagatggtaagcacagaaagtggacctgagtctctgaactggaaaaactcctttcccagctagggggacagggagaacattcactctagactggaggtgaaaacaagatggatttgcgggaaccatccttgccccagggtctgagcctggaaaagggattcctgtatgtctgggtcccccagcccccacagcccttcctccacactgagctcctccttgttccctgaccagggcttggattctcttaccagggtattccgcactagaaccccctctcctcttccctctggtccgttccccctaagaggtgatgcacaggcatggccacttcctggaagccttcaactgggaatgctctacctccttcctggcagatttgggctcctgtcctctgggcttccatttgcttgtcttctccaggtacccagcaaccaagctttactggagaaatgaccagaaagaagagaaaatggagcaaaaccaaagggttcatacacttgaacttgtgccacactgagtaacacgaggtgacttatcattatggcctcagctgcatgaggtcatcccttgactccctcacacatccatgttttctgacatataaatataagaaaacccagtgtattactctgttttcacactgctgataaagacatacccaggactgggcaatttacaaaagaaataggtttaatggacttgttccatgtggctggggaggcctcagaatcatggcagaaggtgaaaggcacatctcacatggcagcagacaagagaaaagagcttgtgcagggaaactcccctttttaaaaccatcagatctcatgagacttattcactatcatgagaacagcacaggaaagatctgccctgtgattcaattacctcccaccgggttcctcccacaacacgtgagaattcaagacgagatttgggtggggacacagccaaaccatatcattccacccggcccctcccaaatctcatgtcctcacatttcaaaaccaatctttccttcccaacagtcccccaaaacattagctcatttcagcattaactcaaaagtccacagtccaaagtctcatctgagacaaggcaagtcccttctgcctatgagcctgtaaaatcaaaagcaagttagttacttcctaaatacaacgggggtgaaggcattgagtaaatacagccattccaaatgggagaattggccaaaacaaaggggctacaggccctgtatcagtccaaaatccagcagggctgtcaaatcttaaaggtccaaaatgatctcttttgactccatgtctcaaatccaggtcatgctgatgcaagacagggctcccacagccttgggcagctccacccctgtggctttgcagggtatattcccctccaggctgctttcacaggctggtgttgaatgtctatggcttttccaggggcacagtgtaagctgttagcagatctaccattctggggtctggaggacagtggccttcttctcacagctccac

SEQ ID NO: 48301 - DNA, 4453 bp, Homo sapiens
cagatgttggtacccaacctttaccaccccaatattatttacaaaagctctgaaatagtttcaacctagcatgacatttcaatataaaagaactaataaacacgcagaattggtattagtatgtgtggtagtcctgcttcatggtgaggttactgtagaagatgatctggatgaccccccaaaccatgaaaaatgtgttttatctcaccaacacgcccattgctggaacctatgggcaaaggaaccaaaggtgtaattatcctattcgactatttgttacttcatgaatgtagttttggcaggcatttcagaacatgttcaatacacggtgacaaaatttagcaagatcaaagtcccacataaaggttttataattcctgcgtataagctgacgatgctgagggtgtctgcggaaaaaaaaaagcaggggcagaaaaaacattgctaggcaattgcagagaaggaatgccaattcctcatataacagcttctccgattccaaaccctagccacccatgtttatgcacagaaatggcccttgattcacattcaagtagtcctagcttctaaccagaggtccagggacccctcaggaccctctacggtgaagcccagcatcactttcaaggccaggccttcccttgcctctccctctatcctccacccaaagagggattgggcctctctgccttgccatcatacttgccagtgcccattctgttcacgagtttcttctcaccatggctacacctcccactgtcacattttctagcatggctcttacctgggctcctccatccatcaagggtcctctagaaaacagcctatcaaagatgtgtgggcaaggttcagaggcccaaggagatgctacagcacaaagggaccagtcatgacaagccttgaacagttcgaggcctgacagccaaggggagacacagctgtactggaggctggagagaggtgacgcgattgaggagggactgcccagggtcagctgccattataggcggtcacagacactgcaagcaccacagagaaaaagagagcaagcaggaagaatagatactgctggcctcttgctcctcctgacctaccactgactgaacccaacctaagccagagggcaacagagtcctggtgatgaacatccacaaaggcagcctccacggtgcagaccagaacagggaagggcagagaggactcaggatggacaaacagaatagccagcatagctgccatgggcgatgatgctccaaatcctccccacttttttctttttttaaactgccagttactctgcagaaaccaccaagggggagtttccaaaattattcattcaataaagttcttatagtcagagtcctctatttgggtctggccttcatcacggaggtggtaaacagccaggcatactcctgacctaagcaatgttctgatgatgacagtcaccaaacttttgaggccttctagtccagtgttacaaagtgtggtctgtggatgcagcaacagcataccctaaaacttgataaaaaggcagatgattgggccctgtccatgagctgttgaaccaaagtctctaaggctgaggccctggaatatgtgttttaacaagccctccagggattctgatgcaggcttcagtttgagaagttccgctttagccccacccttcaccgcagcctgaggctaacttctcagagaccctggactgagaagcccagcctaaggggctcctgactcttaacttcctcatgatgaccttcagcaggataccaattgtggagcctcagttttcttacttaatttctaccaatataaccagtaagatctctttcagctcttcagagagactaactctggaatccctcagatctgcaatttcaggcactgatgatgatgacagcaatgacaacagcagcagctcaggcttactgagcatcctctacataactaggtgggcactgcctgtgattcacagacggtgaggccgcagcatatagaaaagctcagtaacttttgagtctattaaaaaaaagactttattccagttatgaaaatagtaaaataagaatgtatatgaaagcgctttgtgaaggtaaagcattatataaaccacgacagagtgaacacacaactgcagttgggcttttttaagatctagcttcatttgagatactcaaggtagattagaacatgtctaggcagctttttttttttttttttttttttagagagttatgtgccaagagcagtgggaaatttgaatgcttaaacagtacccaaaagaagagaaaaccacctggtaagatctctgacagacacatagggttgctgccactaagtactcttctgacacctctcctagaattctgtttatggccaaacaaaccatttaatcttctagaaacagatttatagatgtgttctttttactcttttgatatgacagattcttgatttaattagatccctttcccattttcaaatgctccctctgctaatgcattaacttctccctctccaactgaagagatgtggttaatattaaacacccatctttccatttgtctaagattcaccccaaagtgtcctactggttgaggtgtcatctcaacacagaacactgcttggaccttggccagacaaggaacaagaaataaaacctgattccctatcccaccattggttcccatgatagaatactggtattccattttagagacagagactcacagaggttatttgatttactccaggtcatgcagcccttaagtggtaagctcattttaaaaaatgttctcttacacccacagccaaactgcattttaatagattgaaacaggcatcatacttcccctaatctccaaaagttattattatatcctcttctcaacgtaaaaaaaatttttttgcagatttcattcctatgtacaaattcacagcacaatataatgagtcaaccatttgcagtgtttgttcattacagtcaacatttagagtgtcagagcaagcagaagtgataagctgttcacttccctcaacagtaatgagagataaaataaatttgccgtcagcaccaaagtcctaagtgttaggcaatcacaagtatttgcatgtacacctcataacagctgcaggtaaatgatttgacaaggtcaaattcaactgaacaacaaaaccaccaatggactgagtttaagttgctagaccagttggaaaaaaatacaggaagacaaccaactaggatgcaaaaaccctggttttcagaattgtaactttagtaaagatttgttttgccttggtagaagtcctgaatgatattttctctacagataatacaaacagtacaaaatgaaaaggattttataagcaagaagtcaatgtcccatgaacaaagcagatgaatacaaaacagattaactgagtcacagaaggtaagatctgccaactcactatacaaattacagtgactcaaaggcatgtctatatctaatgtcatttagttatattcatggttctcagttttaggaaatttatatggaaagtttaacttttaaattttgctctcctaaaaaaagctgtaagaaaactgataattatgtatatacacacacagacacacacacatatatatattttaaccccctgcccccacttacaattttggtttcttccaccttcaacattactctaaggctattaatgctttttgtaggaaaaaatttaaatttattctcttctcacatttagatcattacctaagcaatatcagtgttcatatagattgttaatataatcttaatttacatttttcccacttcataaataaattgggattgtttgtataccccatgttaaagctgtgatttactatgatatttctataaactatgtagctatattttttaaataaaacacatggcttaccatagttcctttattcaaggacaccaataattttaagatataccatcaatttaataatagctttatagggagcaaaacagtaagtacttcttcaaatgatcacagcaaccgtaagatacatctcaattttgaaagtgtcaaaatgaaaaaaaagagactctaatcaaggacatacattaattatcttatttagagagaggatgcagaagaagtgttagactgtataatatggagtcagccttcttgggttcaaatttgactccttctcttattgggtgatcttaggcaactcaacctatgcctcatttttctcttcgggaaaagaagaccatgagaccatctgcgacataagattgttgttaccaggtctaaatgagttactgttcttaaagtacttcaaacaacctgatatgataaatgttatattaggatttgttaaatattaatagttatcatcattttcagcaccaccacctaccagggcttaccgaagcatttgctatatttggaggtgaatgatttccaa

SEQ ID NO: 48302 - DNA, 1779 bp, Homo sapiens
taactatttaagttccaatgtacccaacactttatattctattcatggaaaaacctgatccactgtgtatgtcattacagaggaagacactgaggctcagaatgctcagagaataactaatgcaaagataataagtgatagcactgggattcaaacccactctgaagccacagcctgtgtcttttcctgggatctaattatgtcaccaaagtgtgggggttgggagggaaaggaagaaataagtaaataaaatattaacttgccattgagttcctttgctagaattcacacgaaattaaatgaatctacagtttcttttccttcttcccaaataaatatttttgaagttggcatccacagagctttattttatctgtagccatagctaacacagttttacaccaaggatcaggatagtagtttgtcagcaagcagaggcagtgaagtcaatatttctcaaataagttcactatgtgtccctcatatctgatctgactcacccttcctggcagatgcatgcctctcttaatggcctttatcttctggctgccataagcagatgagaacaaagtaagctgggtgaattcacaaggtttttggattgaccttgatcaagtgagcatggctgattttgcttatgacacatggatgctgttttgttttgtattttagttgtttgtttgtttgtttgttttttgtagcaacatggtcttgctttgttgcccaggctgatcttgagctatttttaatttaagtaaacattagttacctttcgcctataaccacaatgcttctccccacttcccctaaacccaatatgtcaataataagcttctgtgtgcccaaataaaagtgaaaagtctgacattattaatggcatttatttacctctctcagagtggtaagataatatcagcaggtactataaggctatcacagtttagagtaaatagaccctttgccctctcaatgcatttgaggaaaactaaagttaattcagagcatggacttggctctacggaaacaggatacatagatgcaaacctcccttctggcacacactctgtaacctcgggcaaattacacctgtgtttcagtttcttcatctgtggaatgcaaatagcagcatctaactcataggctcataggcttgtagtgagagttgaagtttatatcagaatatgcatggtacataattaagtgctatgatgttagccattgatttcaatttaaacacaaagaataaatgacatgctttgcctgtaaaataggtgcctaaaacggcgatacattgggcatactggtatataatttggatcggtttctatttctcaatcaataaagtcaagtttctagcagaggagggtattgagtcagagctaaagcactccagcttgtacaaagggaaagggatactttgttcctttttgagacggaatcatctgggcaaagaaaaagagagaacttcattcagagggctaccagctgttcttcccagtttctcaattttgaagagcacaggccataagaaccctggctagtgaagggtggttaaagagaattaggcccttctgatgaccaatccaaaagctgggaatcactgaaggtctttggtgagcaatttggcacaactggtgaatcattctggctgctgtaaatgaaacagataccaagacgttgaagacagtggcagaggctgcagaaaacatcacagcagccaaagcccaaaataagtcagtcccagcattttgacagtatatacagaaaaagggaatagct

SEQ ID NO: 48303 - DNA, 2642 bp, Homo sapiens
aagatgagtagaacccaccaaaggtgccgccaaaccctggtgagcagggaaatctgagtaagtcagctctgtgtcctgaggccctggcggggcctcctaggtggcttcttaaagatcccaggagacaatcagcagaccttcctgcttctcttaaaaatacaaaacatgcctgacctgctcaggtcattagatgcacttagaactcaatgagggacactccttcaccaggaaatcgtatctgaacacaccatcaggaagtcaatattgaaggttcttgggggcgtgcaccctcctgctcaagagggtgtccaggagtattaagtgctggagacaccggaacccaggaactggaagctcacccaagagcttccgactcctgggtctgcccctcggcggtggagaccaccaaaaccagtctcgatgcccagagcttgcaacagcacctccaaaacaagcacacacgtcgcatgcgtcctgcaaacagggatgccgctcgtggggcctgaagcttgcggttgggacagggctggctggctgttggacgctggacacctgcagcttcccctccgagaagaggcaaacagctcgtcttcagccgatgcccggtcccgcagcctgaatctgggggccctggggttaagtcaggtgcagcctggtgggggggaggtgtgggggcgggggaagccgtcgctcagggggtggcacctcaaaacccgccgtcccgggcccctcttcagccgagtccggcagaagggcgtcccttccgccacctccccaacttccagacgcccccctcagcggcccggggggtgggcgcgggctccacgtgcgcgccgcccgtgcccactcggacagggccgggccactcacccggcccccagcggcgctccgcttcctccgcagcgtgagcccgctccgcagcagcgcgggcaggtccctcagccgcggccgcagcgacgccggcggctgctcgcgctcgggctcccgggcgctggggctgcggcgcagggggccgtctgccgccaccaccgccgccgcggcggccagggccgggctctcgcacggcggctgcatcttgacggagcccacggccatcctcatgccctgacggcgctgcggcgccgggggctcctctccaccgcgctcgcctccgcgcgccgtccgcgccttcgccaggaagcgagagggcgcgactgcggctcgggcgcggggcgcgctgccagccgctgcccattggcgcgcgccgcggcccccgcgaggctcagccccgcgcgcctcccctcccctcctctctcctcccctccccgcccaggtgcgcgggccccgccccgccccgccctttcgcctgcgaaagctgcctgggacctgtccccctcggatctcccactcgggacccgggaggaagagggcaccttgggcaccggctcatccacaggtgcagaattcccagaatctccggcaaacccgctcttctgtcctgtccctgtccccctaccccttaggctgaaaagtcctgcttcacttcttcgaatagccaggggttgacttggacttcaaccaagtgtgctggagagtcgtccgccctcccgcgcgttttgcacagcctggcccctcatcgtaatctttactcctgggaactgttttggccaaggaacttcaaaatagacacgctacaaggcaaacaccatgaggcaaaattgctttgcgccgacccttcttggcacacgcatccttaaaggacgaagggagaaaacttttgttggttatgataggtgttgagcagagtagctgcaagtctggtgacctgaaggtgaatctctgttagcatgtcagaacctgaccttccctgaaagcccgctgctgtgatgaatgtgcttggtgaactgtaaaggcctgccgtggtgtgaatcattgtttacacccttccaggaggcaggaattctggatcattgagagtgaaactattccagcagtgccttaaacgccagggagtgtgaatgttcacatctcagctcaatctgtcttcaacaagggccagccagggtgttgacttctcatcagtggggcgctgggatccccatctttgtctaagacttacaaaagttgaataagcttattcacatttttaaaaaatgacaagaatcgtaggaggtcagggtccagagttggtttaccattgtgccctcagccactcacatggtaggtgcttggcaaatatgtataaaaacatgccatgtaacaaaaaaggaggaacgaactgtgacctctgcccttaaggaaggtaagacttaacctaggagtagacaaacatccagaaaaacaaagatattgcacttgtactcttgctaattgccaagtaagtgtaggtaagaccacttcaggccacaggagagagaaatgcttctggcctgggatgggcaaagctaaatccacgaaaggaaggaagtttaaactgcaccttaagggtgagtggggaagattcaaccaggcagaaggagggtaggtgtccttcaagtaaggaagaaagacatgaggccgggcgcggtggctcacgcctgtaatcccagcacgttgggaggctgaggcgggcggatcacgaggtcaggaaatcgagaccatcctggctaacaaggtgaaacccc

SEQ ID NO: 48304 - DNA, 1300 bp, Homo sapiens
gcgtgaacccggcaggcggagcttgcagtgagccaagattgcgccactgcgcgacagagtgagactccgtctcaaaaaagaaaaaaaaaaagagagaaagacatgagaaaaacacaaaggtggtatcacacagaactcactgggcactgaaaatatgtcatgctagtgaagggaaagatgacataatgaagaagtaagagaagataccagaatggatgctagtaacacactgcagaaggccttaaaccctgtcaccttaagctgtgtgtgttaactggaaaggactttataataggactccatagtccattacagtttccaaatacctatcacatgcatttatccaaggctgaaattgcatttgtatgttaccatgtcagactctatccgtttttacagtgttaagatattgcagctccagttggtaattggtcgttgtcttgagccccagagtgccactcacccccatacctccaacttccccatgacatacaactaaagggtgaacacctggcccactagaagccctccaggacactcagattagtgggtgcttgcgccccatcaccccaatgacaacattgaatcataccatgaacttactctactccaaagtagaacacgtgttccgtctcctggtccaggttcctggtcttcaaacccattcacacagttgctcaatgcaaggccagcattccttagattctatgggatagaccaagcgtctaaagttcaagaagggcctttggaaaattggtttaggttaaggtgataaatgacaaatgccatttagcttcaggataaaaataggcaaacaacagggaatagtaggatgtgtacacagaagagccacgtcactgtttaactcaaatcaagcaacctttatactcgctgtgccctgtctggaatgagagtcctctgcaatgctgtccaacagaactttctacaatgatgcacattttctgttatctgttttgcagctactagccacatgtgactgctgagcacttgaaacatggctagggtgactgaggaactgaatttttaactttgtttaattttaattcatataaatttagatagcagcatatggctagtggctaccatgttggatagtgcagttctagaaatccacatttctctcagtcagtgtcttcagtttttaaattcaaatgtcaccatttcagtgaggccttccatgaccatgtgattttaaattgcagtctttcctatccattcctttcttcatccccttccgaatgccccacagagcttaccaccatccatattctatatattt

SEQ ID NO: 48305 - DNA, 1016 bp, Homo sapiens
cacttaggcaaatagtaagggtatgggagtccttggaaagactttcctttataatgaaaagcagtaccaaatcattttctaacaaagagcagcctgtaaagtggagctgcagatatagacaagcaagctgggagcttgcacaggtcaatgtcagcaggaactagggtctaaacatattcaagatggcggctccaacttcccttttctcccagccatgtgtacagtgaggaccagaaaagatggtgcaggccaaagggagaattcatttgcataataagattagcatggggcgaccagtcttccccacttgctatgtaaacgtcacacctgatcgaaccagtctgtgagccctaggtaaatcagacactgcctcctcaaaccgaactataaaatccggcacatccaccaccagccagtcttttctgctgggaagaccccccttctctctatagagagagctgtttttctttctcttctctcctgcctattaaacctccactcctaaacccctcatgtgtgttcgtgtcctaaattttcctggcacaggaggatgaaccctgggtatataccccagaccatgtagccgtttcacttgtgaatgatctggccaatagaataaacagaggtgacttcacctgttctgtaaatagcccttggttggcctggcagcttccacttcctgctgtcttggattgcttggtcttgggatgtgcctactcagaacccagcctccttgcagggagaagcccaagccacatggaagccctgtggaggtgatctggcagctgagctcccagtaaacaaccaacatgaattgctgccaatttgggagctactttggacacagtccagctgagccttcagatgactcctgtactagtgatgtctgactgcaatcgtatgtaaggagctcaagaaaaaactacctagctaagccccatcaacccaccaaactgtgagagatgataaagtgtttgaagccactaagtctagaggtatttgttacataacaatag

SEQ ID NO: 48306 - DNA, 1142 bp, Homo sapiens
cccaggcacttgattttgcttaccttttcctattgttttctgaaaatcacactgatgatcattgtacttgaatctacagggcttgattggcctattcatctagcaattacagttttgagggctttatacttttgtcttaagttcctgtaatataagcggcaggcatgggtttagttactgcctgggcagcctcctgtccagcatgggggatcttggaaggaacctcccaggacttaaccaggatgtctgagaaaggcagagagggagtcctttccacagttctactgggagactgggaatgtaaattcatgccactcactacaaacgctgagaagctcctgagcattgcatttgcttatgaaacatgctctcgacttgatcaaatgaaaaacgatgtgaactctgcccatgggttatttacccagcagtgaatgctccgagtgtctgagtttctactaccatggaagtccccgtgggccttgggctctttttctctgaatgtaaataagcctggtacctttgcatttgtcctcatatgtcatatatatatatatttttttttttttttttttgaatgacagaatcatctgagaggctgtgctctgggaagccagctcctgaggccaggggtcagcaaattccagctcacaggccaaatccagcctgctgcttttttttttaaaaataaagttttatttatagattgtctctggctgcttttatgccacagtgcagagttaagtagttgctagagagactgtctggcctgcacagcctagaatatttcctatgcggtcctctataaaagaagcttgctggccctgtcacggggtatggccccctctccagacttcactgggaagcctggtagagagtaggatggaggagcaggcataacctaagtgggttcatttactcttctctgtgcaaagggatccctcctcactcctaccacaggaattacaaagtttcttttatccttcttttacctttgacctttgggtgcacagaggtcaataaattatattcctcagtccatggtgcaatatgattgggaccaatgcttgctttttttttttttttttttttttgagacagagtctcactctgttgcccaggctggagtgcagtggtgcgatctc

SEQ ID NO: 48307 - DNA, 936 bp, Homo sapiens
agatgactgatggattcggcctctcactcatggaaggttttataaccccagcttacctccagagaaggcctcatgtgtcagtcaaaggctaaagaagatattcggttctcaattttagtgtcccataaagaagattgggcaaacacagaggaaaaggtcctgtgtttacttttaaagaaatgttaaagttattatagttattggattacatacatggattgagctgtggattaggaataacaggacctcatgatataatgtggtttattttaaaatgtaaacacacactcatatttcatggagcaatagaggaaaatttcttcggaaagagcaaatatgctgaggaaaaccagactcatgaattcctgcacattcctagctttatgaccccatggttttatttggttaatgttcactttccacacttggctaccgaaatagctttccattccaaggttgttactgcaaagtaaaaagctcaagtttccctctcacacttcacaggatattaatcgctcagagctcttgccctccctttcgcaatgttcctgattttcatacttccgattgagaaactaccacatacacactgaggatatcctgcttggtcagcaggctggctattctaagtgccaactctcaggggagatgtcttcagtatttctccagagtgttgctttggggggcactcctgtgccgtagtagttctgacacttatcagatccagatcattctactaacaatggtcttgagccaacatttgtcattcaaaggttgctctcttatggaattgccatagctaggcaatcatttcttatttagaaacattggacacttttaggtgtgctttcatggtgattatacggttttacattaagttatgcagcaaaatatcttttaggagccccagatactcaatgaggcaccatcacattg

SEQ ID NO: 48308 - DNA, 672 bp, Homo sapiens
ctctcccaatggagttgcacagacagtgctaaattctcccagcaatgatgtgtgacaatagatgtgaagtgttgcctactagaaaagctcacccaaaggttggtatccagggcttttatggagtaaccacatgactaaccttaacaatgtaagtctctagttgccctcagaggtcaaattggtaaggcagtggcctaggccctcaggcaaaaaaacaacaaaaacaggtgttcatcttaaattacattgttaatatataatatccagaagggcccatggcctcaggtatacaaataaactctcatggtgggattttacaagggcttggagcttatcagcaggtggtcaaagtccggtcctaaagacatttggaatgtgtggtgtttggacaacccaggcctgctgcgttaactctttactgccatctgccatcctgcctgcctttactgacaggaagccatcaaggaaatagttgcctagatagcaaagagctcaccagatggtactggaattgggtgcagtgctccctggtgctgtgtgccccttccctatgcaggcaatatgccctcagtagaacatgtgctagaatatggccattcaagcaggaagggcatcagtgttcctagcaacgtggctgaatagtccatcagtgtgaagatcttgcaggaggtt

SEQ ID NO: 48309 - DNA, 1955 bp, Homo sapiens
cagaaaagaaaagaaaaaactacagaataggtcccagtctgcaaccctaactgaaaaatattaacaaatccttgcagtaagtgaccgagcctgttggcaccagcctgtagtcccagctacttgggagactgaggtggaaggatcgctagagcacaggaggggaaggttgcaatgagccgggatagcgccactgcactccagtctgggtgacagagcgagactctgtcttaaaaacaaaaaccaaaaaaaccccaaatcctttaagtgcgctataatggttaagactatgggctctgatgccccactgcctgagcccctaactccctcagtcagcatagctgtgcgaccttggcaaaaaagtttctctacggctgtttcctcacctgtaaaatgggggcagtaatagaaatcatccaaacccttcatcgtacaggtaagaaagcagaggcatccaacgactattattataatcatgctttcatggcagtggtactttcacgaggtgtctcgattccctgaacaggactctttccacttaggaccacatggagcggtgaggaaaaacaccccgagaaccacctagtgctagagagtgaattagtgactttcacatccactggggtcatccaaccctccctacaatcccgagaaatatgacctccactttaaggatgcaaaaatagaaaaggagggattgcaagactgcttaaagaccatgcaactataaagcgatagaacgggaactcgaactcaggttagatcggccccacttgaccagacagcctcaggggccgtgcacggcagtgtcccctatttttctctccctcccccgacggccaaaaatggggctgctgtctccgccaccctcttccctccagtcactttcccggttcttctcccactgacccaggtaaatcacaagagggataaagccccagcgaatggcaaactggctccccttgaagagctgctgtagtctctgcttggcctctttgctcagcttcaccatggcgacggccgtgtggcgcagggaggaccccttacagcaaccacagcgtcgggaatccgaaagggaaaggaggtgcgcaggcgccacacacggcctttacggcaggagtcgtgagcgtcgccagcagaggtcgtaattcatcgcctttaaccttccctgctcttccgcctcgccggcagtagtaggcgcatgcgtggttgcgatcatggctggcggtaacttcgcgtttctgttacccatttttaaaacgcatcttcaggtgttccttccttctcatggaaggaacattaattaaattcagagggactgggttttagtcctaactcttattcctactggctgtgtaaccgtggacaaattatttaacttctcagaatcaggttgttcaaacctgaggttgaactgcaaaaaggttacgaagtgacactcagtagggcccgaatccatgttttctttgatcccaatcttttttaaaaaaatttcttttaattacttgccaacattttagaatttggaaatctcacatgaaattctggacttttgaagctgaggaattccattgcaacaatcaaggagactaaataggaaatgacacttctgtttggccatcttgccctcattggtttagaatggcagtggttctcaaccctggctgcacattagaatcactttaggagaggtaaaaccatactcacgctggagacctactcctagaaattctaaagagtttggggctgggaactggccattgatctgcctttgaagtttcccaagtgattcccaacctctgatgtaataaatttctggctgctgtcgtatttgagatttgacccccccaggtctaagacttaattgatttttaaggctgtaagacatttctaagactttgacttttaagactttcctgcctcattctgaaggtacgtagtcgttttctgtgcccaat

SEQ ID NO: 48310 - DNA, 2044 bp, Homo sapiens
gatgagtttgcacccccgacctccgctaatgttcacatcctttaacgggagccagtcttctgctacgtaattagacgagtcttgaaagaagcacccaggggcgtggctgaagactttaagaaacaccaggcaagggaggggagtgggtaccagagacacctaacattatttgagtggcaggagcttcctctgaccttcaacgaggtaaagagacatcacagccagcgagagtttggggcagactccccagactcggaggccggggcaaagtgggagccggggccaagtgggagccggggccgtgtggggtgggggggggggcccaaggcggggaaggcccgggccgccgacagggggcgcgcgagggcctccgggccccgcgggcggggcgggtgctggacccggaggggccttccggcaactttttggttggtgccgccccgcccaggccccttttaaacttgatctccgcagtgccctcccttttcggccgcggcgcgtgactgggtaagtgggctcggaccttctggacgcaggagccgaccacgtggctccggggctaccccgtgcgcttcctaggcgcgcctctcgctgcccccacgccgaggcctcggctcggcgccgcggggaagcctccgttagggcccctcgggggtgggggcgtcctcgtggcgcttgggcccttcgtcccgggttaggacggcccgtgtccttgtgcgcttgaaggggccgccccctttcctcgaggatcccacccccactcagcagaagccgccaggcgcccgtcacctcccgtgcctgagtccctgccgtccacgcattcggcctacaggcagcttttagtcctttttcaattaaatgattgcattttgaggatcaaattccaaccgcaggcggaggcgccgagccccggacggtctctgggttcttggtgcactcggggctcctgcctgcccaggggctgtgaccgcgcggacggaagcctatttgggaagcgagtgagatctgatgtctgaagcgctttaagtttctaagcggggcagtataatagcggggttagcaaacacacggaggtcatttcactcgcgcagccatcccccaccgccaccagtgccgttcatttgctactggcccgcagtcagataatttaaaggcttggagggacgagtcttgctggagccgacgcctacagtaagttgagcggagtgctgtgagccctaataagggagcctgctttcctcccgaagattcgcttttttgggagtggccagagcgttattacagcacagggcccgcttccaacgtttaatcagggtgtgaggaggcccttcgtggttttctgacctgggaaaagtctgaactactgggttctttctggcttggaccaggacaaggtgttgaacgcctaacttaggtctactaaggtgtagaaatacgcaaggctgcccctagagaacgtttgtctggggaataatgtaagtttttggagcggctctcctgagcatcgctgagcatactaattgttcattactggtacaaaatgctatataaagggatactttgcgaatttagtaaaattgataaagatctaaatttacatttgagtcaacaaataatctttgtggctagcataggtaccacagttctgttggaatgtgaagctcgtggttcacctgttttcctcagttgtgaaagatttgctgcctttttgatgaaaccaaatgggacccattttaccattctttaatgaggaaagcttgtacatttgcagcctaggttctaggcatcttttatccagcgttatagatagacccagagcatggacaattttccctccctggaatacctccagctctggcgaatagccctatatacagcacaggaagatagcggtggtaaggctttgttttaccattgctttaggtgttagagattcttattgagcccattttatttttattttattttatttatttttttgagtcggagactcgctctgtcacccaggctgtggtgcaacggcgcaatctcggctcactgcaac

SEQ ID NO: 48311 - DNA, 807 bp, Homo sapiens
taccttagtacattgcctgtctacgtgtttagcagagctaaaagcaggaatggactgttaaactaccatccttttgtgctcaagtgccatgaagagaagcaaacctggagttgaaagttttcaaagagggcttccaagtgaggaacttgggcatgtgaatctttaattatgactataaaagaaattgtgattggaaatagaatttttatgctagtggttatgatttcattgaaaataggaaatcttatttaagaactctggtcacaaaacctccccagatagtgacgtaaataagacccagtgtaacaactgtggcattgacatgtcagttcatgtagattgagtcacaatttgatttcgagaatggccatatcccattttgtcttactccatggtgttcctgagcacttggatacaaatagattctgtttcctaaaagtagccaaatctttgtagttcaagtgaatattccagactaaaatatgtgtctttttgaaggtccttaagccttacatacttaattgtgtaatttggcaaatatttgctgttgtgttgtgtcaagtcctgtgatagagacagttcctacctttctggagctttcacagtgtgactcatttcagtacgtaagtcggagccagttttaatagaatgttctctggttgacttctgttgtaaggaataatttcatttcatgtctgggtcaatatgtgaaagattaaattattagggcaaactgaaaaaaaaaatctagttttacccccccaccaccacattcccaaaataatttagcatggtttataacaaata

SEQ ID NO: 48312 - DNA, 670 bp, Homo sapiens
aggcctcctggttgcctctgtcctgatccccgcacttagctctggactgaagaattatctggagataatgtgctttgtcctccagtgtctgcctttgcagagcaccagccaggcgttttgttccaggctgctccagccaccctgctgtggcttccacatggatgtcctgatcaggtcccccatccaccatcctcctgggctgtcctgaccactctcgctggcctctatgtctctctgggcttggcctgtcaaggacctcgattcactctggactctgacccagagttcgcctgtaaaatccccacacttggctcttagcaagcagtgcttacaaagttaggaaatatttgtaaaatgctgccatggtataatgtgaagcgctcaaacaagtcagggctaatgatgcactgagaattatttctaaattgagggcataaagagttacagttcttcgattttaaaaagcaaagtgacttttaatgcatcaaatcttactgtagccagagtactgtaacttagtttccatcagaatggaaataagtagttactgagcaagcagctggatgagccctatgcttgatgatacatattgaattccaaggtaggccacaggccactcctcccggggacaggatccatcatcacagccaccaggcccaatagtgtgagc

SEQ ID NO: 48313 - DNA, 1724 bp, Homo sapiens
aagatttgaaagctgaaaacctcaaactgtaaagtgttacatgaaccaaagaggtggcccacctgctccaaaaactactgtgtgatccaaggataaataatttgcaaaaggtcagcttggccctactgcctgtagggcagtctctgagataagaagtagctgccggtggaacaaattccccctacctgaagagcgccgcggctgccaggcttgtgatagtgtatttctcagagagcagattctgtgcagtactaaaccacttaggcaaaattaaaatctttcaggaatgtctaaactcacaaagcacacatgtgcaagctgacgggcagacagcaaatttcggggaagcgtacaaacttgggggtgttttaatgcaaccattttcagccaaacccccgaggattcccgagtatgttaaaatgagcctcaggagaggaataactcatagaaagaaggggcaagggctcaagaagagatcttcagcgaaataaccaaggaaggaagcgtggctgctgtctgaacctctccgccctgcaggggaccaaagaccgactcgggccaacgctgctctccagggggcgagggcggggggtcgacagtgaccattgtggccaccagaccggacggacagtggcggcctcgccgaagtagagggcgcgagtgggagaggaggcagaggccagagcatccgccgcggcagggaggggacggggggctcccgccccaggcccacccggcagaggggcggccggtggggccgaggcggcggcacccgggtcacagcaggaggctggactgctcctcgccgggaaggaaagacccgagtcgcgcgcacaaagctgccgccctccaggcagcgggcaggctgcgcccaacttcggggcgagcagcgccggccgcagcccacccgcccgccagccgcccccagcgccccgcgccgcctcgcacccacccatggcgcctcgcgcgggagccgttacccccagtggagccgcggccccagggacaaagtcccggtcctgtcctcgccgccgcctcgccccggctcctccctgacaaaaaaaagttatccgttgccggacgccctgggggcccggcgtgggtctctcggctggactcaccagggcggctgccggagctccacctgcaggacctcgactcgtgaggctctcagcgacagcgacggaggctgctctgcttcctcccgagtagcagcaccacctgctccccttcttcctagcagaacgggtcccggtgagccatcttccccctcctctcactgactgacaacccagccgggagagccaccactgccgccagcctctctgacaggcacgaccagggacccgtcctcaagcagccaaccaccaccgccccacgccagttcagcctatcgccgtcctccggggcgggatcagaacaacttctccaccaatgagaatcttcttctgctgggcctggggcggagccatgaggcgccttgagtgggcgtggtctgagcaatgggcgtgatccgggcgtccgagggaagttgattgactgtaaggtttgcggtggccgctaggcgatgacaatcagcgaaggtctcttagattctgagccgttagggcttatggccttctcagaaaaaaataaaccttaccggatgatgtgaagggtatcaatttgtttctcttttgtgagaaaagagaaacaaattgataatttactagtcagtaggattt

SEQ ID NO: 48314 - DNA, 1866 bp, Homo sapiens
atgattagccactgcaccgcacccccagcctgggcgacagggccgagaccctgcctccaaaaaaaaaaaaaaaagcctcaatggtgtaaattattttacataaaatgtctctgtatagtcctatatagaccgaggaggaaaaccaatgagatataaagttttcataatgttaaataatgtacaatttcaaataatcctgtatattactatacagtagaaagaatatggttacaaaaaacatttccatgagggctgtgattgagttccgtgttcccgtaaaacacttagagaagcctaactgaagatttctagaaccgactgacaactgatttcagttgtaaacacacagtaagccagcctagttaggcagacattcattgcacgccaaggagacaccaacgggactgtgtgctcttgcgttatgaatcccacgaaaataaatcttgtgctccgtgtaacatgactttaacttgcagtaatatcctttcatcatttaatatttattgagcgcctaccatacaccaggctcagatactgcactgaacaccgaccctgtcccatgaagccttacactgatgggagacacctttgcatgttccacaacccaattatcaaaaaaaaaaaaaaaaaaaagataatcacgtaaccgaaacctggaaatctgccttgggcacacaaaagagcaggcgcgacctcggaccagctccgaggcaaaattcactcagcgcgggacagcgacagggaatccggccgcacctgtgcctgcagtctcattgctcggaacggcgcgccactgtgacgtgtcaggccccgcccctgactctcctcatagtgcccccgcctccttgcgcgaagtgcgcaggctcctgggcagggctcgggttctgcccggggacgcagcccagttggtagcgtcgctccctgagcgtttctaagggggccgcccggccttgtctttcggcagtggccgagccaccgccgcctgccgcgcgttccagagctgggcgctgcagctgcactgccgatcgccgtgtttggtcgatagaatccccagtgtgcccagagagtgcgacccctcgcccggcccggcgagccccgggcgtgaaccgagctgagggaggatggcagcctctggggtggagaagagcagcaagaagaagaccgagaagaaacttgctgctcgggaagaagctaaattgttggcgggtttcatgggcgtcatgaataacatgcggaaacaggtaccgcctctgtgggagtgacggacgacggtgggaggtggtccggggctcgggcccctggttcccggggtggaaccccgcgccctgtggatcgcgcccctctttctctgtcctcgcccctccttccgttttcgcaggcgagcgattccgcagttggtagaggggcgcgtaaaacaattctcgagcaaaagtgcttctcgtctgccgaggatgtagctcccaagtcagactcctgggggactcctcaggctggctttcgccgtcgggtatcggttgtgtaacagctctgccctagttatctctttgtggggcgaggatccttccattggcgagccgttttaaggtgccgtgagatcttgtgtgaagaaacccgttggcatagcccaaaccgaagcccccaaagggaggagagttgctggcctgacatcagctgctcttaaataaggatccccgccccctcctgtgttccccggtggagctagttgaagaggagtcctcctgttcgtgctaatttagagcagaagcagccatcgataaataccatgccatcttctaagggcactgtgcgcctctgttattaagaggagctctttgttctgtccttggtgtgtggtgcattcgtgaa

SEQ ID NO: 48315 - DNA, 1598 bp, Homo sapiens
ctaacacggtgaaaccgtgtctactaaaaatacaaaaaaattagccgggcgtggtggcgggcacctgtagtcccagctactcgggaggctgaggcacgagaacggcatgaaccttggaggcagagcttgcctccaagctctgccactgtactccagcctgggcgacagagcgagactccgtctcaaaaaaaaaaaaaaaaaagaagaaataacaaggtttctcagtgtgtagtaagaatgtacttaagtggtaatacttttccgttgcagcatgtcctaaaagaaacattgtttcctcttaacgtcgtctggctttatttgactctgttatccatccagatgaaaggctaggcagtttgttactttctcagcccaagctaagttttaccgtctcagcaagaacgactcagtctctcaaatcatagctaattctcctctgagggccttgctgaagttctgcgtttgcttgctccgctttcctctcattttggacctccagccttcctgtagtccgaggccctgcaccggggtcaaacgcgcctccggtcttcacgtaaccgttcaagcatccctccttcccaggacacactcaaagcgtcagagcggtccgctcttctcaagtcctattggctcaagtccatgcgtctcatggcactgccgggtgagaggcggaaaaaggccttcccaggcgcgagaagatgacgtcacagtagcccggccgggcgccgaggttgccttagggctctctgcccagtaacaggcatcgaacggtgcagactgaagacgccctccgtcagcgacgccgtcgcaatggccatttgtcaattcttccttcaaggccggtgccgctttggagatcggtgctggaacgaacatcccggtgctaggggtgcaggaggaggacggcagcaaccgcagcagcagccttcaggtgactctcctctgaatcctccgcggtaaccgagccgggaagggtccgccggcggggaccgggcgtcccgcgtgtttcccgctgctggtgaccccaacgtgcccgcgtcgcggccttgccggccctactgggccctgcacaacgtttttaaaccgagggttttatctacatattattcatgtggtccgtttttattgagcttctgaggacctgggtttgggcctggatgcttgtgcgaaactgagtttttaaatcggaagtacctatcgaaactaccttgtaggtaaatgccggaattgaatataatttttactaagttgttttttcgagggtgaggctagcagcttgggtcagaatcaggacttcattttggagaagtcgtggacttctttgaaaaaatctaataaaaccggccgggcggtggctcacgcctgtaatcccagcactttgggaggccgaggcgggcggatcacgaggtcaggagtttgagaccagcctgaccaacatagtgaaacaccgtctttactaaaaataccaaaaaaaaaaaaaaaaaaaaaaatagccgggcgtggtggcgcgcgcctgtaatcccagctactcatgaggctgagacaggagaatcgcttgaacccgggaggtggaggttgcagtgggccgagatcgtgcc

SEQ ID NO: 48316 - DNA, 1105 bp, Homo sapiens
caatccttgacttctgcctcctgagtagctggcaccacaggcatgcgccaccatgccaggctaattttttaattttttgtagagctggggtctcactatgttgcctctgcctcccaaagtgctggtattacaggcatgagccggggaagggcactcctgtaagggggcacggaggtctgaaagagcacggggagtatggccaactttcaggatttttagcacagctagaaggtaagtagagagagaggaagctggaggcacggccgcctgatcacaggagcccttccacacggtggcgctgctgggtcacccaagacctgagcaggtgtctccaggacgtgacatctctcccccgcgcccttaccacagtgttccagacatgctgactcattctctaaatagaagataagctgacccaaagactatgtattatttaatagaaaagattactgaaagcccagagggagccatatatcttctgtgacggctcccttcctcatttatttaatggcattataagcggcatgtcctctaggtggaagacataactaacatgctcttgcttctgttttaagacccagcctcgcctttaaggatggcaaacagtgccctgatctccgttggctgcttggccatatttgtcactgtgatctccctcttggtgtacaagtaagtttttggttcctacgctttatatcactatagtgtattgtcaaaagtgaatatatctctgtgtaaataggcatttttcccttttttgcttttaaacattttgtgtaggggaggaaaatattacattgaatggtgaataccaaactggcctgttaatcttgttgtggtttgtttttaatcctaaaagatgctaccagatctcagtaactttacaaaattatgtcaacttaattttaacatgatagtctcaaattatagtaagcaggcacatttcttgcatgaacaagagtaaataaatgtactttcataagacaccagtgtcttgcaaactgtcaatcatgttaaatggaatgaatccttttatacctggcatgaaaaagattgtagaaagttgtatatttcaactgaagatcttttaaaaataactaaccaa

SEQ ID NO: 48317 - DNA, 2606 bp, Homo sapiens
tgactgtactccagtctgggtgacaagagtaagaccccatctctttaaaaaataaaaataaaaaagggtatggtgagtttgaaaaacagcaaaaagcagataaagcgaaaatgattgtagttgatagaagggcagcatggaggatgaaaagagtagaaacagactggagacaggaaagccaggtaggaggcagtctctgtaattaggcaagaactaatgagggtgtggactaaggaagaaacagtggaaatgaagacaagaagctgaactcacagaaacattttggaggtcacataagcaggattttgacaacagattcgtttgttgtatgaagatcctggactgaatgaagtctagggtttgggagttttgaagggataatgacccattaaatgagctggcaaatacaggtggtaaagcaggtctgggatgttcagagaagggtgggaacacggaatggatgccagaagctgggagaaaagccaagttcatgcctgtggaaaaatggaattgaggatggggctaaaattggacagaggaaacttaatctgtaatgtttttcttcttttcaaaaataacttgaagtggttgtacatatctggtgtgatatacacaaatgcttaatttctctatttttaaaaaacttcccaaaattagtgcttggaattatttaaaataatgtagcaaacatttttggagtgcctgctatgtgtctggcactgtttcaggcatttgaaatatttgctctctatgaagccttcctttcagcagttagcaggcctggagttcagaagccagaaactggcttctgattctgacgcagtcagtaagtgtatgacctgggcaagttgcttccctgcggcgtcccacgcccccaaaaccccccacccccccacccgtgccaggaatctatcgcagttctcaagtcctgtgacttaataccgcagctggcacctcagaattccttattcttacagagctggtccccacagtaccgcccctgggcgtaaactcctccatacagggagtgtagatgatgggctgacctaagaacggtttccaaatggtcctttacacctctgcctcccaccccactctagcccaggataacagattttcctcgcgcaatttcaaatttgcaagggaatcttgaatattttctggtaatgagagagggtagattatatgtcctaatcccagcctaatcagattaacagcaacttctggacattcagtaccaggaactgttttaggtgctgtggagagaagagttaaaaatgaaacaaaaattattgccttcatgagcctcacattagtggacagagtccaaaaaaaaagtgacaacgtaatgcgctactgcgacacaaagcaaagcaaggtgggcaagcaacactagttctttattcccgcacgccctaatccccaagtagctcttccgggtcactgcagtcttcacgggctccagactccgcccatggtccgtccttcaggccttgactccgcccacgcatcgacgtagaatttcccggccgggctccatgaagtaccacccacccgcgacgccgacgcaaggctgctgctatggggccgggcggccgtgtggcgcggctgctcgccccactaatgtggcgcagggcggtttcctcggtggcggggtccgcggttggagccgagcccgggcttcggctgctggccgtgcagcggcttcccgtaggagcagcgttctgccgggcttgccagaccccaaactttgtccgcggcctgcacagcgagcctgggctggaggagcgggcggaggggacggtcaacgagggacgcccagaatcggacgcggcaggtacgggcgtggagaagaacgaaggcgaccctctccgggcagtctggagtcaggtcccagccaaggtggctctgggttcccctctatgtgcatttctcttggagtcacaaaactcctgcacatccagagctggaagggacttcaaaggttgttggcgccaaccttcccgtttcacagtgaagaaattgagggcaagagatgaactgcagaatcccagcctcccggacggccatctcccacccttggcatcacagtctcaccgtcctcacttccttttaccctcttcctaggatcctgggaaatgggtttgtggggactgttggggcttgaggattctgaggagccagggtctgggtgcgaaggggtgcgtaggaagcgccagtaggagatgggtccaagttaatatcctctagttattgctgacgtttttagaaacttaagaatggtaaacagatcacatctaagaatgtagagtatgagagggagaggccttagtgggcttagctactaggtcctttggagtcggctttagaacttgggcgagcttttaaatttacagcctgtaatactccaagctgaagatcagaatatctaaatctttacgggaaaaaaaattagattttcataggtaacagttgttaataacccggtggttttatatgaaaactggaaggttcaaaataataattactcaaaaatgtagctctttcagtgactgatcttaggccacagtaattctcctaggcctcagtttcttcatctctcaact

SEQ ID NO: 48318 - DNA, 2091 bp, Homo sapiens
aattatttgtttcctgggctttgttccaaaaagaattttatgctgcttataaaatacacataatctgtaaagataaaacaaaggaggtgaagaaataagagcatagggaactgaacactcaagataagatgaagccaaaaatgctgttatacaaatctggctttaagcttcctcgcagctaattttttaaaaagttagttgcatgatttcccatgactatgagagaaaaactattcatttacttattaaaaaatgactattcctggtactggtttcagagagcaattcctaaatatccccagagaacactaatgtagcagcatcctcctcagagtgaaagcctggcccgaacatgcatgtgtcttagcctggaacacgtccaaggctgctgttgtgagaaacaaaaacaaagttatctttctgacatagtgatgaagggctgtccatgttcttgttttgctgatgagaaataacaaacccaaaatgaagcttaagcataaacttaagagaaatgttgtgtgaagctttggaaaaggaatagtggccagtagataagggtcaaaaggaccaaaatgtaacagaaaaaaagggcacatacatgaagaatcaatgtgtagactttaaaatgtcctatcctggaatgaaaacagaagcaacagaacttgtcaaatagaagcagcagagttagaagcaaactaagtgtttttccacaccaggagatgctgccctagaatgacagacaatgatgtgtgctgttggcaatcatgtcttgaagaaaagttgactcatcagatgtctgaggcttggtgaagacatttctgaacgtcgtccaattccctttgctccaatttcctatccatgaagcatcttcttaaccaaagattacttttcaagaaaattttcctctgggaatgtaaggcagctcacataaatatgctgtcaacttttgccaatcattaaattggctctctggtacacttcattcttatatgggattcagaataagccatgagccgggtgctgtggttcacgcctgtactcccagcactttggaaggctgaggcgggcggatcccttgaggtcaggagttcgagaccagctgggctgatatgatgaaaccccatctctactaaaagtacaaaaattagctgggcacgtgactgtaattccagctactcaggaggctgaggcaggagaatcgctcgaatctgggaggtggaggttacagtgagccaagatcatgacactgcactccagagcctgggcaacagagcgagactctgtctcaaaaaataaaaaagaaaagaaatcgagactaaaataagcctatgctagaacaagcctgtgtcaggatttggacaccccaaataggcagataatttaaatttttacttgcaaaactcagcaggcagagcaaaagttataagcctttttcacctgaatttaagtctatgagacctaggttggaaaaggcccattagcgttacccagtcttgttacacattccttccatttaagttaaggtctagttgcattgtctgaaccttttcttggatacattctttgggactgaaggatgttcacaggacataagctgcttcccaatggatttgtgccagatgcctatcggcaaaacttcctttggacttcttggcagactctcaactacggcttgaaataacagaagaacaaagctgctcaactgaaagtttgcataactggtgaagtctgccaatgagtaattcctaatcatctatcgtgaagacatacaagtatgagcaaacagtaaggttaagtgtatttactttgtgggggacaaaatctaagacatcacaaaggcatggagacatgcatgtcagccaacatgatcagcctccaggtacctggaaggatgccacggtttccctttggcttgtaaaatagatactcctgggtttttttgttgttgtttttaaatggattttggtctggaactgaaactaagtttactcaactccatgacctgaacaaaatattgaagtctttaacattaaaaaaaaaaaaaaaaaaaaaaaggcaaagaaagtttttcaccataactagataaccaag

SEQ ID NO: 48319 - DNA, 1571 bp, Homo sapiens
caaatgtaaggcttcatgactaaattggttctaaaaacaaaacaaaacaaaacggtatgggcaaataccctagatgacacacaacagaagacgggataggaaactgtggtgaggatccaacactatgcagagattagaatcagtataaatacactgaatgaaaaacccacaaaactctgcagaatgatctttgtaattctgaaagttataatgcatgggacaaagtctacaaaactctatggcaaatttaacagtggttatccctgaatggcaaaaaatccctttgtctcactgctttatttctttttccaaaataaatcttttatttacataattgttaaagtttaaatgggaattttcttacctttagccactggccaagttgcttcaaacacttctaaacataaccatatttaccttatacagatcttcacaatgatacaaaggaactgcaatgatagtttctttcttttttttttttttgagacggagttttgctcttgttgcccaggctggagtgcaatggcgcaatcttggctcactgcaacctccacctcccaggttcaagcaattctcctgcctcagaatgattgaagtttcaaagtatgaataaacattcctattccctaacaaaaataaacatcaggataaccccaaacaaaagaaagtataagaactcaatgtctacacattttctagggggttatttctttgtcacacatgacaaatcctctcatgagtaatgtctgtccttgactggcttatctcaacatctctggaagagggaaggaaataggtgagcctctctcgctctgaggaacaagaaaaggtgcattcactaaacacatacttccatttttaatgaaactaatgaaatgaaatttaaacttgtcaaatttttattttaataattcaagacttaagcctaaaatgaacacatgtattaatattttctaaaatatgtgtactattaacctttgatttattttagccacaaggtggcaggaatttccacgttaagttctgtcttaaagatacagccgtatttgaggactcttcttaagtgacattcatagagctttaactaacagaggcagctacaaccacgttaaaactagctgcctggctcctcagcatcagtgaccagccatcactggaaatgaagtataccaaacaataacaggggagcagaagcagcaatcaaacatgttggaaaaatacataatagctgctaacttttgagctctaccttacaggtattatgaaacatgttttggaggcattatcttagtttttctcagtagcctcattagctaaagactacagttattcccattttagaaatggggctgaaccataacagattaacttgaccaaagtcagctagaaaagtggtggcacacagtctgttccatgcaactgggctctggaattgaactcttaacctccaagctcactcatactttcacaagtacatcaaggtcacatagccttccaaacaacagatgttacaaagagaaaactgagaattaccagcatagccctttcacctaaagattgagctttgggtg

SEQ ID NO: 48320 - DNA, 1988 bp, Homo sapiens
tatttctccgaccccaaatatattaataaaaacttttttctgagccctcttcggtgggggatagagtgagaagagaaatgggagagggcctgttaattttcaggtcatcttttaagttacagaacagtatatactgactagttatcttaaaaatactgagccaatgaattcgttcagctatgtaagattaaagaaagacagatttttttttttttaccgtaaaaacctgtaaaggagtggtcagtttttagatgaaaggtcataggaagaagagcattaaaagttgagatataaagaagagaaaaaacccaacatcgaggaattagaaaaataaggcgtgacagcatttccacattcatttcgaagtgaaaggaaagtcgaagggacattaagggaaaagggctccttgcgtagtttcccctcacagctctcgtcttaagaacgcttaagggtcggtgcggtcgttgactaaccacttcattaggctcgtcccaccttcaacctcaaggctttcgcctttttagacgcaacgccgccggttccaacagagacgcggccgctcactgaaatagagagccaaggagacacaggccccagctagtcccacgccagcttctccccgcccggaaagcagccccgcgcactttcgatcccgagaccctctacgatgctcggggtcgccagaaatgccaccgcaggaagcacctaccactatccggacggaggggagctccctgccgcctcctcccgcccaaccgcgacggggacccacacctcggagcagacataaggaagcctcaggggtggggagaagggaggaagcaatgcgggggcggggagggaagaggacccagaagtccaggtatcagtcagcctccaaaaaagggggaggggtgttatccgtggtgtttggggaaggagtggaacccagaagccatcttgggatgggaggaatcaatcgcgatggctccagaggttgctcctcgcgggactacccgcaaccccgcccgaccgcgcttgttcccgtgaaaccccgagcattgggccgccgcctagacggctcccgcggctttgtactcactctgccctcgaagttgttttcctccacatcactcatgtcgacgaggcgctccccagaactaaataagagacaagtctcggctcgagggccgatggcctaattaacccgctgactggaccgtggggaagaggaaagagtcggcaaccacagccgctccactccactcccactcggtcgcaggctccagcaaaatggcgccggcgccgccagaaatctcctggcctcctcagagcacgacgtaaagggggcgggcgtctctgtgacgtcacgaggctccacctcccgcgaggctttgtgtcggctgggcctggagcgagggtggaggttggcgggcggcctgcgctctcaacctgggcgccttggaatcgcggtcccgtgctgtcctccaaacttcagactcacctcggacgcgtcaacctctttgaagacttttcagtcgccagatgagccttatatgaccttagcccctttaaatattgtccaagtggattctgatgtaagggaacaaaacattggaagcgtttttttatgtttgtttattttttgagtcagggtctcgctctgtcacccaagctgaagtgcagtgaagcgatcactgctcaccacagcctcaaactcccgggctcagacgatcctcccacctcaggctcccgcgcgcgccaccacgcccggctaatttttttcttttttgggacggagtctcactctgttgcccaggctgaagtgcagtggcgctatctaggttcattgcaacctccacctcgcaggttcaagcaattctcctgcctcagcctccccagtagctgggattacaggcatgcaccaccacgcccggctaatttttgtatttttagcagagacgggggtttcaccatgttggacaggctggtctcaaactcctgacctc

SEQ ID NO: 48321 - DNA, 1838 bp, Homo sapiens
cctcacaaactgctgggattacaggcatgagccaacggcgcccggcctccacgtacataattacataatctatgaaaaaataattttgtttcttcctatttaatcttcaatccttttatttttcttgcctcactccactggctaaggacctttggcttcaataatgggtagtctcatctgtagcacacttaatcatcactaagctttcccagcctcaggtcaatagtattaggaggttggttcctcaccggagggtcgggaacaagacgccagagcccttcttccagcgcctgcagcgagttaaggccgagggtatgcctctggcgggctcatcttccaacacagaagaccccgccgccctctctggttgccgcgcagctgcgtcgttctgacccagggtaggtgcagggcggctggaagcacgtgccgccgcttcctcattctgggactacatcccccacaatgccgcgcgccgcgggcggctggcccccgagtgcgggaagggccggcagggaggcggagcggaagccgagtgcgagggacgagcggagtaaaatctccacaagctgggaacaaacctcgtcccaactcccacccaccggcgtttctccagctcgatctggaggctgcttcgccagtgtgggacgcagctgacgcccgcttattagctctcgctgcgtcgccccggctcagaagctccgtggcggcggcgaccgtgacgagaagcccacggccaggtaatgagtaaggggcgagtccgccagccgggcccgcacctctcgcgcgcccctcagcctagccggccgctcctcccccgccgcgcccccgtccccggtccccgccccgctagggccgctgctgcggaaacccggcttaggaacgggccggcagcctccggccgcggccgggaaggctctttgtcccttcctttgggccgcgtctctgcccctccgcgtctgacagccgcggcgcctcggctcgggcggagagccgagcgtggctggggctgcgcgagtcgagcggggcgggcttggtccggagctgcgggatgtagatcccgggcggcaccgcactcacttctttttctgtttttgacagctcagttctcttctactttgggagagagagaaagtcagatgccccttttaaactccctcttcaaaactcatctcctgggtgactggtaaggatgaacttaaactgccgtgttgattgttgactgtgacggtaatgagaatggctcagccagctagggttcgaatcctgcctgggtttctctcactgcctgccttggtgatcttggttacttaaaggctctaagcttgagttttctcatccatcaaaacacacacctgtaagtggttagaattaggaatatagacctataacgtcattagttcttcatttgatgaaaagatcctttgtgatactttcattagctatgactgaagtgaccgaagtggcctctggacttgagttttgtgcttttgtttgtttaatcatcctgggttgtgtgttcttcactttatcttaaacctaaccaaaggattcattaaaatatgccgtcttcctaatttttgctgttttaagatggctgagaatgttcttaggaaattgatgactctgcttttctgtggatcagcttcagaggtacaagtattcacctctcccctccccctcaggtgtgtcctttgggaatccttagaggcgctaagtgtttgtttcgtcagagtaggcatccaggtattttacagtcctgcctctgggcttcaccatatttaacctgggtcaacttttttctacatctgtctgcatcttctcactgattaataatttct

SEQ ID NO: 48322 - DNA, 456 bp, Homo sapiens
tttattgcgtctatttgactcttctctgataccaactttatcaacttttccttaaaagcgaaactggatttagtgcagtcaacgatggactgtctgtatgccaggtgtatcccttgtgtaactgattgtgtaatggctgaaattgagaaattggggcagaagtattgagtggctctaaggatagccaaggatccaaggtttgtactgtgtacacacaaaggaacctatgcagatgactgcttagtacagagagtagctcagcataaatgttacattgtggccacagttgacccttaagattcctggagttcctgtcatgtacatttctaaccatagatacaacattgaatggttgccagatgattacagagcccctccattctaaatcttacaagacacaattcctctgcctttctgcaaccaatgttctcttgttgcgagttcattacacatgca

SEQ ID NO: 48323 - DNA, 1732 bp, Homo sapiens
ctgtacaaagaaataagccattttctatgcgcctgttatatgcaaggcactgcactcccttgtcacttgttaatttacaagaagactcgccggtccagggaagggagaggggaataggtgcaaggtttgtggagggcggcaaactgcactccatgtggcgcgaggctgcgcttgcggagatccgggttctggtgcctggcgccggcagccagtaggggcgcgcgtcctgcgcagttgccgcgcgcggcctcctcgggcttcaggccgggccaatcaggaggcgggcgggagggggcgcggtaccgggagggaacggggcgggtcgggcttcgaggtcagctggtccgcagggaagcctttggcttccccaccggcaatggagcggttgacgttgcctctcggcggcgcggcggcggtggacgagtacctggagtaccggaggtgaggctgtggctccgggcctgcccccccgccgctccgaggggccaggatccctgggctgggggcgcgagcaggggcccggcgggcgtccgcgggggttcccggaatctgtgcctgggctgttgggggaggcctagatgaattccagtttagtctttgcctaattaaatattgtagggccacgcggttctatgcagtgatgagtcttccaataacatttaagaggcccctctgctcccttccaagaaggatgactaactctagattgatacagaggtccagctgttttttaaatggccattgaaaacaggcacatcgagtactcggggctatagaagttagcatacatcaaattaacccagtaattgagtcaaccgtgaacttctgaacgcgctccccaccccgaggtgctggttttaggagaaaggcaccgactggtgtttggtattctggagaaaccccttccgaaactggaaacggagtcgctcctttggcctgaggacgcggttcattgtcctggatcctgaccgaggctggtgcacctgcagcgacgcgctctttttccgcttcctggggtttttgatcgtccggaatctgggcggatgggaagtcctggagaggaccgcctgaggacgcggagttggggcgggaggatgtgtgtgtacaagcggaggggagacgctccaggctccgccagggaggccggagcgagcgacaggggctcctctgcggcatcgtgggtggcccagatgacccagaggtgtgcgcgcagacggccccccagctgactgttctcccctgctctgactgccctgtttgtgtagttttgggtaacccttagaactgcctggatattctgagccagaagaataagggctaggagcttgatggggtcagttcccacgcccggttcagggtcagaacaaccaccatcccgtcctctcccagagcagagccggctcctttagcctccagttctccagagcttttgcctgggagcaagttgctggagctggtgttgactgataacttggatatttagatatgtgaattgtgggcctccagttgactcttgcctagctccgaacatgttagggcagacctatgtatgtagttatttattttattgagaaattatttagttatttattttattgagacggggtctgactctttcccaggctggagtgcagtggcgcgatctcggctcaccgcaatctccgcttcctgggttcaagtgattctcctgcctcagcctcccgagtagctgggactacaggcggccagctaa

SEQ ID NO: 48324 - DNA, 574 bp, Homo sapiens
tgccttactattaattagtgtctgagtcacctattgttgggaggtagttgtttgtgtgtgtgagtaggggtgtgaaaatgaaatattttacataaattctttattagcttaggtacaagtatatttatttcctgttgcagttttctttaatttattgtattgggctgaacagaacttcctgtttttcttgtaaaccattccctacaaccaccataactttccctagcacctgtgagctctatacttgttgtgtttggacttgttccatcttaaatatttgtggtttctgcctctgtggattataccctgtaaatcttactccctagtcatacctaggttgatcagttggcagcctgactgcctctgaatgagaagtatgagcaggataactaggcttttgaaaatgccaggaatgtttagtttggagaagggatttgattttggttattttacgtattagattctaactgatcacttctgattatgggagaaagaagatgacagcagaatgattaattttttaatttctatgaaacacaggcagtgtgtttataaacattttcttacattaact

SEQ ID NO: 48325 - DNA, 974 bp, Homo sapiens
catcagaatcctttacaaacggcccttttacaggttgctgaggtataaccataaggcaccccctttcctccctgagttttacaagttgccctccacttgctggagtggctaagcctccttccctgctgaccacaaagtaattcttcagtagatattaggttggtactaataggcaagaggaactttgcacagcatgcaaacaaacaaacaaaacttttgctgcgtaaataaactgggtgcagtggttgtccagcctctggctgtgggttcctaatctttctgccttcctgccagctatttttagaaaaacggacaaagtttgtttacaatgctgagtccactgtcttacattccacagcacccaggccaggggtttctctctgagtccacccagaacagaatccagctcaaagctggctaggcttgattgcagcttcagggggcaaacgttactttggactgaagctcacgacgtttgcattgtgtgtcctgttaatcagggaatcttgtaagaccccatggaggggactagagcgttgctgtagtgacagagatggaatttccttgcagttcctggtgggtgaatgttcagagcagttttttatttgatttagaaagctgtagaaatgtgacattttaaaactcttaagtgttgtggagttatatccatgcccactgtgccagcacggtcatctgggcagagctgtgtgggtttctagttaaaagtcacaaagttcagcagtcacctcaggtgtgtgaccgattgctgtgccctgccaggtttctgaggctcggcacacatcatagagttgaaatactgccaaagtcactcatttgttttgacagtgatgagggtagtggaaggctctgggcctctttgcttccctaaaaatataagctgcacaaccctactcttggcttctgtatagccatcggggatgagaggatcaaggatgagagaatgtaatacaaac

SEQ ID NO: 48326 - DNA, 1043 bp, Homo sapiens
acacagtgaaaccctgtctctactaaaaatacaaaaaattagccaggcgtggtggcgggaggctgaggcaggagaatggcgtgaacctaggaggtggagcttgcggtgagctgagatcgtgccactgcactccagcccgggtgacagagcaagactccatctaaaaaaaaagaaaagaaaaaaaaaagggtgatcatgtgtctggagacatcaagacttcagaagtcaggaataaagttttctgttgatattttttagggagtccacgacctaatggctcaagttctcatttattttgagaaccagagtaatcctgacagggtaatcctggttttgtttcttgttttgttgatattgttgatctcgggtacaaagtgccttctggccgtggggcatggtttgcagttgctcataaaggaggcacagcaaggtttcagttttgctttcacagacacacctagtccttaatcccctgcaaaggtgttgacttgatcataaaagtttgcttagcaattttatgattcatatcattaattggctgctttcttttatttggctggttttactaacctaggtataaaaagggatgttggttaatgtataaataccttactgtgatgtggttaataaaactagagtcaaaggatactaaggcttgggagctagtttctgtctgaaagctttataaagcctttagggttgaatttttattcattttatgtgctagaagtatttttattgctcttattaacttgtctactgagaccaggaaccaagacctgtccagttctcctctcccaggtttcactgccagtagctataactgtaggggcttcctacagcttcccatgcttctggccaggcagaatatggcatttttttttaccatctataaggctaggatttcataagctacaaagcatgtgccaggccagatttttctgtggaaaatttataggcatcattttctcatatgacgtacagttcctgttccttagtcataggcttatcatatccaattaaatgagatttgtttttccatg

SEQ ID NO: 48327 - DNA, 2359 bp, Homo sapiens
gcattttagagtgtccacaatgcggtgatgtttggccctttcacaagttaaaaggattgagttaaagggagcaatgatctctagaaatagggtttggtggagtctctaaaggggtgtgtgtgtgtgtgttctgtttttaaaaactggaaacttctctgctaaatgttctgtaaacaagctctgttggattagcagaacttgcaaaaattatggtgactgaaaccagaaccattggtatgctctagcatgctgtggttttcaaccctttctaaaagtctcttatgcaaagcagatttcagcaaagctgctctggtggaagagggagacatgccccatgcccactctgcttttcctcaaaatgccatcctctcccctccacgcggtgacagggaactgagagacctaagctcccaacccaacgatcccactaactggctgcgtgtgattttgaataagtactgacctccatattttcatttcccttgcccatgaatgagatgactaggcactaaggtcccttccactctaatagccatgattttctgagtcttcatattcgcttttcctggagtccctccagcctccctgagctatgagaactccacatttggcctccaacattggcagagattatgccttttcccttatccaagaggagtcagaattttcgtggtaactaaatgatactgtatctggtgctgtaaaagagattataggctgtgactgtccagatttgcaatgtggtttgggggaaactttaggagaaataaacattgggagctacagataaggaaccagtgctaagaagggaaggggcaggatttctgtgaataatcacaatgtcaatgacattaaacaaacaacacgcatatatagttaacaatcagaattaattatatttatatctatgtctcagacactttttgcagtagcatgagaacagtgatcctccctcaattctgagtcaggatttaaaattccagaaatccttccacccccaccccacatacacacagaaatttcaaattcaattgatgtgggtagagcctagcttccagtattttggggattctgaagtcagccaaggttgagaatggatgtatttagagaactaatgtgcctgtctgtttcttcatggaggcagacatttccacgtgcccatcaaaagcaaataacaaaactgaaatccttttatcatttacctgactaaatctcactttcagaggctgtcattactgttgcagtattacctaactcaggcttggcacacaagagacagttaatatttatactgtttacaaaaccgttcaataagtactgggaccgtggcacacagagaagaatttgctgcatcatgatctcatttcaattccctgatggcagttcagccatctgtgtgacaaagttcagggactttggactatcaaaccttcagactttgtgagtcccagatcatagccccttatcttcaagaatgtaacttaaaaaaaagtttggaggagcaggataataatgctccagctgaacttattccctggcacctggtgaccttgtttattccagaaggattggcatcccccattaaaccactgtgcttccagcagctgtccttaaatgattaatgtaagcaggcagataaaccttaggtcattcctaaaccagagaagtatctgcaaattaatacacaagcttaacctcgttttactggggttgaagattttcttgaactgatgtccatctgacatcactgcggggctaagactatacttactctaaatcatactctgccagggcagattcaatcactcgtttgcttaactcagttaacaagcccttattcccacaatagcccacttgccacacaagtaatactcctcaaaagactctttaaagttgactgggaagcaaccttctgctttcttccatgccactaagaccaaaaaaaaaaaaccaagtgtcacaaataaagaatttcaatgaagagacctagtaattggattctgtctgtcctgagttttcaatcatactccaaaatctgacttttctaaaatacataataccttccaattttgaaagagagctcaataaataatttcttaaaaatattatctttgcctcaataattccattcccagcgctttataatctgccttctttcctctcttccataagggaaggaggaaggaaggaaggaaggaaggaaggaaggaaggaaggaaggaaggaaggaaggaaagaaggaaagaaggaaagaaggaaacgtgttacacatatagatgggcttcaaacaataaagagattggttaagtcaagtgtactataccaacctgatgaacagttataaaataattgtgaacac

SEQ ID NO: 48328 - DNA, 2339 bp, Homo sapiens
tgctgcagtgcattgctcagttcctttcaactgaaaaattaaatctgcacttctgtcaaaatgtgtcatctacacatccggacactcatcacagttcaccaagctctacgcagagtccaggctgaaaggatggcatgccctccccaaccccacccttttgaggtctgggaagcccaggtgctggggaggagctgaacaactgtgtccagggagtgtctggcaaagccgacccagggagttccacgggagcctcggtgctatgaaaagagccagtgtccatgcatttcctcgggtgtgaatcacactgcccggtcgggcctttgggaaaaaattaatgaaggacacagtcagcgccgtagaacctgccaaatacacatcagatccagtggagtctgtgaagggggagggggagatttttccagaggcttttcttctcgttccatttctcttttgtgccccacgactgggttcttgaatgtaaaactctcagaaaggtcagggcggagcctgttttatgccccgaggagtatcttgcccacccgtaaatgctgacagacagctgcgacttcggcccaggagacccggcggggactgggtccgaccagccctctctcgcgggcgcaggtccgggacccctgaagcgagccggccgggcgcagagcgcagtcagtctgggcgctcagaagctgggagggggctccacctgggcgcccagccgcggcgggaggggcggggcccggctttccggaggcggtggcacctcctcgcgcccgagcgcgcgctccccgacgtccggcgcacgcgcgaggccggctgggagcgcgcccaagcggcggcggcggcggcggctggaggaggaggaggaggaggaggaggaggaggagggcggctgaggcgcggctggctgcgcgcgcggaggcagcggcgggggcgaccggagctggggcagagtggggagcgagggagggggaggagagagagggaggcggagggcagtgagagacgcatttccagttctcaactacgagccacgagtttgcagatggggctgctcggcggcgcctgtggctgagggagagcagcggcggcggggagcgaccgggagcggcggcagcggcggcgcggaggcggctgaggtgcgagccggtgagttaactggacccccacgccgctcgggtaacggtcgcgccgcgcgccgggccggccgggggcgccctgttgctcggcgcggcgcgccacgcggggaccctggcccgccccgcccccctcggcacctgggcttcggcgggcgcggggaagagggaccggcaggcggcggcggcggcgccgcggtcggggaggctgctggccgcccccagcccggcccgcgcggaaggggcgctcggccgggctcctgcctctctggctgcgggcggctgggcgggccggagctcggcaacgtgtctggcccatgctgcttgccgccgctccccacgcgctccccggcgcggccccgactggggctagggccgcagacgcgcggggccccttcgggcgcggggcttgggtgcctacacctctgcggcgggagtcgcggtggagcctgaatggagagccggcctgggggcggcgttgctgtgactgacacctccggggtctgtcccgagagggggtgattccgccggctcccggttctctcccgagctcggagttggtaggggaggaggctttctccaactaccgccgctacttccgaggtacgagactccagttgtttggccaaagtggctgtgggccgagcacaggctgccgcgggggcgttcgctgctgagatcgtgctcgcggattctcggtacgtttgtctgaaaccaaataggtgctggggcttttttattttggctgggtggagggtcagcaggggagtcgattgaggtatccgaccgtgtggtgacaggatgtggattggttggtagatgtttttttgcagaaggactttttaacactttactgggagtttattctcaatcctaccagtttctgggattgcagctcgagattacatttgttaaacttccatcagttgggtgtgcatctgtgtagggggtgggggtgaagcgagggagagaattgaagactgccggggaagctcagaaaattctccgcattacttataaacagccgggtaaggtcaggctagccacgttttattctttcctacgcctttggagagtgttggaattttactttgtgcttcaagtatattacaagtggtcttgtagtgtagctgagaacgtttggggtgcgttaaaatgcgtttcaattggagtatgatttagcagccatttcttcccgtgaaattt

SEQ ID NO: 48329 - DNA, 1719 bp, Homo sapiens
aagttgactttgtattcccatttcctttttcatttagaatttgatcgtcatgaaatccagatatatgaggaggtagccaaaatgcctcccttccagagaaaaacattagtattgataggagctcaaggtgtaggccgaagaagcttgaaaaacaggttcatagtattgaatcccactagatttggaactacggtgccatgtaagttttctgtgttttccttgctatgcaattggcaggaaagagtatgggcatatggaggaaagggggattattatcattagttattgttattcccaaataagttttctttatggcagtgaaagtgaacaagtaaaagacattgaaaaatttagtaattctgtagctgtcttgaaatagtgctgcagtgctgttggcttgctgtctggtggcaagtgcttctctaaactattcagttcagaaatgttagaattaaatgcctacatttaagactcgtggcaagataggcatttaggattttcttgtactgatgtctatctaaaaagttggatttttcagccattttagtgtaaagaaaaggggaaagcttctgacccttggacatacccagtgtggcaacagctgtgtgaacttacgtggcctggcttgtagctctcagtcatgcaaggtcataaacctgatttttgatagcacataagagtgattcatcttttactgcaggcagcattcattaaggttacagagtctgatgtatagaataaaatagtactgatgagaagtataaccattaagtgaaccaagcactcattttatggtctttgcattcatttctctatttgcatatttacatagaaagttaaataatcatgtcagaagtatgcttgatgagaatggaattagatcaaggaattggatgatgttagtgatttactgtaatgactaatacacatttgtctctgactgtagggactaataaacatttgtctttgtttttgaaatacgtggatctttacttgtgaacttagatgttctctcccttgaagaaagcaggagataagctaacattgctttcattcccattgctgtgcttctatttctgaccaagcccccttttaacatggcattcctttaggtatattaatgcctttaagctattttgagtcaaatcctaggctaactttaaccctatctcttttaattgaattttagagtttccctggttttgtccagtatattttgggtttaattctcagtgagtactcttattgctaaaattcttaaaagttagggaaatagccttgtcattgcccccctgtgctacttataatcccttcagtgtaaatcttctgattctactgcaggcattgtaaatcactaaatttagacaaatcctactaaagtggttaacagaacaaaaacttcactgtaatcaacgtatgttaaagctgcacttgtgaagtaaaaagtttttcgcttttatcaaattcatatgtgcccaatatttttagcaagtagttcttaaagacatataatggggaaaaaaataaccccttctcttcccctgcctcacttatgaaaaacagtcacttttcattgtttttgctatttcttttggttgtgttccatatttcttaataatgtctttagtctgctgtttcctgctttatgcagtttaggccttatctgttgacttcctgactgtccttccaatataaagatagctgtattttcagttagtt

SEQ ID NO: 48330 - DNA, 1594 bp, Homo sapiens
tgcagacggcaagcggctctggaaagggtcagaggtcctcaaatggagaccaaaggaagccacgcgggcagctcttgagagccattccagcgcatgccaggcacaccgagtggggcttggcctcctccccaagctaggagctctctagataccggagcaaagtggagggggacttttttccgtccagagagactgaactccgtatctgttccgcggtccgcctccctgcacacacgcccccgagccgggagagcctccgcagcacccagagaagagaccggaacacaaaggatgaacgaatggggagggggggtttggggggttgggagaacgaaaataccagctgcgcttccaacatccaaggaaggaagtggcagcggggacggggagaggatgggaaggggatgctgactgcgagttggggcgggacgcggtgatgggaggggaccgggccgggaatgcgggaggcgaggggagcgacgggacctgccgttccggcggccgggcagccaatcgattcgtctcccctaggaaggagcgaggggagggtggcccagagagaaagcgccgcgcggcctcggctgcccccggcccgggacacccaaacagaccaaagaggatccggagtggagcccggagcggatcccgcagcccgcgcccgccgcgcacttacccgcgcgcccgctgctgggtccccggcagccgcgccccctgcgctggcggagtcggaggagcctgcgctgggccggcggggggcgggcgcttggggagggcggagagagggcccgcccgccgggacctttgctcggtccgggcgccccagagccgcgggactggccgccggaggctgcgggaggggcccgggccagacctcccagaagccccagagagagccgcttcccctccttcgtgtgactctctgggagccgggttgctgacggcccagcgctcagccggagtccccgcgcgcttttcgggactcacccgggagatgtcggggcctctcgggaagagtgggctgcgcctgccttccgcggccgcctcgcctcttcgctgcgcgggaccgtggggtttgagagcggcgcctcctcgcggggccgaacccgccacccacagtggagtgtggactgacaccgcggcctcacggttcaaccaggaaagtccaaggcctgtccagcctgtgggagcccctaatgcccgtgcctggagtagtatctgggtgtgtggtgcgacagtgcccacacttaggcctgccgctaatcagtgattcattcctgtaaactccactctaagctccttgagggcaaaaccaggcgctctcacacactgggtgctcaacgaatactgaacgagggaatctcagcatagctggtgctcaaacattgctttctgatgaactgacttaaatattagctctttttgtaacattaggaccagctgaaaccgattaaccattacttaagttgttacagcgaggcagagccaaaatctcccgggcgtgtgcaagagggaaagctttctaattgtgaacaccgcgcgccccgcagaaggctgcattggcatcacctgggactggttagaaatgccaaaaacg

SEQ ID NO: 48331 - DNA, 574 bp, Homo sapiens
ggcagtcggctgtggtcatgcacagttgcttttggagagatgacctctctcttaattccctgggttctggcctcactgttactccctaagattgtatttggatgtggtgggggcactggaggtggtggcttatgcgatctgtggcactggaaagaggtgagggccttgggcatgatttccttggcctcctctggttcccttaaccagccaagtactgctggcatctactctccaacctttgtctcatgcctctgggctgaggaaacacgagatactgtgacacatcaaaaatttcattgtgacctaagttgggcagcagcgttgtggcttacttagcatggagaggaaccatgagtcacgctggctgccacgtcctctcatgtgcatccaacaggcatcacaggggaaggagggaacatggcccctactcattttcaaagacagtacaaaagcaataaatgaaactcaatgaaaagaagcacatcgttgtaaaccacatgccatttttgaggtcctagaataatcatgaaattagaaggtggtgtcccagctatgtgctgatcaaatgctgatc

SEQ ID NO: 48332 - DNA, 1819 bp, Homo sapiens
taaatagataacatattacacaatatgatggaagtaaaatgtattagcacattaccttgccagaaaacaaaatttctagactcagcatgacacgcagagataggcggatggtggctgacctgatggaaacaaaggacagaaaaacaaaaaatgaatgaacttttgtgtctcatgaaatccattctttctcccctgcactgagatgtaacagcgtgcaatgctgaactgaaggaaaaacttctttagtttccctcatcaagtgtgtcctcaagagggcgctcctgatacagtcagctcccacttgctcagattggtcaaggctgaggggaaggcccttgaacggaagcctccagaagcctccgtgggagggcggccaggtggcgagtgatgaggatagaggcgcattttgaaagacataaaaataaaaacggagacatgtgaggactgctcatccataacatataatctgacattggctaccaatgtcaacatctcttattagctgttctgaaagtagctgcagatgttttaattaagatatcaaataacaagtattttaaatgcaacccaaaatgttcttcctcgggctcagccaatttaactcttgaaaactctgcatcataaagtccagcctcttttcaaatcacctacaagaagaccaatgcaaggtaatttttttaaaaaagagtgtttctattaaaaaaaaaaaaggtaaacacaattgttgaggaaatgttagtcaactgttaagaaattttatttatttttggtctaataaaactatcttaagcaaataagtaatctcattccagaaaagagaatcccctggagcagagagtgccctttggcaaggggtcattactcattttattcagcagtgaagaggctgaagagaaaatggctcctccctctatttcctcatctcagtcacactcagggaacgttgagaggtgtatatgctgtcattctaattcagcactggtgaaaccacagtaatgctgccaagggtgtttccagaaagttctctgatgtagctgattcttaacagaggtgtcttacattgagagtatctagctcaaagcctgcaccttataaacgaagagactgaaaccagaaagataaagtaacatttcccaagccacaccaatagtcagggaagaggtagcggtaagtcccagcagttttggtttacctcactggttttcaaactttgcaaaaagaagaaaaaaaatgttttaagcagctgtacagttttcagacccgtcttatcaagaacccagaatactgagcccttgcttgagataaacaggtggggaggaagggagggcagtgggtgacaaatccacagctgttcaccttccttgggaccctcagctgaggaacatggtttgaaaactacttctgtatgccaggcctccagcaggaggactgcacggctgggaggatgtggtcacacacgccacacccagatgtgactcatgggattacagccgtaccagtgtgggccaaagaaaggtagagacaaagacgtaaatcatgtaggcatctttcagattcctcaataaacaccaacgccagctgcaatacaaagcaggagactcaaatctgctgctctttggtttgtcttagttcccatgtgcctcctaagaacgtgagcccttctgtgcctgtgggattttcaagggcaactttcacttcaagcactgacttagaaacctaatcccataatgtaactctctgatttcctttgatgttgtcttttttctttttttgagacagggtctccctctgccacccaggctggagtgcagtggcacaa

SEQ ID NO: 48333 - DNA, 773 bp, Homo sapiens
gaaaaaaggaacatagccaactgaaataagttttctgacccatctattcccttgatgcagctcaaaaccagtgtgttagctctgccaggcagcaggaggacgcagcaagcagggaatcacctgccagaggatacttagtccctgaacagtaaggaaagaagggaagtccttcctctctgaattcttccttttgtgagtttatgtagaaagccaaggttgaaaccgattttttggcacaaaggaaacctctgagaaggtggaagagccagagggtcagaacctaggacaggaatgtctatgactcactcctgatcggtcctctttcacaaaggccacacccctgcctaccacaggagtggagaacaaagtcctatgtgagtctggagagattttgcatggtgagaacgaacagcatacacaaagggctgctttgtgtatactgtactccagtagctctgagcatagtcactgagtccacacaagagaccccacagagagtaaggggaaaaggaggcagggatggaaacagaggggctgggttctagcatttgctgaggggcaccgggaagctcaaatcctctaggccttggttttctcgcctgtaactgatccctgcctcaccttccacagagcgccgttttggagatcaagtaagatcatgaatgcacggagcactctacaaatctaatacttgttctaagaaaaatttttaacaagaaatgctttctctgatttctgaccacatgaatcattttgatgttgtggttttgggt

SEQ ID NO: 48334 - DNA, 471 bp, Homo sapiens
agaatggtggctgtcaggggctggggggaggggagaataccagttattgtttaatggatacagagtttcagtgaagtgttctgatcataatatacaggtgtgtgtgtgtgtgtgtgtgtgtgtgtgtgtgtgtgtgtgtgaataaagttaagaggaactagaacagtgtactgccaggctcataatcaggagtgttgcacaaccatgctggaataatgcctggaggactggtatcaggagcaacccaaggcttgcaaacagcagtggtgaaaactaaagggctttgtggacacatagccagagccagatgcacaaatagaagataagcttctgggtgtggaaactcttcacaaagcatcgggggtcaagaggattgctccaatcccagttgttttccatcttttttcttcaaggagacgtactaacgggaaagaataaaataaccacagagaagacaaacttgaaacccac

SEQ ID NO: 48335 - DNA, 2462 bp, Homo sapiens
aatgtgccctgggcctccagcccagcaccggggagctgagcaagccggggttgggaaggcgggcgagcggagcgcctgccccgcgagcgttgtctcagtctctccggcgcgccccatcccgcggatgtggtaaagcttcgcgctcgccccaatttaccaggcttcctgagcctctagccccggcgtagcgcctccccgctgcccaggacagctccgcgcgccgcgtcctcccgcacctgcgccgcggcccctgcgctcggctcctcctggcggtcaatcctctgagccgtccctcgagggaaggtgtcctggggtgggtgagacccgggtcctccttccccgggagctgcagccggcacccaagctcccaggcttgggtctgccccagggccggagcctccccgggcgactcggacagaccccggtccggcagagaaccgcggcgccccgcaaacagcagcccttccgagcccgcgccgccgccaggccccccgacacccaggccccatttaggcgggcgccccgccactcacctgagcgctgtgcagccggagacgctccctagttccccggggccgggctccggggttagcgcacagaaccgggagaaggcaaccccggcttctccggtacccccgcaacgtgcagctgacagctcccgcaccggccgcaggagtcgggggcggggatggccacttgcagacagactgcggggccggagccgcgctgcgcaccggccgcgaagcgctcaagtcccctctcccgggccggctggcgggcgccaccagcacgcggccagttctgagtactttgcccagaacttctcggcgcgcgccgcccggcgattagcccgaggagccgcgcaagggcgggagcgcaggggaggggcctgagaggcccaggggcggggccccgagggggcgggagggcggcagagtgatgcacaatctcaccaatcagaagtcgcctttcgggaaggaggtggggcgatgtcctcggaagaagccagcggattccatgacgcggcgggggaactagggaccccggattccggatgggttgggagggcggagggaggcgagtcctgcggcgaggcactgggtggggctcccggtggcccagctcggtgcctgcgcgcggtaggcgttcggtaaatgttcctctagtggcttttccgggccagggaaggaggaaaaagtgagggcagcgcgggaggggcaggtttacggagaaggctccaggggacccttgcggtcgcacaggctaggagaactcgacctcccgagaaagtcagactgtggcagaggagtcgagaacagaggaaatacatagggaggcagcactctaggcacgagatgacaaaggacagcatcagtgtgagacccggggctcggagaccgtgaccctacctccagaggcagtcgtgcagattcgtgccggggtgattttgttctgtgcagtttatgtgcaagggggtaggaggtggggagagcaccgtcgttactattaaatctccctgaaagacggaaaagtccacccgacttgacttcccactagcccaatggccttctttgatcctaggacgaatgcaagcagctgatggtttggggtcagtttgcagactgcaaatgtgtcgagtgccgcaggtggcgggtgggaagggcatgagcatttagtgagcacctagtatatgccaggagcagttgcgagcttgcaactgtgagaaaggcgcaccaggctccagtactcacggggcttgcattttttgtggaaagacagacaataaagaagagaaaatacatatctatgcaaaaaataaaaggctgacagactgttagtactgagaggagggccaagtccactttcgaaagtggtttagcgcgtgatggggcgctcaccctgagggcctctaggcgagggtggcttttacccagattcctgagcctgggaaaggagctgccacacccagtctcgcacagagcgttccaggcgaagggaatagcaaatacagggtatttagcctccctgaagacccaactaaccgacctcaccgagctgggcaccgcgcgtggctcgctgggctcagcgcctgggacggagtaagggctccacagtgttaaatccccctgccaaccaccacctgcagcgctcgacgcattttcagtctccaaactgaccccaattcaaggtttctgagactctttccggagctattctgttcacatttcattcaccacgctcagatcttcgctttctggaaccatccccctcgcgaaatgtctgggactgtctgtttcggatctggcaggcggcgggcgagggcgggaggcgccagagatgctgccgagcaaatccactgtcatgctgcccacgtcggcacacggagaagcttattggagaagatttcaaatcgaatgactccgcggttcctaaaccacctcgcaaagcccgaccagcgccag

SEQ ID NO: 48336 - DNA, 1486 bp, Homo sapiens
taataccgtggaaaataatgttggtattttcatgggaattgcattgaatctgtagattgctttgggcagtgtggtcattcaccatattgattcctccaatccatgagcatggggtgtgtttccatttgtttgtgtcacctatgtattctttcagcagtgttttgtagttttccttgtagagatctttcatttccttggttaagtatattcttaggtattctatttttttggcagctgttgtaaaagagactgagttattgatttgattctcagcttggcagttgttggtttatagcagtgctagtgatatgtgtacattgattttggtttgtttcttgaaaagaggagagtaacactgagtgcaagttactgtggaatgccccctatcagatactattttgttgagctagcacaacattgctgaaaggaatgtatcattgcctctgtttcattcatgaggaatgtaatgtgacctttggtatatctgtccttcctttctggtcagagtgaactgaaccagagtcagcttgctccagtgtgcatatggcatgaggtaagccaatcagatattctcttccaggagtttggaatcaaggttcagtgatagcaggggctggaactgtaacttgtgagtgagttaaccctctgagagactgggtcctggtctggagaatctttgtttgctgactcccaagataggacaggcaatgctgagtgttcacatccagctgtagaagccaggagaaagttggtgcccctgcatggaagggttgagagattgaggagcctggtggaattgggtgcagaagggggtgacccaggagcacactggatgacgtatttagagtaggggcaaaagagaagaaccctaattagaggtgctgctgggaagatttggaggcagagaatgggtttgaagaatttgcctgggagtatgtagggtaacccctgcattgtcctgcgaactcctcagtaaagtcagatgggcctcttatgttttggtgagtgcagagccctgtgtccatgcttgtgtgagacaagaacaggggctggacaggggaacggctggcatttgggctaaatgggccaactcagatgttataggaggtacctcttggcagaggaacagataaagctggacagtagagagaaaagaagaaatatgccattaagagagaaataaaggtgagagaaagagtgaaagtcttgctttgtgggtggtggtgatgtcttgttagccactagttctggttctagttctgtcctgaggactagatggtctcctgcccttgctttctgggaggcattcttgtatacttattatacattctcttttttagttaacctagctcaaaattgggttctgttaatagctatcaaaaaccttaataattacaagaaatccatagcacctagaatttaagtaaatcgagccaagtcctgtggctacttagcagtaggagctgggttcagacccatctcctag

SEQ ID NO: 48337 - DNA, 1607 bp, Homo sapiens
aatttaataataatattaatttgtgcttgtatgttactctttcatgttaacttcttcactttcatagcacttaattttaatcgataagaaactcactgtgatttggtggctgagtgtggttgttcagctagtgagtagtaaggtctggactcaaactcagatctcttgactgcaagatcagggctctttccaccgcagctgcctccctatgtctgcattcaaagaatggcttgctatacaatttattttcgtgattatgttacattgccaaataagcacggtcttttagagtcacaaattcagagaaagctaaagataaatcagcagcctgaaaaagacagttgatagtctttatttggtaaatcacaacacgaagccagaccttgacccaaatttgatggtagccttgtttctaatgagggccctgtctgatgcaagtgaaaaatgcagtaactcagatttataggcagccatctccatgcctggggaggcagtgcctggagccttctcatctggcttgctgagtcaaagtcactaagtctttctgctccagaaaccacaaaagtcactttgttctttgacttagtcctgccaaaattcaaaacttggtgaaatcgttgaaatggccagccagatgccattccttcaccagactcccgatagaaaatgacgtcgtgaaaaaatgacgtcgtgagttcagcaactccctagctaattcctgagatttcaaaggcattagtaattaattccacttctcccttccttccactagccactcatgtcaaataaggggagtcaatgtttgcttgaattacgcagataattgcttattctttccacttgcctaggcgtgttctgaaagcctagataacaattaccacaggaagtggtgactttccatctcacctctttgctttgtttatcattttaaaaaatgaactgtgatcagacagatattccaatgcccaggggctgagatgtgtaaacagagaagatggtagaagggaagggccctgagcttgctcagaaagttacaggtggaagaaaggccttggggagagtaagaaagcataaagacatctctttaaccttccttttaaagtcttaaagtttgtgatgcagcaattaaacttctgagaatttacctttatgtcagtcagggtctaacctggaaaagagaaagctctctgagtgttcagagcagagatcaatgcagggaagtggttgctagggtaaggggtgcaccccagagctgagcaccaccaagaagccctctagctgctgggctgaggggacctgggtgacaggtggtgtcatcagagctgggaccttgatgggcctgcctggcagtggtgagaccagtggggagagacatggctgctggagcctgagcttctccccgcccccctagccagtctcccattgcacaaacccagctggaaaccaagggactcagggccctgaaaagcccagcctgcatggggtcacacagccctgtgacataaggcagaactgggggagggcaagaaatggatccaagagctcaccggcccaaggaagcaacctaaaaagaaatcatcaataagtaaatgtttgtgaatggatag

SEQ ID NO: 48338 - DNA, 2194 bp, Homo sapiens
ttcaacttagtaaatttttcctcaggtaacaaatacagtgtaaatgaatgaccactctagccacttaattaccaatccattgctaatttatgtcattaaataccagaatgaatcttgttttgctttaatactctttataccaaatattctttaataccaaaaacatttttaggagtacctcctcaaaaacgtatttttgtgtgtatacgtgaaggaacgttaaagcccaagcaaagagggaacctaattcaaactccagtttcagaagagacaatcatggtcacgaagtcacagatctgaagctcaagggcgaacacattaagccaaaatcaccacaaccgcaacttttaaaaagacctaaccatttaatcttactacaatgtaaagccacctctccctgaggataacgcaaagcacacaaatgtttaaaaagcggtcctggctgtttctatctgcccaggtcacaggagtagcttgacactcgaacttgtgaatgggagctcaggggcaggctgcacggtcccccggggacatcccaactcccctacctgtgatctcctggggcgaccacgaggtcacccgtccaggtcggtttcaaggtgattgatgaaactccttctaggatgtcagaacgactgacggaagaaacatgtgcccacgaaaagaactggccccttattagaagagcaacagcttttgccctctgaagaagaacgtgaagctctaagcttcggctttccaggagggaagtcttgcctatcatttccatagcccttcagcaaccactacggaagaggccgcctcctcctcggatctgtatccaagccgcctccagtccctgaccgagaccatacctgtccctagttagggctccgccgcacctcaagccgttactcgcccagctcggtctgaccacagtccagggtcttcactccccgccctcccacccagcgcgggctccactcgaatgctccccgcttgggtttcggtcgctcgcaagtgcgcgcctcccacagctctgcctctaaccaggtgcggcctccgcgacccgctctcacctctttttagtcgctggcacaacgaacactcccgctccgaagccggacgtccccactctctaagtccaaggacacgccggtccgcgcttaagtaccggtgtaagtgcaaccaaactcgctccgcgctcccgcgccctgacgtgcggccgagctggcggctacgcagtaacgtcgccgcacctcattggctccagtcccaatgcctgcgccaaggacctgcgcgcgcatgctggcgagcatgttagggtgtacggcgtgcgtgcccttcttctcgaggcttttcccggccgttacgacaggcctttggtcgtacgacaacgaggtggtgtcgggagaggtgacgtcactcgcgggcctctgtgcgcttgcgtgtgctggaggagcggggagggtggggcggagtcgcttggttggtgcgttgccctgctaaagtatcagttcttgggcgtggtgatgtaatgagctttgagcagggcgttttgccggtccaggaaaagacgccctaattttggcgcacctagaggtctcctagctaccatcttgtcagcaggcgacctttacccagactctgtcctactaccacggctggcgccaacagcatcctagagggacagcctggaaccaggagttacacgagttgggcaccagctcgtgaccttgttctagttccacctatactctgttactttcagtcacattccagctctccgcttgatggacgccccaagactgaggaaggtgctgcatttgcggcagagacaggattatccctctggaactgaaaaataaaattaagaggatgcaatgataacatttatgtaccttttaaaatttttatgagtacgaagtaggtaaatatatatatatacttaagaggtacatgagatattttgatacaggcatacaatgtataataatcacatcagggtaaacggtctatccatcacctcaagcatttatcctttttttctgttacaagcaatccaattatacttttagtttgtttaatgtacaataaattattgttgagtgtagtcaccctgttgtattactagaccttattcattcttcttcagtggcgccatttaatgtctcagccccccaagtagctgggactacgggagcaaaccaccacg

SEQ ID NO: 48339 - DNA, 1308 bp, Homo sapiens
caagaaaactcacttgacttttagcctgtggtctttccgaaaattagagactcttcattcaacaaaataagcgctgtcctaaagccttcggggattctggacaagaatccctttgcagatggtggagtcagtagtgcagcacgaacgggaccctaaaggggattcccggtttccaactgcgtcggggagaatcccacctctctctcggacttgggggaaggccaggagccggcgtagctgggaccaagggtgccaggggtcgaggccgagcctcacgggctgtcactgccctgcaagcggtgcctcgggggtctggacatacctgggacatgagcctgggggcgctgcgggaccgcgcctcccctcccctccccgcagctggcggccttcgcgggccgaggaattttgaggtcgtccgcacctacggcccggtggagctggcaggcaggggcgggggcgggagaaggacggcgggcaggccggggtggggtggggctgggggcgcttgtgacggtggccgtgaccgcggcattaggtgatgcgtccttgaggggctgggggcttccgggcggcgagcggggcgcagtaggaggctcttagagacctcggaggaaaccagcccagcgctacgggactggcaagaatgcgaagaggaaccgagagtgaacggagtgcgaggcgccgggtcggaggcgagaggggctcttccgccttgcgacccctggccccgcctcccggtcccttgccccgcccctctcggctcaccgccctgcctccagtcggaccccgccttgccccacccgcgccccgcccccaggcgccctctagcggcggcggcgatggcgataccagtttctttttccagggctaccaggtctggagctgtctcagggccggccagggagctctctcatgtggactgggcggaggaggaagagctccggtccagtggagtccctggtgaggtcggagcatccgacctgtcctccctccccaggtcacctcgcaaaaattggggacagtgtggccagatagagggtggagtctgcaggattctgaaactgcagcccctggcatggcgccctaacagagtctctgctccttccctggtgggtgcggacatggcaaagtcctttacttgcctcgtccccagggcctagccccaccttgattacctcagttttccccaaaagatacaaatgtgagccatgaatctgcacctacagggtcatgagttcctgtgatggctgacaataagggatgtcacccccccctcgccacctgccaccccatcaaggaatgggatgt

SEQ ID NO: 48340 - DNA, 1384 bp, Homo sapiens
tgtaaactaagtgcaccctttcttactgaaggcagtgtccccatggcaggcagtgccaccttggggaagccagcggcttctacagggcacactggcaaagcttattttggtttgagacactgagagacctcagaagtcagtaacatagacattgctgcttttgagacaaggccagcaggggagtgtgttgggagagagaggacaggttcaggtgggagaatggagaatggaggggccaaggctgggaataaaggaagtctttgtccataggtccagcaagtcacatggtacaggaagcctctcaaagttgtttcctctgctgcaaccccactctggccatatcgttggcaggaaattccagcctgtgcatgcaatgttttacagcaggtacagctttctatggcttttttttttcttttaccccagaagcatttcctcaaaaatgttctcactgactggaaaataaccttgacccatttattactgtcctcctatactttattcaaacccaggagaatctgcaggcccctgtgaaaccatgctgttaaaggtaggaggaaatcaagagggagaacgccttttgctcacaacagcgctttgggaggttcatgcccagagagcgacatttgtccctgggagcaaactgtaaattacatcacaaattaacattttaaaattaaagctggcatttctgacctgctgctggcagccacgatcatgctgcaaagtgacatcatttatgacactggcagttaagaagcccagtgtttgaggtcgtaaaacagtttccaggcctgatttaatatcgattttgctgtcaggctaactttactttaatatttaaacaaatgtttaatgtttaaacagcttgatttttccttttccatttttctgtagctttaacccagtgttatctatgtcgtaacaatttctccttgggccggcttccatattatactgccctatctttagcaacattctccgatgaatcatcccaagctatatcatgcatctaaaccttttctttttccttgcgatggaatgaccagcctatttatgtatgtattaataatttctgttgtatggatggcatgatattgtattgctacaggataggtatatcgttagacccatgggggcaatgaccttccaataagcagaggataatttctcacctgaagaagtagcagcaccaccagtagctttgggaataggcagactggacccagcagaaggaacagaggccgcttgctcaaaggaatctgtgggtttgaactaaggcagccccttattgtacaatattttttttttttttagtgcgggcagagtttgatttcagttgtgctaaaatgataaggtgctttttgtcaattggtttacataa

SEQ ID NO: 48341 - DNA, 858 bp, Homo sapiens
aatgaaacaaaccagtaaagcaaccacaatcttacaaaataagcaaaatcctataaattatctggaaagaaatacttttctttgatgaactttttttcccccactttgtttaaatgcaaaacaaggcctattaaccaagtcactgtattaaagacctaaccaataattagatggtctgagaaaatgcccaagacaaggcatatccacaagggtcaggggaaggtgatctaagggtctggctgaaactccatcaaaccctggaggaattcccagttctccacgcacatttcaaaacagctagtgccctgagtcatgactaaatccacaggcataacccttgtcctatttttgtagacagtcaatctggagagccactctcattttcagttttattccacatagcctaggtcccgccactctgcatctgcggcctgacctttgcacagtgaaaatacaaagcagcaacagaccaaggcaacagcaacagaccttgagtgggacagaaaagtcaatatgcaggggagtgggggaagctcaaggaacatttccatgacagtagaaactcttccataaaatactcaccaattctggaagggagcttgattcttctcatttttttcttaatgtttttattgtaataaaatatacatgacataaaaatgatcattttcaccgttggtaagtgtacagttcagtggcattcagtacattcacattgttgggcaaaaatcaccaccatccattcccagaatttttcatcttcccaaacagaaactttgtacccattaaacaatagcttcccttgcccacccgcagcgcttggcaaccaacattctgctttctgtctccatgatcctt

SEQ ID NO: 48342 - DNA, 888 bp, Homo sapiens
tcctgcaggctccagtcatggtaagtgtcccatacacttaccattgtaccatttgttttaaatctactgctgtatcttactgtgcgttttctatatttagatacacaaataccatgtgttacaactgcctacagtattgagcacagtatcacgctgttccagtttgtagccaaggagcaataggctatgccacacagcccaggggtgtggtggactctgtggtctaggtttgtgtaaatacactctgggtctaggtttgtgtaaatacactctatgacgttcacacggcgttgaaatcgctaaacatgcacgtgtcagaacatttccccgtagtgacacctcacgtgactgcattggtacctctctcatagtgagtcagtgcgtgttggacactggaacagcaggtatcacaaagcgcttccaaagtgttttgttatcaccacattttctcacggaactaggtagaaagattttcccttcccattgaagatgcttctaaacttgactccaacttgccttcctgccttttcttctacttcgtaagagtttaacacctaatcgttcctgtcccctacctcccacccccacctcagatacttccaagtgtatacagtcctttgtccaggtctctgcttttgccgctactgctggtgtttccgcattcagaaagtccatctccgcctcgctaccgacccctggcggttaacagggtgaccgacgagtggcaagcttgtaataaacagtgggtgttgtcgatattgcggtcatcaattatcaatagcattacagtagtccctctttatccgagggggatacgtttcatgaaccccagtggatgcctgataccacggatagtaccaaaccctatgtctgtgatattttttccta

SEQ ID NO: 48343 - DNA, 739 bp, Homo sapiens
ttattttcatgtcttctaagacttcagcgactgataggagaggccagccattctgccatcgaggaaggagtgttgtacttgatgcggaagcagctagatcaaaaggcgcccttctgtgttgccccaaatcacccatctagagccatgaaaaatccgtgtcatgagaaatcctttccccagaaatcatcatggaaagcaggcatataaaaggcaaactggtttaggaaatgtaatgttgatcaaaaggaaagccccgcgtcctgggcctggcacagctctaactctgactgtggccttgggcaggtcactcaccactctgggcctcggcttcctcgttgcgaaatgagagagattgacatctggatttctgcctgaggttttttttcccacattcaatattctgtttctctgaagactatgaaaactgaaacttttgaaacccatatttaaaagtgaaaccagtagcatcatcccattggcaatcaagctactgatgtcaagaggcatgatctggaatgccaaagggtgaataattagcataaggaacacaaggtttttaaaatgttgcccagtggcacccctcctttattttgcagataggaaaattgtggttggtttttttacatattctcttgcaggttgtttagcttctttgtgtcggagttaggaattgacctaacattttaggacttccagaccttttactgtatcaattaatccagattgcctaggagaaaag

SEQ ID NO: 48344 - DNA, 1422 bp, Homo sapiens
attacatgttgaagtgatatttttgagatattgcatttaatgaaaaatactattaaataatttcaccttttttttaatgtgtaatataatgtaatatgtaaaatgagctatgtagctcacattagcgctcttttggactgaaatactctagaaaaaaattctgcagaagtgtgcttcgattatccatctatcatctttcagaaacatgcaggatctgaatacacacagattgcttgcccaagccagatctatggcccccagtaaaatgtattctcctgcccctcttccaagttgtatcacacttttagtggtcagacaatttcagttatttccaagcgcagacgaattgaggccagttcgatgaacagcacttacaggctgcacctaacagccgtcttgcctttcttcagactgacacggcccacagagctcagaattctctaactccctaacatctgcctctgttcccatggattcactcacacatctgtgtaacacttcattcaaaggacacagtccccatttgagacagcctcaaatattcacagctcccaaaaggctgtgccaaagaaacttcctccgtgtagctgtaggccatctctcaaagtgcccttggtgtgaggggactgaaaattattgctcttcaaaagggcaggggaaaatgaaaggaaggattatatctgcctgaactgccaaaccaaactctgagaagcagattctccagagagtgactcaggcccacatgatgtttgttggggatgatgttttcactgggaggcgaagtgtgcatttgcttatctggccaaaggctactcaacttatgtggccagcccaccccacagcaaacgtgtacaagggttcttgtttctccctgctcagagctgcattttctctctctacagcagtcattagaataaataaaacccatataatcaacatgagaggaagaggacatatttttgtaatgcacgcgggggaggagggtggtttttaaaacaccagggacaccgcgaatgccacagttattatgtcaaggctcatgaggtcaaagtcagttaataattcccgattattctcttaaagatgactaacacacagcccaatgctaacagttttcatattttaatgatcttccatagagttttctaatttattcaacctcagcagattccatttcttcataaaaataaagtatttttcatcacagaggaataacttcaagtttttcttcagggatgagaatccaaaatcctgactctgcctgccatgctactgagctgtctccatttatctctctgaaattttttggcttacagattaaagcattagaggaaaagaaactataaacataaaagaataataaagatcatgatttgtttaatttttacattcttattattaagacagaatttaggaagcaaa

SEQ ID NO: 48345 - DNA, 3620 bp, Homo sapiens
tttttttcttctttaaaccaaaaaattctacagtcaggagtccaccagggtaagatgaagagatttggggggattttgttcccatttacagggtttaacccacccgcttcaagggaattggtcaagttcctcgtgctgcacttggaccccctctggccttgcccctcccccaagggaaaggcgcagcgacgtggccaccagggccactcggcctggcgtctggagcactggcggcatcggcgaccacagcctctagagacaaagttctgtagtgcactgacttctatcatactcagagtcggagtgtctcagaactttgcctcaaaagaccaaacgtgctgtcttcctccagaagtttcttcctgcaggtgtgttcccccaccccccagctaagacaaagaagaataactcgttaaaagcaatttagttcaggatgcgaccgataatggaacgggtcattaattatggaaagttactgccgcagtcagcaggagcaaatgcccaacagaaatggtgttttaacagcccgattcgacaaattctggtcgcaatgtcacagcaaaggggctgcaagaatcgcacactctccttccttcctacccgtcctcagattagaacccattcctggtcgaaccctcacctccctcggtagttatttaaacttttgccagcagctaactcactctaacttgtggcaactttttaccttcccatctggaaagctgggggcgggggcgctgcacgaggacgaatattcggagctgaaagagttaaacggtggggaacaaatacaggcccgggaaaagcccctaagatgggacgacccaagaaagacccgctttgcggggcctcccctgagacccccttccccagccattcccagtactctattcccggtcttccagccgcccgcgcccagccccgggaactcgggtcgaagtcgtcccatcccctccgttccacccacccactctttgggattctccctgccccattaggcagtgcttcccgcggaccccgttcgcgcacaaccttgcacacagtccccaagactgctcttctccccctcccggcacccccttttccctgcagcataagcgaccactctgtcccccatcctagcagaccccctccccccacataccgcacctgaacagctgttgcgcgcgtgcaacaggtctggaaagtgctttcccatcttcccccaaacccctcgccaccgttccatcccccgccacccctaagagacaaggccggaggggcagtgggctgcgtcccccgggccggggtgcacgggcggctggcggagtgcggggcgcccagaggctcccggggttgggggcggtggtcgcgctgggccgggacaccttcgcgagtggcccctcgtgcgcccgccgcaggctccccagcctgcccctccagcgccggccgccaggcattcccgggccggctcccccctcgcgctccgctccgctcccttccatcttgacttttgccgacgtggaaattttgggtttggagacgacctgcgctcttattggctgccggcgggcggggtcggaggtcacggctgctctcgctattccgcgccaaggggagccgcacagcggctcgtgtcaagtcagcaggttccctccgcctcccccggggtcacgtgcgccccgggcgggcccgggagacgcctccttatgcaaatagagcggccgcgcggggctgggggcgggggcggggtgggcggtggcgcgtgggggcgggggcgggggcgcggccggcgctgggagggcggggcgctccaggtggccacctggctcgacgtcccgccccgcccttctgcccaccagcctctgccaggctgcctgttccgcttcccgcgacactcgggccgggcgctgtccccggccagccccgctgggcccagggagcccgcgttttgcaagatgcccctgaatgcccgctttccccggagccccctcctccaaacccagccggagccctgcctgggcccggtgtctcctggctggggaggaggcggcggcgaagctgctgcagggcagagtgcgaaatggaaacctcgggaggacagtttcctcccctggcagggagttgagaactaaatgcgagattcccggtaagggaattctaggacaaagcaaaatcaagaattcatcaaggttaaaagtcgtttcttttaataaactgcccaccacccatccccaaataaaaagaggccaaagagctaactaaaagtagtaaaaatgccagttctggatttttttttttaacacgtctacaaggactaaccgaaaggccggtttgcctccaccctgacgtctgctgggtactgggcacccgagactgaaccaggggacacgtcctcctctcctcatctagatgggggtgtgactcgggggagctcagaattccctgagaagaggtcacgggcacgtagaatcaattttaacgtggttccccaagcacgccaaagaagatgctgttctagaaagaaagggaaattgatgaatggccacgtgaccaggatgtcttccttccttccctctccccaaggaaaagaaagtaactgcattgcaaaggtagagcccatgttataaatcggactctctgatgccggcctgtagtcaccaaggaaaaagaaggggactgcattttaaaaaatataaatatttctgagaactggcctagttattttttccctcaggtaacaaagtatgtgtatcatctttataatggttgcatctgaagtctgacctggtgatacagaaaaacatacatttttatgggaagattcttacctggaaaattcttcccatccactcttcttaatttactttccttctccccatttccccctatggaaagataaatcattgctccttccaactgttttatcctcaaggatctttctctccactctcctttctcttccctctccacacttgtttgtttatctgaccattcgcgggtttgcaggggcctctccccaggcattgtctcctccagccccccaccccctcctcggtcaaggcccggcggcagtgcttgctggggctcggagtttgtccccgctctgctgcctgttctgttgtgtgcactggaatattgatttttcagtgtgtgtgcgccggctctgtaaaaatcaatatttcagtagctcgagcacagcgcagggcagtgtaatggagccagcctgctgatgtaacgtgcggggtccaccctcagcgattgaggtcagtcagaaaatggcagtgttttcccatttcattgtttgcttcggagagaaggaaagagtttgcataccgttgtgtacatcagattccaggatgaggtaaccttactactgttgggtagcagacgaaccaagttagaaaaaagacaacgaggtgatgatggaaaacctccggttatcctttgtaagaacggatcttaataaaatactgggggaggtggggagttattgtctgccatcaatcctaccacatttcacaatgataaaatgaaaacaggctcactccaggaaagggccagagtttatcttttaatactggatatgtgggtgcttattattccgcagcccctaaaatatgcttctgattaaaaggaca

SEQ ID NO: 48346 - DNA, 1158 bp, Homo sapiens
agaggttgcaatttggaaccatgactttggggagaaaatgggctggaaaaacaacactggtctttgcggtcagctagacctgggtttgggagtatcacctgctagtatgccctcccataagctgcttgaatcactccaagcttcagtgtctcatgtcaagtgggagaggaatgtgtactccagggggaggtgtgctgattaagtgggaaaagcccatgggaagagcagcatggtgcctggattgtagctgcgctcttctgccctccgtccttaacccaccctccttcacctgtccccactcactggattccttttggcttgtctgcatatctagtttggttggttattgaagaagtggggtatgctagacccagactgcctggttttgaatcccagctctaccacgtctgtgaccttggacaagttgcttatcctttctgtgcttcattctgtgtgcattcccatgcacaatgggaatcagaaggggcttacctcagagggttgatgtgagaattaaaaagttcattccatgtaaagggcttagaacttgcctgtcacttaagtgcttagttagtaaatgttagctactgttaacttcaaagagacgaagtgctttgtcccataggaacataatttttaattttaaaaaatagataattccggtggcttacatttgagttgcaggagttttatagtataattttccataatttatgtacatatgcaaaaatattttggagtaggggattttccaagtatcaaaaggagtactgttttggtttcacttcttactggggcttatcatgatctgaaaactgactctggaattccccagggctgacacgcttcccttcataaccacagtcattcacaacggatgaagcatgcattcttccaagtaacacacaggttaaacaaagaaatgaacagtttttgtagaattgaatgtgtaaacgtatggaacagctgcctacagccagcttcagtatttcagagagctgttgccactttgaaactgagagggcttgtagtcattttgatgtggtttcctatcctggtacagagaccctctgctgggtgaggggtctggtaagacctcttgattaactgcctgaagaaactgttgggctgggccgggtgtggtggctcacacctgta

SEQ ID NO: 48347 - DNA, 670 bp, Homo sapiens
actcccgtccattgtgttgtcaggtgcaggtttccaaagcacaccttggttcgtctctctgcgttttgtgggatgcctcctctagctcgccattgcctacttattcagtattttgtcattcagggctgcccttgtggcttatgtgacccagcccccagctgctcttgctgggcctctccatgtagccttctttccaggagaaaactttcttcatccctttgcccaacaaccctatgatctcctgccctttagtctgttcttacctttgcccggaatgccttcctttcattcctctcaagtcttttatggttaaattctcaaactcagctcaaccatcacctcatccataaaacatttcctgttcttccctttgagccctattgcactctgtaacatttcttctataggacttggcatcctctcctttgaactgcagtggctggaatgtggagactgggtcttggctttcacctgaaatagcacccagggacagggttaggagcagaggtcagttcagccagtgtctgtctgttgagcacttatcattcatgacattgtgtttgcagaacttcaaagataccatgggtgtgaaggtgtcttgggtccttcaaggcccgagtctcaactagaaagtaggtcagatctgaaatcctgatgggccatctgacta

SEQ ID NO: 48348 - DNA, 4969 bp, Homo sapiens
tttcaaagtcattaatgcttgatataaatttactcaacattaaattatcttaaattattaattaaaaaaaaaactttctaaggaaaaataaacaaatgtagaccgtgattatcaaaggattattaaagaatctttaccaaaaatttcaaccctacaacctaaaaacgcaaatttctatttttaaacatcagaaaataactcttggttcattacttatgacccaaagtttttatttcactattcaatatctgaaaagtatcatttattttcccttaactgccccctctggtggtgattctaagtatctcagccaaaaaaacacaactttttacaacaaacactaagtttctccatatgactctcagttacgaaaatatttaaagatatgcattagaaataaccttaaaaattactcttataaccaggacaaattaatttttatgaccagcagcactcgaagcttaaaaagtttaatttttggtggacatgtctatatttgatatatgacaatacagaatatgaattactcagcttaaccatatgtacaataaaatacattcacgtggcataatctctaagataacaattactgaaagctgaagcttacttgattggccatgtggcaagcgacaggcacaaaacaattttccaagtcaataggaaaaacctcagagctgaaatctttatatgctgtactacacagctgtattctgggcacttatgaatgttaaggaaacctgtcttaaaagttaactaggttaaaaaacctcaaacgagagaaagtgatatccaggaccaactgctacaaacgcataatgcaaactaaaaagtcacacgtaattttcaatcaattattttttgttcctagcaagcagcattaattgctgctctcatcccagttctacggagctctccctccattcgcatgctcccaactcctaaaaagtagtggtaaaacccagttcagatttttttcctgtagttttcatgactcgtaaaaattaaagaaaaaattaactgaaatgatcaaactagctcctatgagacacaaagcagtcttttgaaatggttacttgtcacgatagttattttcattttttcagctagtttttattcttaattgtcgtcagcacataggttatctctaaactgaaattacggataatgtacatttataacaagttttacaaatcactaacaaaaagcaaaaactcattacttacctcacaatttatccaaacttacccgatgtccactatcgattttaaacaatgttattttataaacgtgcttagggtcaaagaaaataaccaggtagacccccttcgcttgagaccttatgcttatcaatgtaatgttcaaccaagattgcaaacaaaatgagaaaagtaacaaagttcaaatacagagcggcccaggcccaaaacagttttgcacatcaatccatacgcattacaggaaggagcctctgaagccatgttttaatcgaagtataactaaggacaaaatcgttatttcactttcctcgtaatcatctataaaggtccatggatctgtcccgtaagggttaaacttctcagtaacaacattacttaaaatgagtcagctctacaacttaaacggaatccttaagaacagtaaaggattctgacgcgaatatccctcccccgcccagaaaaccaccttcgtccctgcccctcgtggccgatggcttccaatttatgtttattttgccgcggttcatctgtcgttttactgactgcagacccagataaaaccgttactcaaaggaaaaaaaagacaggaaaaacataaaatggtttctttgtcctacggctcgcattgaacccggcccgacgccctgggtggtgatatcttctctgaaaccgggcccgcaaacccggagcaccccccctccccgctcttcggtgtggcttccgaacgcaatggcgccatttcatcgaggggaaggctgagcgcctttaatgaggtgcgcaggactctaaagatccaagctcacaaaacactccaaatccacctcgaaacgatatgaaaacagcccgagaagaaaaaaaaatagttaaccacttctacttcttgatagagaaagcacactaagaaaataaaagagttataaggaaaacgctgagaggaaggcgagccatgaaaatggcggccgccaaatccggttcccgggagagagggggaggggaagctccgcagcctcgctcacgaggacctgctgcccgccgaaacgctcgccgaggagacgccgtggcccccgaagcagcgtgctttagaaagggaataagaattcccgcctccgcgccccactttcaccccagcggggcagcgtccgccatgtgaaagctccccatcccccacccccagtgaagggaaatggcgccgggaggctgagggtggggaagctgtttgtacgctcaggcctccgctcaagaccccgttcataaaccttaagccccactgctactgaattggtccgatttcctgcctctctcccacggaggcggctggccgacttccactgaggcgccaacggcctcgccatgcccttttcaataactcattgatttcaaacccgttacctccatcgcggactcagtcgcttcagcccgatttcccgcagccgagcgagatgagagagatctccgcggacgaacacgaaccggactcgtcctggcgctgtagtgagaactgccgctgctcgagaaacaactctgcgaggagcacctccgcacgggacccggcgctgctgctactgccgctagagccgctgccgccgcttttctagaaccttcccccccactaacgcgtcttccgctacgtcaggccgtcgcgtaaacgccctatccgccgccaatggcgggaaggctctacgccccaccttacgccaaatgcgtactcctcccacccttgcggccagagacagtacccgacgttacttccgtaaatgcgctcaatgaattgcggaaggctagagtcctgctagttactacctcttggaatagggtcccgccccctgccttggcgcaaggcaggtgagaaacggtcgcgcagtttgaaattaacgccgacgggaggggcttaatccgcagcctggagatccagccccctcaacccgggaggtggtccctgcagttacgccaatgataacccccgccagaaaaatcttagtagccttccctttttgttttccgtgccccaactcggcggattgactcggccccttccggaaacacccgaatcaacttctagtcaaattattgttcacgccgcaatgacccacccctggcccgcgtctgtggaactgacccctggtgtacaggagagttcgctgctgaaagtggtcccaaaggggtactagtttttaagctcccaactccccctcccccagcgtctggaggattccacaccctcgcaccgcaggggcgaggaagtgggcggagtccggttttggcgccagccgctgaggctgccaagcagaaaagccaccgctgaggagactccggtcactgtcctcgccccgcctcccccttccctccccttggggaccaccgggcgccacgccgcgaacggtaagtgccgcggtcgtcggcgcctccgccctccccctagggccccaattcccagcgggcgcggcgcgcggcccctccccccgccgggcgcgcgcccgctgccccgcccttcgtggccgcccggcgtgggcggtgccacccctccccccggcggccccgcgcgcagctcccggctccctcccccttcggatgtggcttgagctgtaggcgcggagggccggagacgctgcagacccgcgacccggagcagctcggaggcggtgaagtcggtggctttccttctctctagctctcgctcgctggtggtgcttcagatgccacacgcgtcccgggggcccggttctccgctcccctcccctccccttctcgccggaccccgcgccgggagctgcgggaaggagtggagggtcgggcggtggcctcgcggctggcctggcgcgcggccagcgccggtagttagtggggggactgctctgccctcgagggggtagggagctgtggcgacggttgccccatttcgagacaaagcgcatttccccctcccctcccccacccgcgttccggcggaggcgccccctcccccagccgccacgcggggctgggtcgagacttgggcctcccggagggcggcgcgtggtcccgcgtccgcgaggcctggcggcgcgcggccggctgtcccgaggctgcggcgaccgcccagttaacgtggccgccgcgggggtaggcgcgtgcggtgtggcgcagtgcccttgagcccccgtgccgcggcctttgtttctccccgcggatgcgctgaccacgaggcccgcgctcccgggtgggggcgggcacccgcgcttaggcctctggacgccgggcttcagcggcgggggtcgggagcgggtgtttgcaagaggtgattcttttttcaaagtgtcacgaaacggggttgaagcatcttaagttttttccttttgttatttaattaccgattggaaagagggagggtttctgagcagaaaccaagttgggattgcagaacagagaagattcacagtgctttaccgttgtgagttgtttgggtaatcgtgcctggttttaaaccgaaaggattgtcctttaaaaatggaacatggactttattataaatgggacttagattggaaaagacattggtcccctattttaagccatgtgaagctgttttaggtaccaggatccccagtaaagtctttctagactcacatggttaggacacgtacttaagtacatcataagcaatgtaggtaggagcgcagatctactctggatttgtattcacgtttgaaatgtgcgctctctacttgggggttggaatccaaacagaatttgtatttagttaccttttttgtgtc

SEQ ID NO: 48349 - DNA, 1330 bp, Homo sapiens
atgaaatattaggctatgcttattattctgtgtcattcagtcacttattagcagtttaagtgatgattgtggtttcccatgcaaacaggtgtggggacccagcctcaggtgccatttgggaaatgctttcctcagtcaggtcccttggcagatctcattagctttccccccaaatgttttattgagacatttcaaacatagacaaaaactgaaataattttatataaacaccatagcccaccacctagatgctatgaacattctgccattcttgtttatcacgttatttatccgtcctcctccccatcggcaatcctccccataactgtggggtcagggttaggaagcttaaggtgactcaggtggcgaattccgaagggtgccgctggagcacctccagcctcaacgtccggactaatgggggcatttcctccctaactcaatttcaggaagcaggaggctagctctgcagggtgggggcgcacctgggctgggctgcgcggaggcggcggaagcactaggcgcggcgcccacaggcggacggctggcgctgagcgcgggcgcggggccgctacgtgcgcggggagcgcggggagcgcggggagcgcggggctgcgctcgtgtgcgctcctgggcgctcgccgccgccgctgccgccgcgcgcctttgagtcagcaaactccgcggcccgcaagcccggctcggcccggccctgctctgttctgcccggaggagccgcccgtaagtgacaagagacccgctgagggggcctcccctgcaccgcccaggtggggacggcggcccttctttccagaggcgcgggcccttcccgctgttcccaggtgcccgcacccttgcgggctggaaagaggtttgggtcccttgggcttggagcagaggagccgcctccttttcagccgaggtgtgccgggcagggagaaatgatcagcgcggtagagcggggagatggagcgcgtcgatccagggattcttggctaaaaagacaccccggggagagggtggggcagaggtggattctagattacggaagaagtgctgtggcaccttacaccaggccgggtagaagggggtggggaggtggtttttaaaatttatttatttatttttttattcattcattaacgggtagccttgagttgaggaattgggaggggtaggcaggtttattcgtgggattgtgggattgagggagaaggcccaggggaaaatccatataattgactgattatcagatttggtgaccaggaaagcaacagcctgtttttcagttccgatgcatcatacttttctcaaattacacggattattg

SEQ ID NO: 48350 - DNA, 1374 bp, Homo sapiens
tttaactccgggttccttaatctccttagagagctgattaagcttggtgagaacccacaggtccatggcccaggtaaatccaaagcccggcccagggaaatccaaagccctgcccaggttttctgcgaattccctggaggagggggtggatgggggaggcctcatgtgctttcttttttaccttggtgtcagccccgacacaaactcagccccttccctcatggatggagaaatccaccaccactactaccatgtgttttgttagttgagtggacttcactggagtcccctgtggggctcctgatcttgcatagtctcctgggtccctctttcctcctctcatccctacccctcactccatccccctcacttgtccgtgagctccagtcttcttcctctgtaactatggatactccccagttcctctcttcaacttacaaacccaagtcaaagtacagggcagaacaacgggctttatatgtagggaaccaacactccttagaagttataaatacaaacacacacaaaagagttttctatcacactgtaattatcttcccctttctcactgatgtagcagctcttattgtagagtggcgtttggaagagctggggagaagatgtgctcttcctgctgcccccgaaggtcactgtctggattagggggcaggcagtgttactgtagctctgggctctggaatctcacagcaaacaacttggggtctcttcatcagcttgtctgcagatgatcagaccctgagaaactgagctctttctgtctaaacacacaggaaacttcctatgttgggaaatcagcttaaagatttacaaccagacgcagaccggatgctgcgatttgctagtcaccttgcttcactagtggttgggaaaccttgaaaaacggtggcgtctattttgaggactttgccaaactgagtctgtagacagacacatgtcaaatgcccttggattacagtcattattgccagcaagtaagagtttaagaataataactttggcatttcacccacttctgttattttaaaaattatttatttattttagacagaatctctctctctgtcgcccaagctggagtgcagtggcgcaatcgtgggtcactgcaacctctgcctcccagggttaaacgattctcgtgcctcagcctctggagtagttgggactacaggcatgagccaccacacctggctaaattttttgtatttttttttttttgtagagacgggttttcgccaggttggccaggctggtctcgaactcctgagctgaagcgatccacccgcattggcctcccaaagtgctgggattgcagacgtgacccactgcacctggccacatttcacccacttttta

SEQ ID NO: 48351 - DNA, 1062 bp, Homo sapiens
cctcagcctcctgagtggctgagactacaggcacgcaccaccatgcctggctaatgtttttgtatttttgtagagatgggtttcgtcatgttgcccaggtctcgaactcctgggctcaagtgatccacccgcctcagcctcccaaagcactgggattacaggcatgagccaccgtgcccagacagaaaatttttgtaaaggaacaaatgctctgtgatcatgaggaaggcacctcagcatttttcatattgggggtcctgggaaagtctgagaatgaacagtgactgcagctggcacagtcggagccaggcacaggcctccatgcttgctcatttgatctttacagtagatcatgaagcaggcagttatctcctcttacagatgagaacactgaagcacagagatgaagtaatttgggaaagggcagaatgtgaattcacaaccaggtggtctggagtcaaatgcctcacactacttttaccactcactgtgctcatcctgctcactttaggggggcattcccctctaaactgctcctcagcagtggatcttcatgacagaggcaccgtgaaggaaagagggttatttccagtgagttgcgatgcttttcctttagaaaagagaatttctctctctgtttaaaagcagaacattaaatgttgaatttttttctctcatctgcatccctgtatcctttccttatctcagccccaagctgctctccagacgcctaaagactgtctctcccgtctggatgtccccaacaccctaacatgttccagtttctttcttacctctcaaaacagccccccttttccaacttccccattctgggaacaccagtcttcttccagtcacccggcctgtgagtcatccttgactcccttttctcaatcatgccctgtgtccaagtttttcttgttgtttattcatttatttgtattctttgagacaggatctcactctgtcacccagactggagtgtagtggcacgatctcagctcgctgcaacctctgcctcccaggctcaagccatcctccaacctcagcctcctgagtagc

SEQ ID NO: 48352 - DNA, 955 bp, Homo sapiens
ctgcagagttctgcctggctgggaaaagctcaagccctttggggaaatttaagaccccaactttgaaccatttgttcacattacagagtcatggaggcagcctgtggcattggaaggccaccctagggaagcagactggctttggttgcagtggaacttgagcacttgcactctttcatagtgtgaccttgggcaacttaaccccttaacccctctgaccttccgctttcttgtgaagtggggatattcaaatcctcacaggacagttgtgaagtttaattacacaaggaaacacagctatgccctggtggagaaattcagtcaaatgggagagacagagggtatctaaacatcatgatgcaagcgaagttaatggcaccaggggactgcacagcacgcggttgtgtaatggggcagagagcccgggaagtgatttctgtgcagaatcctggcagagtttgctggtgcctggaaagggtgaaagtatgagggtagaggttcagccgtgtggagcacgtgatgtgtgtggggagcatgggcagatcctgagatggtggaacccaccggctaacttggctctggtgcaggaatcccatgataaccggacttgagccgctcctcctcctggcctcctccccttggcatgacccaggccttctgtgtagagggcctttttccttttgctttcctggctatctcacaccatcctttaggcctcagcggaagtgccattttctcagtaaaccctctccacccccacttagtccctccattctttaaagttttgttttaaatggtaaaaaacacacaacctaaaatgtaccatctgatccatttctaggtgtacagttcagtggtgtgaaggatgttcacattgttgtgccgttgatctcctgaactcttttcatcttgcacaactgaaactctgtacccactcagctgccccccaccccct

SEQ ID NO: 48353 - DNA, 4171 bp, Homo sapiens
tggaaagcttcctgctgctgctcgggtgcagctcgcttgccccttccagaggccctgtggggtctctcgtctgcacctccacacggccctggaagcggagcctgtgttcctgcttccctgtgttccctatggtgccagtgacatgagtatagagactctgggaatacgtgtgggggataatagggacccggaaagtgggctcagacacatactgatattatcaaagtgaaggcaaatagtagacctgcagtcatagtcaccctcagttgtaagaatacatatgtgtggatataggcagggaatttaaatttgctttttgtttttggcagggagcaggtgttaaatctaatgagcttacataccaagtgggtttaaagaacaattgacaaccccagagacatgcagggcctggaatcaaacaacaggctggctgcactgctcagaaggtcagagtcaaggtcctggctttatcccgctgagggccacaccatctcttatgtgacctctggagtaatataagtgtcacaggaagggcctgatcccagaaggtttgagtttccggtaaaagcgtcagggctgcctctggtggtggatctctctgcgcgtcttttccagccagcatccccccgcacatggcttctgctccccggcatctccagcttcctcgccaattcactaaggctccagccccagcctgactggctggccttgcggtttgaaggtctgtcatcatccagctgccttggactctttggggtccagactcctaacccctggtgtggactgatgttcaccttggtcctgccagcaggagagggcagcgtgggaggagcagaggctcacatgtcagggactgtggggcggggggggctctgtcaggggatttgggtgggaggccatgagtggtgtatccactccagtttggaggttccaaatgacccagtgtggatatcttatttttcagattgatcgtgtcctgtgctgaagatgtttccggaacaacagaaagaggtatgtcatcacaaatccaaaaataaataacccacttattttgattcacacaggttagttcttcatttgcgaaccataaacccatgggttgcttgaggaggtttcatgaaagaccaaaggcccaccctcctgtacctgctcctctactcccaccattggtgcctgcatagccttcattttgggttccagtgactcagctgtggagcacattcccacccacagctcgtgactcagaattctcccaggctctgcctcccaccccttggcttggagcagtatccatccagtctgccttcctgcttttttactccattgactcatccctgaattctccttccttcaggtagcagcccaggggaatttctgccattagtttcaggtttgccccacttgttgcctgggcttggtttcatacaacactggcaaaactggcccttctgcctgcagcctggcttcccaggcctccatgcccgccccctgagcctctccctgactgggaggagcgtaggacagccctcatgccagccccggctgagtgtccctcctttggcagtacgcattgccctgcctgctgtggtgcagtgcacatcatcacttggtgaggctgatgaagtggagaagcagcacaggggcctgtctagggagtgtgcacacacacgtgcacacacatgcacacgagtcacacattcacacagtcacatggtcccagctcaccctgcacaagtggaaagcatgaaaccatttatttcagagaatctttccagaaagtcctttgctagctctcacatctttaatttcagccctatctttggcttcaggttcttctcagcagtccagccttgcttgcatcccttaactctaggctgggcttccccattttcaaaggcagtgttttggtttgttttttaacttttaaaaattgggctagacgggcatggtggcctgtgcctgtggtcctatgtactcaggaggctgaggtgggaggattgcttgagcctgggagccagaggttgcagtgagccaagattacgccaccacacttcagccccggcgacagagcaagaccctgtctcaaacgaaaaaccaaaaaccaaaataattggctgggcaccatgactcatgcctgtaatcccagcactttgggagaccgaggtggttggattacttgaggtcaggagttcgagaccagcctgtccaacatggggaaaccccatctctactaaaaataccaaaattagctgggcgtagtggcatgcgtctgtagttccagctacttgggaggctgaggcacaagaatctcttgaacctgggaggtggaggttgcagtgggctgagatcatgccactgcactccagcctgggtgacaaagcgagactctgtctcagaaaaaacccacaaaaaacaaaaaaattgggctataatatgtatagtaaaatgcataaagtgttccaatcttatgtatgtagctcaatggatttttgtctttttgttttagtagagacagggtctctctttgttgcctagattggtctcgaacttctggcttcaagcagtcctcctgcctcagcctcccaaagagctgggattgcagacatgagccactgatcatggcctaaatggatttttatatacctgtgtaactaccactcagatcaaagtatagatgtttctggctccccagaaggtaccgtgtgcccttttccagtcagtccccctcacttccacccctagaggtgaccttccacaatacctataccaggcatgcttttttccatctcattttaagtaatcctgagaccaagctgcttgttccgggaaatacccgcccatgaagttaatgaaactgcaaggttaagggcatagttcccacaggactgcccttgtcttcaacaccaattgcaagcttggggctttcctgaaccaccttcaagtttaataattcacaagaaaaactcacagaactcagagctattatcctcacagacgctgctttttatagagaaagaacacaaacgagaaccagccaaagcaagagctggacgcatgggcagtcaggtggggtccaaggacagagcttctggtcgtcctcccaaaggagccatgggcggagttatcctcccagcacccatgtgtggcagtgtgcagagtcacttggtgtagctggaatgatcgcctggcgtcaaatccattgcccttagaacaaagtcaaaacacctgcacgtggtctctagcactctgcaggatccaaacctccttctttctccagacttctttcctgtgccccacctaccactccagtgcacttcttgttccttatttcagagcttattttagagccttgaatgctccatgcactctgacccccatggacttttacagatgtttttttccactgcctggaataatctcttcccctagcctttgtactgtgttgactggctaacttctacttatccttcaggcattggcttagaagtcaagaagaagctttctaaacctttaactataaaagatatttttatctaatcagctcctcaacagcaccctgtagtcaatgccagttagaaatagagaaggtttaggtcaagcctttcatatcctagtgtctggttgtttagtggaaagtaattcaggttccacctaatcgaatatgtaaggaccaaatgcagtatgactgattgttttggaatctagaccaagggtacagtgagtatggaagcacttttctctcagtacccacagcaaacattactaattaatcatgaggttggcacgtgaattgagatttatttaccatcctcgtaacaagattcatacagcctgggagtgacatcttggttctgtctaaatggtagtactgaccttaaaatttagtaattttttttttttttttacattttgggggtgaggaatcaaatgtagtctctcttgttaaaacagctttatgactgtaataaatctagaaagaggagaaaagggagtgagaatctcccttgttagttaagcatgttccatttgcacattggtttgaattcccaggagagcagtatccgagctgatggatcttctccataaaaaggccttggcattgggccattgtgaaattaaaatgaattcagagtcattcatgcatgcaactttaatttacaattaaaatatt

SEQ ID NO: 48354 - DNA, 1370 bp, Homo sapiens
gtcttatttcaggtcagaaggcagcacgtacctctgaattatattgctggttaagtgcagggtatgtgtttttgaccaggaattacttcgttgttttgaacacaacctttctatccacagttgatctacccaaatgaatgaccctgtgagtgtcattcagccatagtggggttatgcttgtgccaggttatttttgcatagtgcatggtttgactgtttgctggttgtgtttgatgcagatgtcatagtagaaagtgtcctggttcaggaactcaaggagccgggttctaggtctcccataatcatggttcctggttttttttctagctgcatgtgagccttggaacagtcacttcattccttttaagcctttgtttgctatagagtgggataatagtacccacacatagccaacctcactgggtggttgtgtcctacagatgaaaaggacttgaaaaaaactctaaaaaccatgcagcgatccttcattcaatagatgtttattaagtgaatgctttgggccaggctgcgtgccacggacataggactgcacagaatgaacaagtccttgtcctgacacttccttctagggggagcactgtgtacacatccagggctacggctagattcattaacactgaatctggattgtcatccgattggattgtcaaatcatggaattggcagggggttctcttgtgatatcatttgttcccctgtggtatgtgaacatttgtctacaagttaatatttcactttaaaaatgaaagctggtgcttccacacagcctaaacctgaaggaagtgaggagtcaaataccacagggctggcttcaggcctgaactgagctctgcggcccctgctgaccctccccagcctcccttctgtgtccctcagatctgtgcttgcccgggttgtgtaaggtagtaccctccatgtctttgcccctggtgccccctcccctcacccaaccagggtccactctagggaactggatgtgatgtgtaccttggcactgtgtcttggccccagtttgacatcctctgagcccccactggttacctgttaagtagggccagccatcaatagcctgtaccttgtttgtagaggaattttaggaaccacagcattaaaacatggaaacatgcttgtattgtaggtttttcgcatgcatttttaaagcctggttttcatgtgagttttgaagttatgaaccagaagcactaaatatgttcaaaccttttgaaaccacaatgtctttgtatatgtgtatatatacctatttttctttaaggtcatttgtgaaatgatacatatgtaataagaaagtactgatctttgtagaggaattggaaaattgtttctttgac

SEQ ID NO: 48355 - DNA, 708 bp, Homo sapiens
caatgggagtggagagagaaggaggaagagaaaggaggaggcagtgggagagacagataccttattgacttctccacactagcatctgagcactcatcacgtacctgcagggatgtacacaaggttgggaatccaaccaagaactaacaatgcttgtggccactcttcattacatttttttccccaaagcatatattaagtaaattataaaaatggacactagagggcactgcagctggccagatcacttcaaacattgtcaattttaaaagaaaaaaatcacttaataataaagtgactgatttcctttaaaaaccacttatttagacaaatagagatttagaagttgaaacattctagtcagattaaatcaattggtaaatgggtcaaatgttgtgccccttgcagtctgtcagtgtcagtttaaaagtcagggaattagagcaaagagaggatgacatcatttcacatgcaaggccttcccccacagtaacatgcgaggccctcccccacagtaactggccaggaggtaaaaggatctaaatggctggtttctttagtctgcgttccccatgctgctcagccttaggcttgctccaaaaaagtggaagaaacaaaacttggactaaaaactagagtagaggttttggcttagctatgttgtcccattgcgttccccagctgtccaggctgctcttcctttttttc

SEQ ID NO: 48356 - DNA, 2123 bp, Homo sapiens
aaatcagaagaatgtataaagcatttctgctacaccaccagatgcgtaagaatctgagtgttgagctgaattagccatttttttattcatggaacaccatttttacttgaatgactgacaaactggttatttagacttgggaatctggcagacattttctcaaaagtaaatgaaataagcttgtcatttcaagggaaacaactgacggtatttattgccaatgataaaatttgagctttcaagcaaaaattaggattttagaaacttgtatctgccactgttagcttgacagctccccactatttaaagacttttccaatgagatggatggtgatataaacaaaatgtgggtttttcttaggttgtgtcatagttgtgtcaatatttgtaggttctgcataatgtaatgaactagtattttccaactgaccaaagcatgttacaaaatcaagcatgggtaaaagatccattcaacaaagtgcaagacaggcctatgaattttaatgtaaaagagtatgaaaagttcattggtatggtttcagattccacattgtaccagcttttaactactacttgtcgcgtctgggtacaatatcaaaaaagaatacctacaattacctgcaagtaaagtacctcccttttccttcctacatatctgtatgaggtggattttctttataagttaactgtacttaaacaatatatcacaataaactgaatgtagaagcagatatgaaactctattgtcttctaccaagacagacattcaagaaagctgtaaaaatgtaaacaatgccatattcttctaattttagggggaaatatagttatttttcctaaaaataggttatgtacagatgtaacaggtttatcatcatgacttttaaattcattaataaatcaacattctttaaagatctgttttaatttccaatagggtaaatattgagatttaactatttaccaacctatttatcattagatagtattttttaatctaataaaatttaaaacaaaccaaaaaaatctacattgagatgaaatactttactttctagaaaaaaattcaaaacataaacaaaagcttttaagggtccttgataatttttaagattgtaaagggatcctgagatcaataagtttaagaatggctaccctgtactttctagggtagttttagttaaatatctaaacattgttcatccaccacatgaaaaaaaatgatatcctgctaacctagaacactatttgataattattttatgttcccaaagcacacaatctcaggattgaatcacattaaactgttgactcatattgagctattgaccaaagtccgtatgtgtttttcccattttctgtgaagccaagtctttcctttcttgtacttgtgcaactagatttttggagcaagtggaatattctatcatatttcatcttgttggatttgacccatgattttgttctattgagagcaagcctgtatccaaaacaatgatgaataggttggatatgataatattgaaaataaagccctaaggtattcataaaatcaattaattagcactctttggacacagctgtagagtcagttatctggtggtctctatatctataaagatttcatgagaatcctgaccacatgtcttactgaagtccagttatatgtccaccaattcctggaactcatactgggttccagtaattagtgtttcatcttctagttaacataaaagactctctttgatactctatgttagcagtttctggagtcctctttatagcccattaactatctagaattttcagaattcatctgaaaagggataccagatacgcttttcagaaccaacacagccatccccaactgctgggactcaagctgcagttggttcataactgcgtctctcactagaaattgccctcaactgcagggaattgcttcactcaaggttatagggcctcccagagaatggcttggagccaatgaatagctaatgcaggaatacaaagacaagcccctatgcctcaatttggcacaatcctgaagagtccgcctagcctagtctggccttcttcactttcatccggcgtatgtcctaagatcactcatccataaacct

SEQ ID NO: 48357 - DNA, 775 bp, Homo sapiens
tgtagtttaactgcatgacttatttacacctattctagctaaataaaagtagttatcaagcagtgattaaagaattcaggcggttttattataaacaactttatcatatgaccctttacttagctttggaaaataatttctggattaaaaaaactcaactagaaaaattatctcagtatagttcaatttagtgaggaaatacaatacactacttggcatgtgtccacaggaaaagtctggctcccagatgcttcttgccaacccacagtggattcaacaatgtttaaacaactgacaacgtacactcatagctctgatgacaaagtggccaaaaatttagcaggagcctgtctcatgggtattttcatatattgaaaagttaaaatcaaaacaaaacaaatcatagggacatacatacacacttcacaaaagattcaacacaattcagttaggctttttttaaagtagatgttgccaaaattattttaaaattaacaaataagacattctgctgctagaaactcaaaatatatcaatgttttttattgtataagtgttattaaaagtgagaaatataaccctatttggttaccaaagtccaacaataactctttctaacaaatagattaactgtctccataactcattcattataatcatactatttatattaatatccatgactctctaacacatgtacccatagctaacaagtgtttttattagtttgaataaaatgaaattgccaatattttcctaattttgacctcccaaa

SEQ ID NO: 48358 - DNA, 1669 bp, Homo sapiens
aaatgacaaactctttcaccccataacccctaacacctgtggctctgacagctctttgcatctctacatcctctacctccattggccagaccacccaagaactacttatttgacttctgctcccttctgcttgctcacgcagcattcattatcattatcattctctctccctcttccactcttcctcccccgcccttctgtcacacacacacacacacacacacacacaccgtcttcacaatgcacatagaaacgtcctgatcccatttgtgtagatcaccaaaaagggcttcgccaccatccccgcaccaaatttcaacacacacgtccactccctttctgagacaaaacaacccctctcctctcctccctgtgccgaccccactggctagaagacgtgggaagcgcggggagggaggataagggctctgaatgcttctgtccccaccggctcaccgttccctcgcccccgccccgacagcattatcgccgccttcccgctctttacctgccaacaggttcctaatttcctcagggagggggtagggagaggaggtgctgctggggttgggcatgttagggagcgcagggcgtgcggggaaaggacctgcgctgaaaaggtgaccgacggggtggggctgcggctgcgacctagactcaggctagcggcccggattaagaacagcggggctacgagtcgggacactgccgggccggggctcacaacaaggaagtcactgaatctccagcgagctgcagctggactgtcggcccagccccgcccagagggccggggcggggagatgggtgggaagggacacgaagggcctgaggggtccaactgcgcatgtgtattcctcggttttcccggccccagaagaaagagcctgtgggcaagccacgcccaccgctacgccgggaagcaggaggaggagccactggtgggaagggggcggactgaggctgcgtcacctgatgctgcgtcacctgatccagcgtccggagcgccttacagccattttcggtactggtgccatcacaactgctgatcgtttctgcaggattccagaaaataatgtatccatgatacagagtgtatacaagttttgcgattacgccttctgcgtaacagtcagtcccaccgcagtttaacccacaaggaattttctcttgtcctaaactattatggccttctttgtccgattgaacggaggtaacgaagtctcgtcttccgccagtcgtccgggcgaagccagtctggagccgctccggagcgcgcgttgtgattggctcttacattacttttctacctaattcgtatccttggggtgacagattttccccactacaaggaagactgggaagttctaagcaccgtcctttggcaggaaaaaacaaacaaaacaaaacaaaaaaacagaaggccgaatagacattggcaccactgtccatctacaagcatcaaaaataaaattgctggtggtggttagtagaataaaattataaaatctgctcactccaacttgaccatttagtcaacaaatacttactgtcttctatctgtaaagcttcttaaaagttttctcttttaaaaaaaatggcttctttaaaacctttaacaggcatacatctttgtgcttcccagatattgcattttttaacaaattga

SEQ ID NO: 48359 - DNA, 714 bp, Homo sapiens
cttaactcacagcctccgcagtcgccttagtcgacaaagagagcagcccacgcagcggccgccgcgcccgtgcccgtggcctttacttgcttttgccctgaagttcagtgtagtggtttgtttggggcttgcaggaagaaacaaacacactccctctgactctccacaacccatctttgccttctgcaaccgcttctcctgcccatcgctggttttggggtaggctctttgtctgcctgaggccccgcactcgcagggcaagaagcttaaaggaatccaactccaaactcctccgaagttaaatattgaccagaacctctttcaacaggccgcggttgccaggaaccgtggagggccaactcctcccaaccgccctggtgcaaagtcccacgcggcgaagagttttggagcagcgcttacctagaaagatgtttaaattctgaaccaggaattgtctccaactccaggcgctcagggaatcgccttttccggtgtccaggcgctctgcagacaaataaacagcagaaggtgaatggcggctgcgagggaagggagttggaggccgggagtgggaagcgaggctcatgcgggcgccaaggtggccctgggggtgacgcgaacatcagggagtcaccagggcactcgtccgtgtggcgcactcattgctcgaaatgttccagtctacaaatggtccgaagatggtgatttattttt

SEQ ID NO: 48360 - DNA, 904 bp, Homo sapiens
tgggaatccaggcatcctgggccctgtgctttcggtggacagctagatctttcttgtcaaggtggaaatagcgtctctgccctgggtgggaacccagacccagccctgcaatcacgcaggcaataaagtaagcactccactgtcgacggggaggccagggagagagaggcttctctttgaggcctcccacccccatccaatccaggaggttgcagtcgctgtgggcggcggcggaggatgctcgcaggacaccgctgcagttgcgacctcttcccactagatgtcttcccagttaatcggaactcaagggcgctgtctctgctcctcgggccgagactcggtttcccctgccgctttttgaagtctagcattcctctgtgaaagctggcttttccctttttttcctatactccccttcccgccctgcgctctaaatcctggctctggaaatccaccagaatcaaatgctggctccctgcgggcccgcgtcggagcggctcacgccattggaatctttttatgacctttgatgtgtttaaataacatggcaagtctgagcacacacctcggattaaactttaatcggctgcagtcaaggtcgcccaggtggtaaaagcgtttcctccgacgtctcctggcagacgctgcggggtccaaggtctggggcaaagccctaggcccccgccataccctcctgcctctgtcaggcctgggtgggggccaggcccagggccaccccatcgagctccaaagaggactaaggaaatgggatcggaggtagacactcagggtgggctaatgacctgagcacagtttttatagctgctagacagaatagttaaaaattccaagaagcactttcaatttcccctgactccagaaactggttgaaggtctagtcatg

SEQ ID NO: 48361 - DNA, 745 bp, Homo sapiens
cagaggttgcagtgagccgagatcgcgccactgcactccagcctgggtgacagagcgagattccgtctcaaaaaaaaaaaaaaaaaaaaaactctgggcaaaaggtacctatgttcatttcagttgtcatttcattcaaactttctatgcctgttctccaccctagcagctgatttatagactgaccttttacctgggctagtccccagctacattggcactgtcacaaggcagtgaactccgtgagtaaatgcatgttctgatttgctttgctctcaaaggccaacctgaccttctgcttgtctttctgactggttgtgactcatagactagctgaacaccaggtccttgggatcccaagctgggcagggtgctgtgttttttctttgctcactcagactttcccagtgctgtctgtttcagaactggggttgataacagggtcggtaatggggagaccaggctccattgctatggttactctctccatggatacaaattatcagggaacttccatcctcacagacctgactcctacctcctccagaggtcttttaccaagtaaaaacaagtggtgaactcttcactcacttcctggaaatttctcttcaatttcaccctatttgtatcaacaaaatcacctacctaccaaataggaatttttacctttgaatataattgttcaaatttaggttacaaactgaatttttctgtgttgtgttgtgtgaatattcatgtacttgaa

SEQ ID NO: 48362 - DNA, 1057 bp, Homo sapiens
aagcagttatttccacaggttaatgatgtattatataaagaacgatttcctttttattcttggaggatttgccttttaatttcatttagcaaccattttgtcttacatgatggaatgttgtaggcttaaattaactctccaaagattgaaaaaaatcgatgtctgttagctgcgctttgaactatacttaaaccttacaaatggaattttctattttcttttaaaggggaggattataaagaatatttgattattttggtaaaaacaggcttcccttagtaaaagagatagtatgttatgaatgacgtttataacctaatattatttagataaggtggaaaaaaagcccccccaaacccagcaggacctcaatgatggaagcaaatctggaaaataaggaaatctgataaaacataagcccaccatttttgccttgtggtgtgggtgttgtccttacctgctggaaaacactggcaagtctgttcagtgagaggcagccgaagaaggctagcaaatagatttattaatcatttcaggaaaaatgaagaatgcctttaaagacaacaccctcttcttggcttcacagaatctttttaggttttactgttaataagattaaacaggagatgagcagtaaagatattgaagcagagttttttttataagaaaaagtacacattaagaatcgggctcccccaccacttagctcagcactgtgtccacattcttctattcagatttttttattgctgtttgcttaggggaaaaagtccctgttgaaagaatgcgggccggagtacattagtcacctttccagtgctgtttctgtgggacggggccacgtatccctcccaactctgtaagttctctgctagtcagggctggagactgctgctggcagaaacccaatcttctccttgcaaataaaggagccatctgacaacgctgtatttgttggggcctcttctgaaccaatcagagactgcccttgaccgacgggaggaggagaagtttataataggatcagttttgtttgcaatttgtttctaatagatgc

SEQ ID NO: 48363 - DNA, 1375 bp, Homo sapiens
actttcctggaaacttccagcaagatttttctttctccagaattggagtgcatgacatcctcagtcagtgactagcgtggaccatgggattactttgatgagcttagtctaatcaaagccaattctgagtgactggttattctgaagagggaatctatctgaacaaaagcaggatccttgtaggaagaaagaggtgagaatgggtgatgggtagacaatcaacagagtcctctacagttactttgtaagatttcagtaggccacacgtttgaggaaatccatgtgtttgttatggaacaaggtagccaaagagacctttttcgtttggccagagggactgatgaaacaactaaatcctggttgtttcgcagtctcttatgcagcttcttgtttccccagcagcatctgtgctctcccacatggcttctgcttggtcttctgccagaccctgggcttctcacaggcacaatggctgtgccttacgctcaggaaagccagggtttgccagaagcactcactccccgagtccctaacttcatcctctcctagaccccatttctgaagtgaaagtacacagaggagttagtcatagagagtcttgtgcaattctaagagggaaaatgggtgagagttcattgttttccctgaagcaaggcttggcagtccaaaatattccccaatgtgctgaagttagtttaccagcaatgtgtttttcttataccaaactgctgtccgagccacaaccttgttgaaaagagtagggccatacagcttacacaactctatctgtcctccccgacaattaccttatagaacagtacgcactaggaaactttaaattttttgtctggagaatccttggtgttctaaatatgcaaagccttcatcgcatcaggcaccacctcttaccctgaagacaagccacactctggctgttaatctaggcccagccaaacacaccagggtctgatgggccagatcccacagtacagaggatgtatgctcagagagcactgcttaaaatggaggtcgctggagatgctgaggaggaggtgcccagcttcctttaataccatcgtgtgttttcaagtggaagattcatttaagcaggggaaaataccttctccctaggcttcaggcccaggtaggtaataaaaagcaaagaacacaactccaaaccccaaacactatgtctttttaaatgacgtttgaggcttagttactcacgtgtgactagcaggattggtgtcataatttgcagggctctgtgcaaaatgaaaatgtgaactccttgttcaaaaattattaagaattatacgacagtgacagcaaagcattaaatcaagcatggagcccttttaagcacaggccctat

SEQ ID NO: 48364 - DNA, 956 bp, Homo sapiens
ccatgtctcctgcaaagcaagaagtacaccacaatatataaaataaaaagccaaaaatcatcccaagaagtcgacattatatcatcattaagacccagttggtctttacttgccctgttttccatggtttgtctgaattctctcccaccttcccaccatgccaagactgcaggggtgtgttgactttcattgccttgaaatagttaatctttgcaaccaaggttccaaatgggaggcttaaactgggaatcagctcactctgtgtgtaggtcatttaagagctcaatctcatctttgaaatatagattaactaggagagtatgagttcagcatttctctataatgttgtttcattgatcctgcgggccaactggacatggcttcagatggatacctaaaaattagttttaaaactttcccatcttttaatattttataacctgtcagaaaatcaattatggactctgccccctttcaacgcttggtttcataggagctgatgtttaaccaaagcaaggttctttcctctcctttacaaaaagcaatggacaagtttagagtaaatgatgacttcagggaatttcttggatttgtaaagatttagagatgaattgaatagctttgacctgccaagtccacagcttgggtttctctctctcctgagccatagccagcaaatggtttccctaaacactgggaaagatcagggatccagaggtcagtattgtgggaacccagtcataatttaaacttgtcaaatatcttgatatatttcttcaagcccagtgaatcacaaagggcctttctccaaaacctgtccttcctcttatgcacacacatgcacatggagcacaatctttcaggtttaaaaaaatttttttttcattttttagtttaggaggatttaagggaagaataaagattaggagatatgccagagcgatttttattttttc

SEQ ID NO: 48365 - DNA, 2553 bp, Homo sapiens
atatttatgggttcataaaaatagaacatgaatacgtattttaatgaaaaaaatcacacttttataaaatttataatgagcctttttttattgtgctttttacattatcactgttttaaaatgagctgattcaaaagactataaagactccctgaaaaacagtacaggaaactcaagaatttactttcccaaaaacagcttttaagacatgaacatgaactgcctaatgaatctcatagttaggcttgtgaaaaggaccaacttgcacctttcagaggtttctccctctttttaaaaattcccatacagtaaaacctgctgacactttttttttttttttttttacaagacccagggaggggggtggaatcttgccacatggtggggggcggggatttgaaatatttgtgagaatttttatacgctggattcccctctccagtgtttagacaagcaaaaaaaaaaaaaaaaaaaaaaaaaaaagccaaatgttaaatgcttattttactaaatgaaaaatagcaatcccctccaaatatttcattttcatttactttcgttttaatatcaacaacctaaaaacaaatatttagagtttagaaatcttttcaattctttgcagatacttaaccttgatatcagatgtagttttcagtcaacttcaaaagtaaaatcgttatatctttaacaaaaaataatatattttataatccttttatcattagcaggtttggatgcaatgccacctggtggcacagataaattcttagctggacttaggtttttggaaactgagctgttctatgaaatactaaccaactcttctgactactctaacctcctcccaaacaagttattcatcccacagtttaacaataaatgatcattttcatttcaaaaattttaagatttttaagcaattaaactgtacatatgcacatgacaatttcctcagcatttaaacatcataaaacatttttttcataaaccaaaattataccaaagatttactttttaaaagttgaaatgtttaaatatgggggagggggtaagatggagtaaccaagttgctttgtaaaattacactgtataattaattccatggtaagaatgtttttatggtgtgttttggtgaccttttatgaccatcaagttcacaatgctggtgggctgccttttaatccctccgcagacaaaggccctaaataaacacagatcccttcctgggaaaaagtccactctggttaaatggtaaggaaatgagtaaatcattagtaatctttaaagccaaagctataaactcaagttaccttaagttgaaatgaaagtgtcctgcaagagtttcaaagttctgtcacagatagaaatctccagctcttgactccagactaggcgccagctgataaacaaacaatttaagtcaagagctggagaattcccagctttttcatttaatggctttggccaagagtatttattgcctccagttttattctcacttagctctaagaggaaatttaaactcatcattatcttaaagccccatatgggtagcagtcagctcacctgataatagctcctcttactctgcactgattgttgagtctctactaaaagtgatgtaataatataaactaattaaccatagttttaggttgactttttaacaggctaaataaattttgttcaatatagtttacattcccactttggatagttacaattccaaaaagttaaactttacagttttcagtagaaactaccaactaaaatggaagaggacaatgtaatctctctctcattcttgcatgctctggtctctggcacccccaccccctaacccttgttcactagctcctcaatattgcgtaaggtaacttttctgtatcaaatgtagacttttcctattagcttgaaatatccagtgttgctctatttcctaacagagcaaagtgcaggatttaagatgtaaatgccgaatcatgaaaagctgttgattttatatgtgtactaataagaatgtaaaagttcagtccaattaaagaccataagatgtcatcaaacctttctaaatgctgtatttaaaagtctgcggctgggcgccatggctcacacctataatcccgacacttttgagagaccgaggtgggcagatcacctgaggtcaggagttcgaggccagcctggccaacacggtgaaaccatgtctctagtaaaaatataaaaaattagccgggcatggtagctcatgcctataatcccagctacatgggaggaagaggcaggagaatcatctgaacccaagagacggaggttgccgtgagctgagatcacgccactgaactccagcctgggcagcagaccaagactttgtctcaaaaaaaaacaaaaaaagtttgctatcaaagattacaggtctcaaagtcagaattatgtcgctgctcttattcctttctcaaaattatcatttatttttagaaaaacctcacctctacccaggattttatatggaaataattattttaactatctgaatgtttgtagatatttaac

SEQ ID NO: 48366 - DNA, 1792 bp, Homo sapiens
aaagtgctggaattacaggcatgagccactgcgcccagcccccatgtcttccttttttagaaaagagttaaaaggtaaaaaaaaaaaaatttttaattaatagaaaaaaagcttataaaataagaatatcaggaaaaaatatttttgtacagctgtataatgtgttgctgtttcgagtattattacaagagtcagaaagttttttagaaatttaagtttgtaaagtaaaaatgttacagtaagctgaagttgatttattattgaagaaaaatattttttataagtttagtgtaccctaagaatacagtgtttatcaagtctacagcagtgtacagtaatgtcctgggccttcacattcactcaccgactcatccagagcaatttccagactcacaagctccatttatggtaagtggccctatacaggtgtgccattttttatcttttatattgtatttaatattgtaccttttctaggtttagatatgtttagaaacacaaatacttaccattgtgttacaactgcctacagtattcagtatagtaacatgttgtataggtttatagcctaggagcaatagactatggcaatatagcctagattcaggtttgtgtaagtacactctatgatgttagaacaatgacgcaattgcttaacattaagtgacacaacactgcatttgatctcagcagtcctaacactataacaacttatattaaattttcaccaacttggtcaaaactcagttacctggttgaaaatggctgacgacagataccagacagccaccctctccagaaagaagagccaaaattaggaataaaaatacctcaaatagaagagaacactagagtccaagggtgaattcacagcaaacaccagaggcatagaaagagaagaaaggaagcagccagcttaaccaagatcaaccaagagccccgagggactccctattacaggaaaacggtaagtaaaagagcttcagcagtccacgtctctgcaatggactgttgcgatatgaaccacaagagagctcctctacttacatgaaccctgacactagcgcaggtggagatctggaaaccctgcaagggcaggcactgcaccagacaggaaactcatcctgggtcattcaccatcccccaagacctgaatggctgtggtggcacagcactggctgggtccaaagtgctttaacccacagggtatactactccccaggaaaaaaatggtgcagtgcgctgaaaggcagtacctgggacaaaggaaactgaagcacactctacagtgtctgagagctccctgtctggggctgtgagaaatgactccaagcccagcaattcacaaaccctgtgcttggctttgcaaaggaagagtgaactcttctcctactggtggagcagcctctgtgatcaagctctcacacagagcatggtacccttccccctgctctgtacacttgctcctgctatcaccggaggctgggccaggcaagctggagggctacctatccggggcagagagtggtgactgaaatcccactggcagcatggcctccatgctaaggctcacatgcaaaggcagggcccatacaccactctgtatagcatggcagcattgctgctatagacggcagaaaagcctggtagcaacatgtctggggctgttgggggtgaccctgtattgcagccacaaccagtatcgcagccaccaccatcaccagcccacgcagatagggacccagaaggtaatcaaaccaccactattgccattgcccataccactccagct

SEQ ID NO: 48367 - DNA, 2285 bp, Homo sapiens
gcaacttgaatttatgcttccaggtggccattttccaccttttgggcctgaataaactctatacctaatcacagtttctgaatcattattttaataaggttgacagttgttaggctatttcatgttgcacgaacatcagagagagcacttacagaccttcatggtgtagtgtatttcttctaggctacaaacctgtacagcaacgttaatgtactgaatactgtaggcaactgtaacataatgtaagaatttgtacatttaatgatctatacatacaaaaggtacagtaaaaatactctattataatcctatgggaccacctttatgtatgcagtccatgaccaaaacatccttatgaggtgcatgactacggttttactaaagcttgaagaaaagcctccagggtcataatattctaaaatacttcttcacctggaacggcaggtggccatcttgcaccttgaagggagagaggagcctgatggagaaaagcagactccagaagcaaagagaaaagaaaagaatctggctgtatctatgtcactaaattcagctctgccagaggtcaggccactccccaactcttccaatacatgaaacaataaattctcagtttttgctttcaaaaaaaacaaaagcacttcttcaaaacaacatctgattttcttccctgcaaatctctcactgaaagaacagctgacattagaaatcaactaaccagcatttctgcaatcttggtggggtgttgggggatgggcttgttttctttggctctcacttcatcagcttgacttgatatagtaacacagagggaggaaatggacacccgtccttaaaaatgtatgagtcaactcaaatatacgctgaattttttaacctttaaacccacccttcagggcactattgtggcaaaaagtttcagagtttcacacatacttttccatctcatcccaagtcgtgtcttggccttatggtaatagaatgaaattcattttttcttttatccaacattttaaaaaactaaacatagctatgaaataagaatgttgacattttaatatatcagaacgtattcatccaaattaatattaccttttaaagtagtgctcttaggaaatcacacttgttctgatgacatggccactgttcaaaacactctctaagctgccaacgtaaatcatttatcaacaaatgctttcattttctgttgccctcaggaccaaagctttttcaccctttacctttctcacttcattcatctgaatttcacattgtcccaccttccactgctgttaaaatcaatactcagaggacctcttagagtcaagatgcttaagagaatgagagatgtgaggaagagaggcaagaagattctgtcttccaggcttcctgcctcagggtgaaccacacacagaattttccccactgtgtattgggggaggagtggcaactgtgcacaagaagctaagtcttcgctattattcactaatctgggaggagcaccgacccagaacccaccttctttccttcttcacacccagtgacatattgcaaggaagaagaaaaaggaaaacccagtaactgagtctgtgtcctggaaccctcaaatttttatgcaggaatcttggagaccttgtccttcatgatttcattttacaatctttgttgggtgagtaaagattacatgcaatcttcctgtaattccctatcagaaatgaaatgatccttaagagttgcttatttttttcttcctcaaaaattgccttagcacttaattatagtaaaattacaatagaaacttccttgcagtattagttggtcttgccacctaagacatatccaacacctcgtcacatccaactcaacctgttttatttcccaacagcattaggtaaactactagacatttggtagttactcaagctatctctgttgacctaaagtaaaagtcttcagcaaagactgaggctccactttttgaggaaactgctcctttgtcctcattcttaatctggataaatcctacttattctttcgctgtctgcctaaatgtctagtttttttttttttttttttttttttttgagacggagtctcgctctgtcgcccaggctggagtgcagtggcgggatctcggctcactgcaagctccgcctcccgggttcacgccattctcctgcctcagcctcccaagtagctgggactacaggcgcccgccattacgcccggctaattttttgtatttttagtagagacggggtttcaccgttttagccgggatggtc

SEQ ID NO: 48368 - DNA, 3030 bp, Homo sapiens
cagtgtgactgggccactgcactccagcctgggcgacagagaccctgtctcaaaaaaaaaaaaaaaaaaaaaaaagggcggggggccaaggggctcaaatcctaacccactattttttttttaagcaaagattagaaaaaattaatgccaaggttttttttgttattaatcctcagtatgatcttgctaaacgatgcattgttacaactctcaaactttcagtttgaggaagacaacggcagtgcccccacaaatcaaccaatttttcaattaaagaggagtcctggtgtgatagaaagttaaggaattaggaacaactgataacaactttctaggtcttgctgggaatatcctgattcactcatccaaggggcctcatgtccctcgtgcggagtatgaaagactgtattagatctccgtggatcttcatcctggctctaaaaactgcctctttgtaagttcatggctagcttccacaatttaccatggtatgagaggagggaggcaggattaattctgcccacaatcttgaggacgctgaacgtgttttggttcataatttgacaaaaatgacatttttttaggttacagtagaggggggaagcccgtcttgctggtcaagggtgactgaaactttgctgaaagacttactgcctggcttgtacagccaccgcttgtgtaataaggccatcccctcggactcaggtggttaaacatcaggccctgctgcccaagtgtgtccccaacccaaggtgcaccctgggggcgctgaaagaccaggggtcgctggggtgagtgcgggttgctcctggagttgggcgctccaaacgtcctcggagtcctaactccaaagcagcatgccggggtcccaaatactctcttctcttcagcccaagctcttccccacctcttcctaaatcccgaaaagggcgctgaacccgttcatcaggagcccgggagaaagggagggaaggcagaggggggtactcgcggagtgagtggcggccgcagaaaaggacaggcctttagtaccagccaaaatattgttttttaagccccagcccaaccgcagggcctcccgagaaaagacttcttcggccgtctggacagaagaagcgagcggccgaaagaaggacaagggggaggaggcgtgaggtccttacccgctgcaaagctgccggctgccggccgcagccgccggctccagtaccggagaccggaggcagctccgaggagccgtaaggaggctgccatgctgcgcccgcccctctccccgcggtgacctccgccgcctcccggagggcccacagactgcgagcgtgtgcagcgggactggctggctcgcccacggagaagggcgcgcgcgcacgcgctctcaccgctcgggggcgggtgcccacgcgcgagggaaggagcgcggagccgagaggagcggcctgacgcggcagggcctgtcaatccctttacggacagggaagcagaccaatcagaattcccaggtccgcagctgtgcgaaggaccaataagaggcctttttgaacagtgacgccaggcgccctggcgctgcccccaagctcgtgcctcatttacagcctgcgggcgggagtctccttgtttaccaaagcagagggcgtgtgggaggcgggggccgtcgctcgctcccgcctcctcggaaaccttgtccccacaaccgctgcgtgttaaaaaggacaaaactgactcgcagcttgaaaaacactcagaaagctaccatgtgtgtaataacttttaaattcatttgattttacttaacacaacagtttctcaatactaaaaatagtaggaaaagaagttggtaacattatctttgaagggaagagttactagaaacttgcactttctatttcaaggcatatttctctaatctttgaaaattctacaccctaaatccattttgtaagcaaaactaaatataaaatccagaaagtagtagtatatgtatgtgtattagaaagaccttttttttttttggagacggagtctctctgtcacccaggctggagtgcagtggcgcgatctcggctcactgcaatctccgcctcccgggttcaagtgattctcctgcttcagcctccggagtaggtgaggtgggactataggcctgcgtgcgccaccacacccggctaatttttttggcactttgagtagaggcggggtgtcgccattttgcctaggctggtctcaaactcctggcgtcaagtgatccgcccgcctcggcctcccaaagtgctggttattacaggcgtgagccactgcgcggtgcagagagacagacatttagtcattcttctgtcaatgcttagtgtacatatttgagtctgtaaaccccttgggggtaattgcaggccttctcatctccactgactccaccaaagggttggaagccatgaccacaccaaagcaagactatagcctttggagaatggcaatacagcaggaaagagaatgtgtatggagtagctagggaaatgcgaaccccaatctaagtagcacaatcaacaaaatttgactttgacctttttttcaactcagtaacccatggagttgaaagcaaaggaattggatcatttccatctgggctcttttcatgtttctgggcatgctggcaacgtttccaaaaacttaaaaacttgtacagagtgcaaggtccctatctgtaactgggaggaagttaatgcccttctttgaccatcactccaccccaaccctctacccaacactaaatgaaaagaaggaaggaaagggacgaagggagggagggagaaaaaactcatttcaacaattagaccttctcctagatttgggtccccacccctactaggggtaaattagtttctggagcatttcccacctgtgcctctcttcctggtttcgtcaggttttagctggaatagatctcctgcaggcaacaaatgtgggcctacaggtttctttttctttttcttcctccagcactacaggtttctataattaactcctgaactgcaattg

SEQ ID NO: 48369 - DNA, 2606 bp, Homo sapiens
aatatttctcaataaatttttttttttactctttctatttgtaaactttttgtccctaaagagattcctaactacagctttatcaagaacagtatactttaaaaaagaagtggccagatgcagtggctcacgtctgtaatcccaacagtttgggaggccggggagggcagatcgcttgagcacaggagttcgagaccagcctgggcaacaaggtgaaaccccatctccactaaaaatactcaggaagctgagctgggaggatcacttgagcctgggaggcagaagttgcagtgcgctgagattgtaccactgcactccatcttgggcgacagagacactgtccctccccccagaagaaaagaagtctattctttcttgcaggtcctttttttgttttgttttgctttgctttgctttgtttttccaacacactttctgattttaacctactcagccaatgtgacagagataataccagcccttgtctctctattccattttctgggatatggtcttgggttctgtttaaggaaggtcctgtctctgatttgcatgtctttctgccatactgaatccttcaaaccttccttggtcttcctgcactgatctctcctgagtgtaccctatgtaacttgtcctaatgggggtcttttgggaagtctacaacatatgccaattttccgcatattattagcctcggctttagtgctttggatctcccaaccatattatgtaatgcttgatgtattagggattcccattctgaactctaagaaaaataatcaaaccaaaaattacattcaagactttctccagtggtttccgtatattaactgatatgtcaagggcccccaaaaccatccccagatttggttatttgctagaaggactcaggagtcagcatatggtcacactcatggctatgatttattatagcaaaagggtacaaagaaaaatcagcaaaggcaaaagcacatggagcaaagtctagaggaaaccaagctcaagcttttgataattctttccaaatgaagtcacagaagacacgcctaactccttagtaatgagtcatgatgacatgtgggaagtgttttctaccagagaagctcattatacactctgcacccagggttttactggtggttaaatcacataggcatcctctgcctaccaccaaattccagactcccagaaataaagcaggtattcatcataaactcacattgtttgtatagtttaggtatagtaagccacttttatcagttagcatagtagaaacctttcccaaattcaagttcgcagatgtcagccaagggcaaacctggtaaggagccaggcctgccatgttaactgttttttgtttttttaaatatctaaggaaatacaaatagaggagctctggtagaacagatctaaggcaaatctcttgagggagagccaagggtctgaggctggagtcaccagacataactgtcaagtccaaaggtctgcagcttgacagtgaatgggaaagaaagctaaaatgggaaaccgagcaggaagttgattgaagtacagcccactgaatgctttggtcagaattgattcttcccaaatgctgctaggtgcccaaagttacccttccaggtgcataggtgaatcaagcaacctaaagatacagagtcaagattggcaaacactctccagatgccaccccacccccacccacccaccatgacatggcagattcctcagggaagaaaggctatgactggtcactgaggtgagtgtttgtattagaaggccagtgttctgagttttccatttgtttttccatttgctttttccatttgtttccagccaaagtctaatagctctacagtgtctgacatgacccattctttcaatgatgcatttgtggcagatgctgaattatgtgtatagtaccccacaacatatagccaactattcttgaagaaaaagaaaagccccgcctcactttaaaccaggctgcagtgtcccatgctccttgggaagaatgagaggctatgtcaggaatactgtggcctgcacacagtgaccttagggcgtcattatccactcacttcctctgcagccagtagtaacaggccctgagaggctcatcagagagttagatctctaaggaggctaaagccttgggcatctctctcaggaaataaaacagtttttccaagcccaattcagatgtttgaatactggctataaatattagtttcctagcaattgattaacaacatttttcatgactctctgaactaatagacttatttggtccctggatcttgcctctcacacacctctggtgctgaaagtcctggactgaaatggatgtggtatgttgatctccaggcaaactggagaaattcaattctgaatgccttgcttgtagagagcacctcctcagacccaatatctattcatagattttggattttacagcctctggccacacattcactagtctaactctcccactgactattctctgaagcagcactatgcaaaagaaacataatttgagccatttaaattttctagtagccacatttcaaaagaggatagagaaataagtgaaattaatttta

SEQ ID NO: 48370 - DNA, 588 bp, Homo sapiens
ggatctgtgaaataaaaacatatttgagcctaaaactttgatttagccttggttaaaattaaacatttgaagattatcttaacatttccttaaaataatttttattaactttaattatcattgatacacagtgactcacaaaatacaggtatttaataagaaacactgggaaggaagaatcttgttgacataagtaccttaaaaattcaaagtactttgctggctattactcttctcagtaagatgaggaagagaggttagaaaatatttacattctagtgacctttcagttgcacaaggaacaaagaacactgttaggagccaatggggcaaaggtcttatataaacctctgcaggctctgtttcttagtatcataaattatagtttctctttttgatagtgcaagaaacttcccaaaacactcaattttaacttcaaagtttctgcttagtatttccagacgtaaactttagtgtaaagcatgtgatgactacaaagtctgtaatgcatttgttataggaaattttccttaatgtgcaagataggaagtcaagggagtttaaggtgttggaagtcgtgttaatgaa

SEQ ID NO: 48371 - DNA, 1949 bp, Homo sapiens
aaactgaatgtccaatataggaaggcaacatatacaacaagcaaaagtgattttagaaataacagaacgcgggagaaaattcacacacggaaaatgatacggataacaaaagcaggtaactcacagaaatgcggctagaaaagaggcctctgctggagcgagagcaaatagaatcagagggcattagaactgaaaagctcctaggagctttcagtgaacaaaacttcatagccaaaaaagcacacgactgggccaggagttcagagacagtcttggtgctcaggggtttgcagccctagccgtgtggtcactcccttgcttctctggctatttccttatctataaaatgagtgggctagtttaggccgactgagacgcagacagggatacggtactgtccatggacctctgagctgccctttccacatcgctggtgagttacttaaacctcctgtgtgtttccccctttcgtatgtcaaaataataacataaaatcagaatgtaaatccagacgcattgttttgctgcgattaagttgaacgaaaatagcaaggacgaagtaaggagagagccagcctacccgcgggatgaggcgtcccgcggcggagtgggctgggggcgtgtcgtcgcggaggggagcggcgaaccaggcaggaggcggaagagaccgccccgtgggcggaagtgacgcaaggcctactgtcggctgggaggggaggtgtagccggtctttgggggtaggcggtagtggcggaagaggttcggcggctgatggcggatcaggatcggaagcctgcgtaactttctcccttgatccgggagtctttccactgggtaaggcgcctccccggtccaccccagcgccttgtgcggggcggcctccagctgcatctcttttagggctcgtgctacacccttcagcccctgtactgtaggggcctggccggtctcgggagaggtctctgtggtgacgaggctttccttcccgaagacaaaccttcctttccagactgcgattgtgacgggggtgtgggcgactcggatcagctgtggagttttggaatggcaacgggtggccgccccacgcggtgggaggcccgtgggacaggccttcgcgatttgggggaggcgtgtgggacgggggccctttggctggggacgagtgacgctggcgacccccgaaggaaaagcttctggtgtccaaggctaaactctggggtgactgttttgagggcagtgtgggttttaccggcgcagtaagctgagaaaacacgtaggtcgcgtccgagaaggacgctggggtttgcctttgcggagagaaacccagctgttttggtttgagtcgccggtggcgaagggggcggagactccctgcgccgcctacttttgagggccgcgggcggagttggcggttctggctgatggcctgcttcacctggaatccattccccaccccgccccgttcgcaaggtgtggactagtcccgaccgacttgcactcctggcttagggaatctgtggctagagtttagcgtgcgcgcgcgcgcgtacaccttattagtaaaaaattgagcttagcgtgcgtctgtgtgggtgtgtgtacacaccttattggtaaaagttttgttagaaaacactggcatttgactttagacatacacagtgttagatttccggtttcacacagtggttatgaattgctattatgttaggctttagatgggaaaataaatcttgatttttcagctgtctgcattctgctaatgttaaaatttctacgagctgtgcacgaacaattaatagttacaagtttggtgctcaattcctaaaggatttaaagagatcatttgaatagaaactaaaagtgggtcgatcgtcctcaaagtgcttttcgggtttagggaaggagcttaggacagcctttctctttcgttctgttcctttcaaggg

SEQ ID NO: 48372 - DNA, 1136 bp, Homo sapiens
gaagttcttactatggtctatttttcagtaagttcactaaggcttacatttttgggctaaagtaaaacaagtattgggaaccactggaaaaatactaccacaaaagtcaaatctgctttgggcttgaaaaagttacaagaggagtaagtaaagataacattgaaatgcttccctgcccccaccccatgtttattttagctgtatacataactgagtgcccactatatattatttatcttttttatagacattaatgcattcgcaaaataataaaattggaatttagaccaaagactttataatatacagtttacagcataacacacataaagaaattctagaggcattggaacttggggaagtgtagtaggaaacctggaagagggcactgtagccagcatgtataagcatttctgattttgtttcccagccaaatgtgtctggccccttaattgttgactggacgtttcatacttatccttggcttgcctacttactatactcctgtttgtagaggtgcactttagagaaggggaatcagaatttgacatggtaaagctgcttgcttctactttcctttttgtgtagggagtgtacttctctccaactgagaggaggtttgtactttttctcaggatgttagtgaagctacacttcccaggcattaccacaaggtgatgcagtgactttgcatattatttctccactcccgtgcgaccttgacattctcagtgaattccaacatttttgtaagcttgcctaagtctgttatctgtaggaggagtgaaccagaggaactatgtgggaattagaaattttattatttaaaatgggttgataatgacataattatatttgattgcattcatccatgtaaactttttaaatgattagtagctatattgtaatttaataagagtaaaaaatgacaaggtactggaatgacttttgtaaaatatttctataattatagcaatgaaattttaaaaagattggagtgttggagagagattaatgaaggccattaataggataatcacaaattattttacttttcagacttgtaaccattgtgaatactatattttaaagtgaaatactagtgttttctattagaaaatgtgaaattcagggga

SEQ ID NO: 48373 - DNA, 923 bp, Homo sapiens
tgcatcccctccagcactcagtgctgggtcttcgaggaacagccattagagccagttgcctgtctctcttctagagagttggtggaacatttcctgactccactctgatatgctgctgagaaggtagactgagacactctgatgcaattattatatggactaaaaacatcagacttccaccaggatcatgtataattcagtcaaacagatttgccaggcgtgggttctaattggaatggcaatcataagcagtctttctccttggtcaggccaagaaggaattaatttgtaactcattaacatttatttggaggaatcttaaaccatggtgggaatgagttcatctccagctgggcgcagggccttgctgctgaaggtccaaggtcactgcccaggaaggctggctcagccttggaatgtgtccatgggctcgtgccagccctggccctgatcccacaccacagaacccatgtggctgaaggagctgaggctgggaaaatccccagggagggggcagaagactgttacgtccttagcagaacatgaggctttttctgaggttctggaaaataagtctggacagttttctttcaaagtggtatggttcagcacacctctgccctcctttgccaccccctcaggaacaaaaaccagaagtgcagagggagctgtcatgttattcctggcccaacgagagcaggaagtgccataaatctctcaagacagcctaggctcatgggatttccagaaccaatctgtcgatttatgagaatcagatcattcagacagacatccgaaccttagatccttatgaaaaaacattaacatacaggacattcctgtcacttaggaaaacattattctttcaaagttcctcccatagaacacatctaacatctaggagaaaagagcaaagaagcatg

SEQ ID NO: 48374 - DNA, 801 bp, Homo sapiens
gggggtagaaaaaaatgtttacatcttgcattttagttaagagcatggtatttggagtcaggccggggttcaaatcctggctgggttattatgtaatttgaggcaagttgataaacttctctgaatctcaggtttattctctgtaaaatgggaatgagagtaggtaaggaattaacgtacgtcttttccctttctacacgggagtctgatctttggctacatttggtaacctgctaaaagagtgtgtcaactatgttactaggcaacactatctacgtaagaatgacctctgactggtgaactgcacagcctggaggatctaggaacctgtagctatctgataggaagccaagaatcctgatttggacttcccgagcgtggtgatcttgtagctgggcatggcccttgcacagaatggggagctatgcccagagcgtgtttcaagagctttggctcctatggggcgtgaggctcttctaccaggatagcttccactcctacctctctgcacctgaacagactcccacgtgcactgctgcaagggtgcctgcagaaggcgacttgtcctccatcctctgaacagacccagtgccctatgtggcccacggtcatctgtgagtctgaatgttcacaacctaagaaggtgacttgttggcagacggggcaataacatttcaacttcagaggactgttgtgagagtaaatgaggtaattggcctgtcatgtaccaagtggctcaaaatgcagaagctgttattaattacataaagcattattatatcgttatgtctctatattttg

SEQ ID NO: 48375 - DNA, 796 bp, Homo sapiens
ttattcaccttggtaacaaatcaggctgtatccaagtatattagttttgtatttcggaagccagttttgtcaaggatttgacaaaaggaattgccttcgttacttcctatctcccagggaagccgaatcattgcttaaaaaaaaaaaaaaaagtcacaggagaaagagctgaacatctggacacagactgactggatggccctgcctaagagttatcaaatgtaagtgcacataggtcacagcttactcaggtcaaattctggtccaagaggctctgccaggctggctagagcattatgcctgccgactccacacccaggtggcagccaggaacacagtgttcaggttcgtgggccacagaggttatgtgctagctggggatttatcgttcctgattctgtgcaagttgtgtattcattctacttgctaatgagtaggggagcatgctgagctgtaactcaattgatctcgctgatggtgtgaatttgggtgtctgggaagtccctggaccttctcagttatctggcacttggcagatggctcctgacaatcttggcttctgtggaaggacttctgggaattaactctggactttctgttgcttaaaaaaaaaaaaaaaaaggcttaaatttctttagacaatgtaagatggtagttactgacagtctgctactttctgtgtgacttgagcaagtttctcagcagataaagatgacagtgactcatggctcctacacatgaagaggttattaagaggattaaaagagataagccatagacagcacagagcacagtg

SEQ ID NO: 48376 - DNA, 947 bp, Homo sapiens
atttgagtcaaaggaacatgagaatctgaaaggttaggatgggtttttgttccctttggccaaatcctagaaggctttgcctactgggggccccactgcttttaagacaaacaacagggagaagaacaattggaagcacaaacaaatcctttcagtttcttttgttattttgaggcagtctttgagggtggccagttataataaaaatatgaaagaaaactaatacacacacacacacacacacacacacacacacactgatttataatttttataatggagcatttaatattcacattcttgtatggaaaatattcttatttttcccaatcctgcttcattccaaaagcatttacaaaagagacagctctgtctttaactcacaaatgagaaaacagaggccaaactgtgtaagtgacttccctatactcacatacccaggtgtatggccaagttggaatctgaacacaagtcttttgaattaaaatgccataatccttctagaaagtacagaaatgacaccatcatcctcttaacagaaacagagatctggatgaaatatcaaaagacaaatcctgcttccctgttcactcagaaaggaatttgctattgagtaaaaggtaaacatgccatggcctctgcaaacaaagtgtgattttttactatcctgtatattaatgaaataccatcacagccagcaagatgagaacttacaacgtgaagctaagacatgaaggctgagccgttaccgtcctcaaattgcaatcttttatatatataaaagaaataggctgggtgcagtggctcaagcctataatcccagcactttgggagtccgaggcaagtggatcacctgaggtcaggagttcgagaccagcctggccgacatggtgaaacctcatctctactaaaaatacgaaaattagcctgccgtggtggtgggcgcc

SEQ ID NO: 48377 - DNA, 2455 bp, Homo sapiens
caactttactcagtaaattataatcatttctttgtcttgatgcactaatatgtaacaactgtgggggaaaatacaagtaaataacaccttcccccaaccagtcattttaacatgcagcactctgcaataattatgattccattatacattcaagtccaccaggacagcagccctgcctagaataaacttcaggttagagtcagtctgataaacactgattaacaaactactgacatagtaacaaactaaaacctatctgacttctatagtgatttttttcttatgttttgtacagttattgggagcatgcatattatttgaaaatattaataacctgaagttgttttccttgtttattcttcatctggtgccatagtcttcactcatttttggggggaacaatgaggatgcaaatagaagtggtagagtaacgcaacctcactctgcaggcagctttggacacagagcatcttgaaaaaggctcgcactggaggaggtagggtcatctctggaggacatttgggcttcctcatggcacacagattattctggggcctgccccaaatgccatgatgccttgtgccaaacagaggaaaggagggaaagctaccttcttaacgtgggttagtggcttttacctccctttattagacacctagaggttcctaaccctgcctgggcactcaggggtatgggatgttgggggtgaggctgtgctcctggagaaggtaggaaagtatggtcagggatggggagaaacatctgcaaagaatgcacatagcaagaccagagaaagtgaataaccagcaaccctcacggcagcccattggcatctacagaacaaactccctctaggtacagcagatgccaatcttttggctcactaatgggcacagttcagtggcccagtttactttaggaagaatctgggcctggggacaagggaacacagtggagcacacccttactggggtgcagagggaatcaatctgttcagagtttatttgggtacgtgcagaacttgcttaactgtccacctctgcctgaaaagagacaattatgatgtaggaaaagaaaaagcagcaagactagatgtactcaaacacaataaatattatgttttcttgcaaatgtcctcagcaatgagatacagaagcagaggaatttaaagagcacatccaagagatctgcacagtcagagaaatcagtgactttgttttatgtttcagttttccaggcaggaccaattaaacctgtcttaataaaattctcaagcaatgctgacatgattcatctgtgtagtattataagagtttagcaggccccattttaaccttggtcgagttttatgactcatgtaaaacattctgaaaatgactcagggaaaaagaggggacatagtgagataaaagtggaagaggtgagtcatgagatctgagttcttattccccagatcagtaactagctgtgcggctttgaacgggtcccttcacttctcagagcctctttttcctcgtgtgaaagaaagggaaggaatttttacagttttatttgtatgtgtctatttcatctccattttattaaaaactgggctcaggttgaacacacttggtcaaaatgaaccctctttctaaatgccaattcacaggattgttccatatccagagatgtgtggatggaaaggttccttattcaaatcttattaatgaattccagacacccaggacacccccagcaacaaggaatctttcgctgagttggttcatgccatttttggacagcatgaattatcacagatgtctccaggtaatatgtctcctcataatttctacgtcaaactcacttttctctactctagtcacatgtatgcataaattgctttactagaaatgggcagagagattttggaattttcattgccaacatcacaatttcaaataggaaaaataaaaagctttttttcttccagcagagaatgcatgaaactcagttgataattcttacaaatggtaccaaacaaaggaagaaaataccagaaccaatgggctaatgcaacacaatacaaagaacagaggagaatgggaatttccatgaagtgggtaacctatttttggcaaggtaaatgaaacattaacatattatattagagtaattcaggtgaaagaaaacatacagcctataaactttgggatgggggaatgattgtggcaaatagcttctcactgtgcttgtattagcataactagtagatataagctcatttttcagggttttatgattctgacactataaatccaaagtagacttgaacttgttaagtacatgattcatataattttgtttacataactgaactaaagaaaggaagacaagataaaaattctactacggaatttgttgttttctttcaagcatttacaaatattagagataatcttcctttttatttaaacaa

SEQ ID NO: 48378 - DNA, 438 bp, Homo sapiens
ttttcaaaatgcagtgctacaaacttctttatcactatgtcaattaatgctactgctgccttaacccacaggccatcagatacatttttaaagttctttatgtgagcattattcaaggaaaagccttgtccgctgacccagccagtaaaaacattgggccctgacattgggtaagaaatgttgcttacaacattgtaacattgttgcaacattgtcttacccaatgccagggcccagtgctattactcaagcaggctggaacatccaacaatttctgccagcctaagaattattggtattgcttttacatgttacattttatgacaacaagtctaacaatataaagcaaatagtgaaatagcttgtttctttccaggattatcgaatgagggcagaagatgtcatgggtatattttgataaatatttcaggcattaca

SEQ ID NO: 48379 - DNA, 1206 bp, Homo sapiens
gtgaaggaatcaggatggtgggccacctttcctgtgctaccagggagcattcacacataggctgggctgcagagcctgtaaacagcctcctctcctcaagcagcccaatttctcatatcttagcaattgaaccagacaactatatcccctttcttgctctgtcaacaaatgcatgaaaagcctctttttttcttaatgcctatcagactggaaaaagtgccaaagaagtatgtcgccagtgtcaagaaagacgtccatggagaaagaaagggcaacagttcacctatttttttccctctgaagatcaaaatgtaaacaggcaggcaaaggcaggcaagcagaaaggcctgggtcaaactcaaagttccccaccccacccccagtctctctgctctatgagaccctgtctttttgggctatcgcaagtcctccttggcatgcctccctcaccggtgaacttctcagtgtcagaaatagggaggtgcatccagttggtaaaagcacagaaataaagaggcaatgggaaagcctgaacccacaggttcaactagattcccacacaagcacacattgatcttcaatttgaatcagtggggggaaaggtcacttatctttaaatgtgagagctgtctaaaacgaatgtatctgctgaaacatgggatatagcaatgggctaaataattactgattaattcacttagcagtcacctcattttcttcccattgtcttccctacgttttcttcccctgaggaaataaacaccctgatgaaataaaacaaagtctcacaatgctgattggaaagtcccttctggcaggagcctcagcagtgaccactagagcaaacacagcgcccacgtaatctgcaagaaggttttaccttcctctattcccttgccaggagcaccctgacaaacattacctggcttctttgaagataggttttctgaagaggattccatttccttcaggaactttctaggggaggcagtcagaggactgagtaactgaaatgagtgttactataaggaggacaggatcatcttgcccggtggggaggcaggtccagaaagcttcggggggcagggtactgcttcagggaattttgacagaatctgtcatcttgtcaaaggtgggcattcaaggaagtagaaacagggtgagcaaagatgtgctgggaggactcagggaattgccaataatttg

SEQ ID NO: 48380 - DNA, 784 bp, Homo sapiens
tgacccatgcagaagagaccaagagaaacaaccacatctaggctgtgacagcacagaatgtatgtgtgtgtctgtgtgtgtgtgcacgcgcacatgggaagtataggaaccaaatacctgggtccaaattctaaccctgcttcttcctgggaagatgatcttgtgcaaattaacctcacaatgcctctgctttttgatctggaaaattatcttaagggtataagggtacctacctgataaggtgtctatgaggttacataagctaatgtaggtaatgtccaaatcacagtagctggtatgtacatatacatacacccttgatagataccttattcattcaatccaaattgccactcactccagcacactggtatctctggctgccaagagttatgcaacaacatacttaaacaccaaatcatctaaatcatttgggtggaaccatcgatccttaaccaggcttgtgaaaggttctcttggctctgtttactttggacaggcatcaagcgtctgttttcctcagaatctgaaagtcactgggtcaaggctgtagaggccccttttcacacagaggaaccagtcaaggactgagattgctctgtgtggtggtggtggtcacctggccaattgcatggggagtcacttcgtggctttggcagagtctgccactgtctgctagaataaatgtggagccaaaatatgatttgtctattttgacttgtgtacattttctgagtacaagagactattgataagaagtttaggtaagtggagaaaatgtttg

SEQ ID NO: 48381 - DNA, 914 bp, Homo sapiens
aatgctcgatatttcattagtgtaacccaatgagttcccaaccttggcaacacattagaataaactctgaagggctaagaacacataggctctgactcagaacccgggaaaccttttctcccccagcttcacccaagtgattgtgaatggcaacccatgtgttaaagtactggtgtaaacactgacatacacagtgtgacttataaatcaataaggctgattttccacaagccacagatgagaatcattctcattacaagttatgtcagatatactacactgaaggtgccatgatagttccagggattgacaaaagacgattcctttattctaacatctgaagtgaagtgcatgtataacttaacgttatacgttaatctctttatttttctgtgtgatgtttgcatattttaacagcaaatattttggtgtgggcccctgaaagtgctgaagtggagccaatatataaaagggagtttccaatctgggcagaatattgagacacattagtttaaatcacacatcatcaaccactttgagttgatgccaaactccagatgtctagtgtcagaaagatcttattaaaagatgtacttggcatctctctaaaatctaaactatctctaagttacaggagggctgcaaaacacctgtgtgacacttgctatcagtcctgaagatgagtcatactccacagtctaccagccggtgagattcccaagtaaactgagatgagctcaatgaggacaagagaggcctagaaaaagttaactgcaaactgttgaggccaagctttccataagaagtacttagcttgggtttacaaagaaacttcaaaaaccccatttccttcatgtgatgtttgatacctgaggaagcctgggcataatttctgcttatttatgcctattacc

SEQ ID NO: 48382 - DNA, 2177 bp, Homo sapiens
taaacaggcattcaacacttattaagcagccactgtgtgcagagacagcactatactaagcaaaggagcatagggttctgcctcattttattcctgcataaatacacagcagtcgtgatttattctctcaactttgtagaaacgtgagctgcatccacatggctgaatccatggcattcatttggacttcctgggggcaatttacaggttctctggattagacagccccattgggacatcgctcggacccttcaccttctagcccacgcaggacaactcgctggcgtcggtcacaccttccgcaggtggttggaccgcctaagccagatgcacccggcccacctcccttagcaggggttccgaatagaagtgtgaaaatgtgtgcaatgacttctgcaaatcagaggacttgttgaaaggtccaggggtccaggcgtgaagggaaagcagccaccctgcggggcgccccctccccggcgtctcccgggcccggggcgctgcgcaggccgccgccgatcccagggcgcagccagcgcacctcgggcctagcaccattagaaaggcaaatcgcagagccggggtgcatttaaatgcccggccatgggccctgggggtgtctctccagcgggcgccgccgcaggggcctccagggcgcgtcgaccccggggcgctgggcgcggcccgcgggcgcacccaagacctcagcccgcagcgcccgggcgtccgcgccaggccggggcaggggagggcacccagagcccccgggcccgcgtccccggccccgcccgggcccctcggccgcctcccagggagagggcaagctccccggcccccgcccgcggccgccggccccggccccctcccgacgcaccacacctagcaaccggcgctgacaggacgcagtggcggcggcggcggcgggaggaggaagcggaatggctgccgcggtggagccacccccgcccccccgctccacctccccgcggctgcagccgccgccgagccctgacagctcgagccggggcggaagcgcccggcggcgtgcagcgcccgccccccgctgccctcagcgcctcgggctactccgaccacccgggccaactaactccgcgaccctgcccagcgcccagctcccgccgcccgccgcgccctccgccccgcgccccgcgcgccggcactcggccccgccgccgcaaccccgccgccccgccgcggcgctccccgctcccaccacttcgcagcccgcgtgcacgcccctgagtcccccagccgcccgcccgcccgcccgcggcacctcggggcgcccgccccctcccccacccgagcccgctccccgccccccggcacctcgcgcccccgcatcccgccacccccacctcggggctcgcacgcgccctccccgccctgccgcctccctccccgccggccacccctggccattccggggctccccgcccgggcaggagtttccgcgcgcctggcacccccgcccacccccgggccatttaccgatgtggttgtcctcgatgtgctcgatgaggtcggccagggtggggaagtggagtccgcagcccccgaatcggcaggtattggagaagaaggaggcggcggcgatgcctgtcatggtgctacatcgagagcccccctggtgtcggctctgcgagcgccgggcgggcgagggagggagggaggccgggtggggtgaggagaggaggggctgggggagggggagagaggcggggtgaggggagcggcgaggacgggacggagggagagggggcgagagagatggaaggagagcgaggagccaccgggaggcagaggggaggcggcggctgcggcggcggcgtcgggagcggcggggggagggcgggggcgggggcggggggggaaggccgccgcagctgggaggagggaccagggcgcgcggctacagctgtgcggccccaacctcagcgcgcggacccaggcctcacctgcgagccctgccaccaactttatctcgctaggcctgccctttacggcttgccatccgtgccatctgtttggagcctccttggttatgtatatgacgttcttaatacacccacatcgattaattacacctacctccctgcgaggagaactcagggagttaccctggtccctctcagggacatttttttgtactcagccac

SEQ ID NO: 48383 - DNA, 814 bp, Homo sapiens
gactaaggtccaagagtgtcagtagcttgactcaggccctgcttgtgagaagggtgtgtttagaagtctcatcttccccctttccattgaattttctttgcactgcacaagctgcgcttctcagggagctcaacagaacttgcaaaggccctgagggaatgcagtgtgttcctgactctgcttaatttgttaatttttgtgttctttttcttccaaaacgattttaggcaggttatataaggacatcaaatacagtggaataacaccaaaattaaaacaaaaaaaaaaatcaagtcaaagaggaagtataaacaacaaaataaagttgtccccaaaatgtgtacctagggtcatatggagttggaaaagatgtgacacaattggactctgaacttcctcaaggccagaggaaggcaggacataaaaaacagcacctgatccatagcgtctgcaagacaaaaaccagttacctaagggaagaacagcactctttgtcagtgagtccgtgtctgtccctgaatgccaagatattgctaagttacactttgacctctactgcggagctttcaagcttcgctgttgtgacaagtgctgccactgacatcggctggtttcataacgcctggccccacgagtgcttcatgctagatggctgaattttgatgaccaccatgaggagggtagaaatacagccttgatgagagaatttatgtgtaaatacctgagagtctgaaagtgtatctcagatgaacttgattaaaaacttttcctattgtgattaagaaaaacacataaaattcaattgattttaaat

SEQ ID NO: 48384 - DNA, 2505 bp, Homo sapiens
aaccagctcagaagtatgtgacaatccaggcaatgtattacagtttctagccagtccagtcatgattctctggcaaactgcaccgtcatggttgtgatgcattgggatgagaggtactatataaatgtcagatgttacataaatgtcagaaatgattattgtttattaacgagggctaaactgtttctaagcaaagctccatctcccagccaatgtgttcttagcagaggttccaaccaccaataacccacaagaagggaatgcttacccctggctctatgaaggagcccagttgggatctgggcttgaaaacagggattgagttgggcccagtgccaccccttgctcatcaagtgatctcaggccagcccccaaccttctggtgtctgccttagctcacctgtagaatgggaataattataatacctgtcctacttctggtacccgggttggtgtgagaaacaagggaaatcacgtggtcgcaagcgctttgtaaggtgtgaggggctgcgaggttggcattggtcgtctagaatcgggctggatttagcctatgccttctctttgaatcctactcaaagggagaacttctgaaaggaaattcagcagggggatggtgacagtgatggtgacggccggatactggagacgccaggctcctctcgctgcagaccaggcgcccggatcctgcagtctggccctggctctgccgctccccagcccgtgagcttgggccagttaccgaagaggctctggaagtgacagccaagggccctttcggctctgacgccgtgtctaaatcaggctcatcacttggctctagctgtgattcacctttcgccttaggagcaactctccctacagcttctcagacgcatgaagcaggggtcccgcgaagggtggggctgtgtatttcatgagagtgtgcaccataaggaagttattctcctggaggaggtgagatgagggggcggtgaagaaggggtgacaagtgagtgctctgaaaagccaggatgcagggagcactgaaatgaggtcatgactgtcgcaagcaaaaaggagctggacatcctccggtgggggagggaggagcgtcctgcatttctgtttgcaaagtcttttcccacatccttcagcatccccctccccacctctcccctacccccatccctacacctttcaaaccccatcaggccctccccgcagaagagcccacgcccgcgcctcctccgtggtcttgtctgaaaccataaggattgtttccaagctgactcacaccactaatgtcagggagccgtgtcacacggcgctgggctctgcaagctgttgcttgcgcagtcgcccccgccgctgccgctcccgggcgggtgcaccagggtccgcgcgggcggggcggggtcggggcgggaccggggcggggcctgccccctcgacgcgccggccccgcccctcgctccgtccctccccagcggaccgcaatgatttagaagttcaggaatcccacgtgacgtcaccgggggggtgatgtaatgcactctaaatagaatgtattgtaatctttgctcagtccaacgtggtcccttcacccgggctccgctcttgccttctccacacttgtttggtaagttcctaaaaatacggctcggccacttctggggcttttgcatttagccacttttgttgcacttgccgcaggagccatctcgggagtgtacttgtttgcaggggttggttctcggcagcagccgcgaggttacttggtccagtgggcaggtcacagggcaaggagtagggaagatgcgatgcatttttttctggagggtgatctgtgtttgtaaacattttggcggaccagagggaagtccggccccgagtgctggtagactgtggaattcggctgtgtcctgaggccaccctagagaccccgcgccgcgtgagtgccggagcgctcggtggccgccgcgccgcgcgcctggagggatgctaacgtggagccggcgccgagtccgcccggcgtgcgtgcgtgtgtgggagcgcgcgagtcccctgacgcggggaccagttatgaatcgggggtgtgtgtttgcctccagagacctggcaaggtgcggagccctccagaagtgcggtcaagcggcagcggagacggcgagccaggaacctccccccgcgtccccagcttcccagcgtggcggcggaacccccggagaaagtttgcaaacttccagcgggcgcggcgaggacgccgggtcacctagggggcgggtgggcgcgcgcgcagggggctcgctctccccggtgcggagctgcagctgccacctctcccgccgggctgccggctgcagcgggtgggcgcgcgcccggggaggggaggtcgccctcggagggcgcttggctttcgctccaggcgctccgggctggagagcggcgaggctccgtccgctccagtccactcctccggccgcctcctgcctccgctgctttcttgctggcatcgttacctct

SEQ ID NO: 48385 - DNA, 1167 bp, Homo sapiens
ggaaaccctgtcacctggttctgaaccaaagcccaagctgctaactgaggttagtttttcacactcagaccttccaacctgccatctttcactccctgcttccccatctctacacgtgtcttgatgttatttccctttctccaaacacagggcactcttttttttttttttttttaaccagtattttttttttgtttccagcagaaccagctgacccctgcctgcagaactccgggtccctcttggagctctctgatggcagctgtagggccatccccagcggcactgtttccccctttgtttacccgtttctaagggcaagtgcaccacgaaggctctccgagcctggaactcagcctggggctgttttggttacattgaagtttttgcttcagttctgccagatttaagtggtgacttcactagcactgagctaaaaaggagaagggggaggagggcgagaccaggagaaagagagcaagtgagcgagagcccagccggagggagagccagagctaggcgcaaaagaagggccagcacattacatcatcgcttggcctggaatcaaatgggaaggatatgactcactcaagctagttaagctttggctcaaattctacacacactcattccagagctctcatgttctgcacctcaggagggaattcagcctcagtgatgtccatgaggtttgtttttaattttattttcttttctcctgattttatagattttttttgcccctactgccttctgtttttgagccttcgtcctcctcctcctcctcttcattttctcccccttctccctttctgcccgtctttgtttctcctcttcttccttctcctctttccccagcccctccgctcctcttcttgcccgaagaggcatttcttttcacttcgatcagagtttttgttctagcacagagacctgaatgagttgaacagaggccgggttggaggaaaaaagaaaaaaaaaaaaaagcagagcaaaccaaagcaaccagagcaaaagggccacaaataaagagcgaagcgagaaagagcaaactcgggcgaagtttctttgctgcggtgtcgctcctaatcggaggagacagggagagagttaaaatgcaggaaccaatcgcttgaatggtgatgtaatgcaagaaccgaagggtag

SEQ ID NO: 48386 - DNA, 2428 bp, Homo sapiens
cgcctgccaccacgcccggctattttttttgtatttttagtagagacggggtttcaccgtgttagccaggatggtctcgatctcctgacctcatgatccacccccctcggcctcccaaagtgctggcattacaggcgtgagccaccgcgcccggccagcataagccaattcctagtaagacatctctgaatggatatattggttctgtgtctgaggttgaacactagctggtacaacccacacaatccaaatcagaaaaagtatgaaggaaattcagagtgccagaagatgccacctcatccctcctatctgtcagtcagtattctctgaatgtctagcagtggcaggcacaagacactgtactctggagatacctccaaggacagagcacactgggtttcttcttcgatttgggcttcagtgcctgctgctaagttagatgggtgaataagagaggcagtggctataaaggttagtgaagctctctctctctctctctctccctctgacacacacacacacccctccatgtgacaactttggagtttttaaacctagaccagaaaccagctttaattaatggtttgttgtgggtacttgtggcatgcttggagctacacaaaaatacagtaggaggaggacgcctgtgaggagaagcagacagcagtctttgccttgcgggccctctatctatcaccactaaaggtaaaatgctgtttatccattgccaaacctcctgagtcatccacccccacagtgcattttctttgcacttactgtttctatgcatggcaaaggggtgacacactgataatggatcagagcagtaaaatgttggcaaagactcaacaggctgggaagaggaagcctcctctctagattgatccagggctactggtcctagaccaaattggaatgtccaataaagaccgcattccttctctaacatctaccccttccctgagcatcaaggcctgttccaggatggcagtaaccctgtgtaattcaatccaacaaatgtttaatgaacacctaccatgctacaagtccaccctctacaatctggtgtcctgaaatggcttttgtaattatcattggcctgcaaatggcttgctatattaagtggataactttcatggatattctgttggcttctccatgaatttttacctcttgggctattttctcctggagattcacaccgtcccttgggctcagtcacaactctgtctggattttatctcctgtttgtcttgtttgtttcttttcagccctctttagaaggatttccttctcacccccactcctccagattttaaagtaggtgtgttcaaggctctgtattggccaccttcctgaccctattcctatctattctccctcctcgagagatgaacagacctctgctgacctccaagtccttatctctagcgtggacctctctcctgaatccattattctctctgtgtggacacttgggcataccataagaaccacgaatgtaacactttgttaaggaacctcatcgtcttctttctcttgcctctaacctcttaatcatctggaaaacacgagctgaattaacaatgccagaaactgcattctcccaagagctcatgacagaaatttcagaggcattccagatttcctcttgcttagctctcacatccaactagaacccaagatgtaagggttctctgaagagtacctctagtccctgctcctccctctgatccccacatgggtttaggccttcacaaatcttttcttggggcaaatggtcttctgttgatctctctgcctccatatcgctattctctctcattcatcttcctaaaatgcaaatccccccgtgatatctccctactttaaaagaaatgtcaatgacaaaaattccttaagactgaatagtattccattatatatgtacaccatattttctgtcatttgcaacagcatggatgaacctggaggacattatgctaagtgaaataagccaggtgcaaaaacacaaatactgcaaaatctcacttatacgtacaatctaaaaatgttgaactcacaaaagtagaaagtagaacggtggttgtcagagactgggtgtgggggtggagaaggaaggggaagatgatagtcaaaaggtacaaagtccagttagacaggagaaataagctctggtgatctattgcacagcatggtgactatagctcacaataatgtattgcacatttcaaaattgctaaaaaattgaagtagattttaaatgttcttgccacaaagaaaacataaatatgtggagtgacatcctgatttaatcatttcatgatatatacatgtatcatagcatcacattataccccattgtacgaatatatacaattcgtctttgtcaattaaaactaaagacattttttaaagtgtcagtggt

SEQ ID NO: 48387 - DNA, 1101 bp, Homo sapiens
ctctgccccaacctgcctgtggagctgtgttttgtttaaataagtgatttttatctcctctcagatccactcaccagtactgccttccacttgtattcactcagcagtaggagcaaattacacatatgagaggtagaaaaacaatgggatctgggtggaaggtagcccctgctcttcccagcctcccagggagtgtgagatgctgcgagtccaactgattccagcggatatccagccccacttccttcctaaactacatgtgaactcccagaagctgcaatgtgctcattaaaacattttggagagcttttctcttttggagagtagtatttttatactactgcctaggcccaaatcccagagattccaattccattggtctgtggggaggaggcctcatcagtctttctcaaaagctcccaggtggttctaatgtgcaggcggcgccaagggtctgaaggtggatggagagtttgccctctaaatatctcaggcctctggtctccagcctgtcctcccctatcctccaccctatcctcccttggccttccatgtcccttcctgtgacctggcacaatgaaccggacctctggactcagaaaaatagcctgaccctgagagcccacactacaaagtcaagtcaaacacctcagtgccaaatatctttattatgcaactttgaagcacaggacactgcattcttggaatgcttaaataacaagatctgtgtacacacctccagcctcagctgaccttgctcctgatttactttcctggaggaggtgaatgaggctcaataaccctggaagaagcctgtttttaaagaaaagcccacacatacatctttctactttgatgggccaaccaacctgtgaactaatgtcacccttatctgtaataaaacataaaagtcagatctggaaaataaaagtatatgtgttcaatgccaaaaccccaagagtcagttgtgtcacagcatgcagacttttgtaatataatatggcatcaaatgtcatgatatgcagtataatattaattatgtccacagtaatggcatgaggttattatgtgacaatccttagggtgatatattcagctgtc

SEQ ID NO: 48388 - DNA, 2270 bp, Homo sapiens
ggcacggagaacctctttctctttgacaccagctttgtgtgggcctgatgacacgtttggacggctctatttctttgaaggccaacctcagaggcccacggacgcgtcgggcactgtccgtggctgggttacttaagtgtagctgggttggcttcccgggtgttttaggaaacgcaccttcttgcagggcagggaccgtcagctccagagcaacaaaggacaatttggagaggagtggaaggagcgctccatagtggctctgtcatcccaggttcccttctgcctagcaccgtggccctagtgatcccgccttcgccctctggatcccccacccccactgtctcgctgctcgagagcccggcggggcgcggtgagccccaccaccttcccccacaccctccctccccatccccttcaaatcctaggagcagcgctgcgcgcagcagccgcgctcgccccgcgcccggccccggcctccccagcaccccggggacccggtcccccgtcccgcctccccctgtccagcagtccgcagcctccccctccagccccagtggcgggagctgtcaagcccgcagcagccgaaccaccccccgagcgaccgcgtctcctcttcttcctttgtgtgtgcgcgagcggagttggggcggagggagaagggggaggtcgctctgtctgtccgtctcccgccgcctctgcccggtctactcgaagtgcggcgggagaggcgggagcccaggagagggtgcgggagctggcggggcggctcggagctgccaggacgccctggtcccagccgcgcacaggggagcgtggacggcagaggggctcggcgggagccgagatccgcccgtcccggctgcccctcggcctccctctgctcccacctaccccctgacacccatagaaaagcgtgcaaaggcgcggagcgggacggaaaccacaaataaatagcggcggcggcagcgcgtcatctggtggagcaggaagtgcaggcagagtccggaggctggtgctttctgcgcgtccccaggactttgccatgggctgggggccgcggaggctgcgagcggccgggcgagggcagcggcggcggcgtccgcaccggggctgagcgagcagcgacgcgaggggcgcgcggagatggcagcgtccagcaactccagcctgtccggctcgtcggtgtcctccggtgagtttcagcccgtcgggcgctgctgccgcgccgggtctcgccccactgccctcgccccgcagcctgggatggacagagcctacctgtggccatcccgcccgctctctcggaatgggggcaggcgtccggggtgatacttgtttggttcgccagcacctcggtgcccagagcacctccgcgcctgacatctgacagcgcagaggtgggagagcggtggtgcccttagtgtgcggacgcgggtgttccggggcttggagtgcagcgagcgaaaagcgaaaggagcgggcaggctcgcactttctggcgcagctggagcgggggctggcggggcggagaaggttggggtgaagcagagcgccccgacctgtttgccgtgccgcgcccgctaccctggacacccaaatccggagcagaggggagcaaaccctcgctcctcgcagacttgattttctttgtttgtttcagaaattagctctatggagacactcgcttgggcatgggttttagacagcagcaatgaagggatgtatctttctgatcctgattgaagtgggttaggggaagagaggtcgagcccatcctctgactcttggcacatttacgagagagagagagagagagagagagagagagagagtgtgtgtgtgtgtgtgtgtgagagagagagagagagagactccttagagattttctgataatagtggctgtaatttcactagcaaggcatgcattttttttccttttaagaatggttgagcaaagggaaggcttctttcagcttttctatggttgatcatcgggtctaattgaagagaaaaaaattgctaatgaatctgaaggagtaggaatcaatagaggcagacccactggtttctgagtatgacaggtttctaatcagaatgatgcattaggtagaattcctgtacctctctggtcattgaaaactttaatgacaaacccaaagggatagctgataagacatttagggtagtatacagtatttaagggtcaagaaggtcatgaagtcctaatggaagtgcttcaatatattaatattgtattaagtcccattggg

SEQ ID NO: 48389 - DNA, 1025 bp, Homo sapiens
tatcgtatataagttaatatcaagggaaatgaaaagtcagttctagcattacttttagtaatgaaataattcacttgggattatgctaatgatatgtagatattaatacacataatttggctgcctaatattgatttaagttgctcattcaaattctctttattacaaaaaaataaccattttgttttacagtgcttgtcctcagagacagtgagatccagtaaaccatacttatttggtaaataatactatttttgctgattttcatatacacagagagcactattctctttcagtaggtaccctttgagttgttaatttctggttggggtcctggttagctctagccaaatatcctctctggatctgcctcatgatcaatgcctagggttgaaggtactcccggtgaccagggcacagaagtttttgttctctgtgatgttaatatgccctagggttgaactttggtctcaggagagcccgagtcctatgcttgctttaagcagccaaactaatccacatgccttttttcggaatatgaattcttcagtggaaaaagcaattgacagaagctttgtaaactctcctgaaataattaatatcagattaagattagaaatagaatcacagcaaatcctaggcaattacacatgtaagacatgattttgagttaaacgatgtcatctgggttaagaacatagtaattgccacagtacttatttggttccgcattctaaagtaatagcagtaagggtattttgtaaaaatgcacaacagcctttcagggaggaaatgccctgcagacatcttacttttcataaatagctgagtgtaaatctgtcattcaggagttaatgtaaacatgtctgaatccatctgtagtttcagcttgtgctccttcttacaggaatgagtttcagccattttctacctatagagcgaattggtgtttcttcctattgctttaaatttaactctctgaaacttatttttagcatccatttttgggtttcatgaattaatgt

SEQ ID NO: 48390 - DNA, 1437 bp, Homo sapiens
ctgatcagcagtgtctttattcattagtctcagaagggaaacacaagtgaccttaatgaaatgaagccgtggtcatgctttctccttcctgattccaaagatggtgtttctggatgctgctaaagccccctggtaaataaatactttctcatctccagaaatgagtcaattcgatccgatttccctttttagacttccatttatgctcaaatatggcctctttttctgtggctcttgagtaattatcagtaaacacctagagtaaggccctaggtcttagtcatcacggtaccaccccagtgacttagcatggttactggcacccagcagcatccctcacattttgttaatgttttacctcttttcctatgcaggagctggagtaccctctccctagtcctctggcccgtcattcccttttatccatatgttataacctcattaaagtctgacttttctaggaaacctcgtttctaccaggatggatgcctttgtggatcagtattgacgctttgacaggaggcttcaagttaatctcaactcttacagaattccttctattccatgaatttattatcctcagtcaatactgtaatgctcatcttcttgtggtgtctttcctaatcttcaccaacagtttattggccagaaactaattgataggggctacgttactgaaaacttcgtcatttctgaagatgattaatagtcctaatttcaggcggaggtagggacatatttttacacttgaatatatgttatgtaagaatccaccattgaatgcctcttacttaatcacccaaatattttatctatgaaacttggcagggagatggcaatatcctgaaccttatttttctcattgtttctctttcctctttctcatctctctttcataaaacgtgagtgcagagtggatgccagccaccatgcttggctttgaggacataaatagatacgtagcagtccatttgtaactctttattcggtctgttctcagtggactgtcactccaggaagggaggggcccttgggtcaccagctactagcagagacactgccacaccagaacttcttggaaacttttttttggatgaatgactgagtaaatggagacatgaacttcactgtaaaggagttcacagtccaaagtttgagagtgaatctggactctgtgaaactctgcagaacttgtgaagtcattaacaattaaatattttagttcaaactcttcccttaaattattacccagtctgagatttttgtgccgtttcatagatgccagcagaagttctgcacggggagtcttacagtggcacaggtacagcccttagacagaaaagaagcctgaggccgtcctctgcattcactgtccatttttcccagagtatgtggtcctagctacttgaggcactcccaacttctcattctttcgac

SEQ ID NO: 48391 - DNA, 896 bp, Homo sapiens
attgtgctgtaattgcctacagtattcagtatagtaccatgctgtacaggtttgtagcctaggagcaataggctccagcatacgctgtctaggtttgtgtaagcacacgctatgatgttcgcacaacatgaactcccctcacaatgaatttttcagaacataccctgtgagttaagccacaaatgactgtatacatatacacatatttctatgtgaatgtgtaacatgaatacgcatcataaacatatatgtgtgtgtattacatctttaaaatgactagaccagcaatatgtgattcctttcactcgttagacaaaacaaataaacaaaacacaaaacctcattgggcaatattgggaaataaatacatcaagggcagagaatttgatgtgatcaaagtccaaggtgctttggctgcaggcacagtagtaaggggggctgtttgtctcctttgaccccaaggtttcaagtaggccaatccacccacatgccctggggcagggtgccaaaaaaatgggcctctggcgctgcaccgccctccttcctgagctctgctttcacgcccattcttccttttgctcccgctctgctccagtcgggcctgatttctgagcagagtgacatgctctcctttctggtccatggattcagggatggactcgattgccagctttcaccctgaaagctctctggagtggtttgcccagctgtggccccctcacctggactgaccagctcctccccgctgttgacctccttcttgcaagaagggtgttgtttcaatgtgctttgcaagagtggggtggggtgaggaacaaggatgagataaaagagtgacaaaagagtagcagctagaaaaaggacaaaggtagtgtctacccacacatgtctttacc

SEQ ID NO: 48392 - DNA, 803 bp, Homo sapiens
atgatctgatttttctttttttctccaccaaatatccatccctgtttaacattcccaaatcttgaaattttttttgtgtcttatctacaaaacctttttcatttcctgtagtgacaattctttatttactcaggtctacacattgtactctaatatttacctattataaagtgcatccaggtgtataatcagtttgcatcttaaaataccttatggtgccagcaagcatttgtattaggcccgttttgcagatgtggtacagcaaggtttcttgtctggtctgtgatcacacagccaggaattcataaaccttttttccagcataccagactgcattgtgatgagcctggcgggaggacacgaaacagttccaataagctatatggcatgtgtctgacccagtactgtgcttgctttggggaaaaatattctgtacatcactgtgtatctgctggcttactttcggctcaaagttgcacaaggagccagtgtgaccttggtacttggtccactgtttaaatactgccacggtactctgcagccacagcaaacaggttatgtgttagcagaagaactgggagagtgcggtgaaatgagcaaaaattcatccccggtaggagaaaaggtgtgtgtttcggaggaggaggatgttcaatggcatcatttttgtataaaaggacagtcttatctacgtatctgtctttaccgcattacgcataggcagcccatccccaccttgtgtgctgtgccatttatttcccctcatctgatgctctgagctattaagcaacagcaacaaagag

SEQ ID NO: 48393 - DNA, 1179 bp, Homo sapiens
cagaggaggctgtagggtctgttgagcctgggagtgtcagagtatttcatggaagtgttggcatctttgcctggatttgaaagatggatgggatttcatcaggctgagaaggtgggataggagggcactccaggtagagggaacagcaagtgcagagataagagtagggagagcggtttggcatctgagcttggggactgagatcagaggcatagtaagaatcacaaattttggatttctgtttcaaatattactgatgtttatgtgatcacacagtgacccaaggttgccagaacagacatttcctccctgccacatgtgtcacacaggcctggctgcctcctttcacccctctccggcactcagggaagtggctgcccacaccctccacagaatcaggtgcccatttgccccagggccacatgcttcccccagccttctgcccacagccctccttgacctgcttcctgagctcagcttgccagagactgcctcagtgccccagcattgtttactgtctgtgcagtggctaagaaggggccagaatttatttgttctttccccttgcaaagattgtcagctcctgggtgacagaaaacaaaacaaaatacgcaaaaaagcctcaccgccccgatggtgcctcacgaaccctgccctttcacagccagccttgaccttggtggtatcaccgcctgatccactgggaaaggagctgttctgttatttcctctgccagctttctctttccatggctttgctttccaattaaaaacacaacaaagcaaaacaacaatcatgcaacccccaaatcctctctgctctttatcctcaggtggtcagtgtttatactgtttttgattttagttgagtcatcatttttatagaaacagcatcattgcatgtgaaaccatgtgctttctctgccttgttcaggcagtgatgccagagtaggccagtccaccatgtctgtaagagcagagctcagagaccaaccagctggcagtgggtttgaggagggctggagggcgtctggggcttggaaagtaggccctgtcccttgcagcgaagcacagacattagatgtgatctgactgtgttgcaggtgatgggaacaagtctggccaggcagttgaaagtgtgggccagagcgtctggagagaaagtactagagcaggcagt

SEQ ID NO: 48394 - DNA, 1184 bp, Homo sapiens
ctctcttgtgctctgaatatttcctgtagattcttacttttttcccagtgcttcaaacctgaaccctcagcagcatctactggggaaacgaaacatacgattctcaggctctactttgagagacacacaccagtaagttgggtgctggaacctgaatacttcatgttttaagctctggccatgtgactctggagatgagccgggcttagaatcctgtgtctctgtcatgccattcctgtaccctgtgtgccctctctcatcaccaggcctatctgttcttcttgttccagatcagttgttacttcctcttgaggagttctgtgattccagtagtcaaaaacaagttcttcttttgcccctgttttggtcagggttctctaaagagacagactcaatatgatagctagctagctggatagatatagagacaggagaggtgatttatttgggggattggctcttgtggttatagaggccgagaagccccatgacagcccatctgcaagctggagactctggcatgctggtagcatggctcagtccaagtccaaaggcctcagagccagggatgccgatggcataactctcagtttgaggccaaaggcctgagaaccggcggggctgctggtgtaagttccggagtccaaaagccagggagcctgggcttattgttcaaggacaggagaggaagagtgtgtcccagctccagcagacagatggacacattcaccttttctctgtttttgttctttccagacccccagctggttggatggtgcctgcccacatggagggccgatcatccccacctaacccactcagactcacatgacaacgtcctctagaaacaccttcacagacactcccaaaataatgctttactaggtttcttttctaagtgttctttaaccaggcaagttgacacctaaccgtcacaacccgctaggttgtcctgcggcctttctgctctaagccatttgtctttttcctgctggattacaggttatttgagtgtagagaatgtattcatccacgtgtatcttgcagcttccaggaaagcaacttaagcttaatagccgctccaatgtgaaagatattatggaataaattgtcaaaaaagacagatattacatttacttttgtgatagtttacatctataaggaaaaaataggaaagacttttc

SEQ ID NO: 48395 - DNA, 2840 bp, Homo sapiens
gtacagccactgcttggcaccgtctcctttcaaatgtcatgtaaatgtgtctgctcctcagagcctgggtcacatttagacttgttgtgcaagggagtctgggaaatgtagtttttagctttccagtttctgtagttcaagcaggtttgcttaaaggagattggtcagagtgctcaactagcaacaccctgtctagcacagaagtcattctgagcaacggcatgcagttgtcctaccaagagagcgtgcaggtcatagagtggtgagaccactgggaggaggtactggaagaccaggggaacacaggaaagagttcaggtccatttacaccaggagcctgccagacaggcacccaagaatggacagtgggttactgatggtcatagagaggggcagaagaggagaggggtggaagtaattttccctggacatgcccggtggattgtgtgcagagggagacctgcttctgcatttccctttgcctggtcactgtctcaggcactcagtttcagacaggcatgtggctccagggaaggccatcgagctcacttcagagcccagccagccccatcccggcagagtcaggatgacaaaggcagggctcctgtggcctggcccatgtgacccccagccagtcctaaatcttggggcgtgggaaggaataatcacgaggcaaggaggagacggaacaccctccacactgagaagcctttgttagaaccttccagccatgaggtcagaggaagaagctgagtgatctcttaaaaaaatatgtatatatatattagttgggggttttctttttctcttgtctttcttttcaatctaggtttgtgttttatagactgtgtgatacaggcaatgggacaactgggcagttagttggaactgaccttgcagacagccaagacggcaagctgggtgactcaagttcagaatgggttttttataaaaacaaacaaacagccatgattgatgtctcccttctcatcttttatatatccttttttatgggcagttgtggagaattggactggtttactgacatcatttctctctttgcaggctgatttcatcttagtcctttacacaggtataccttctgtaaggacagaatctatcaatgcaacttgcagtatgcaaaaaccattatctagaaactgattcagtttaatgctattaaatgcaatcagaagttaccaagcctcttactggaatgctcttccaaatgtaacttaatccaatttacctttcctttggtatttaagttcctgacagccagagcagacatttctcagacaagagtgatttgacttgtaacacatgccttttttctttcttttcgttcatttcatgtaaacaattaggtgtgatgttacagtgagctttcacctttaggttgtggtcagctctagacccagtgagaggctgccatgtcataaacttgatttaaatgccatgggtgtgccaggtgtttttgggtgaatgaatgagacatatgccctcaagccccagataacttctcagtctatttcagaatcactgaatcatgtgacagtatgagaacactttatctctaataaagctggagtgtaatgactcattctcacatagttttaatgtttatcgatttcaagtgttctttcttgataagaaaaggtttgtatgtgaacattcgaaagaagagcaacgggcattttttgttctttcaattttaacacaagtacaatattttaacctttaccttgtgatttttgggtgtatgcagtgcagcttgcctataggtgatttagttgttcgtttctgacctcattacaaagaagtggtggaagctgggtggatcttttcattccccagtatattctgccagaagctggtgctcatggatcatttgttcaaggacttaaagttcaatttctagtcaaggtaaattatggctacatcaggctggtctggcacaggtgatctcgatgatcttctgaaagctgtccatgtgggctccagggtagggaacctagaggaacttaggcaggccagggagccaattctatagtatttgaggaggaaccgatcgcccccccaccacgatccaaacctacctacagggccctctgttaaccaaagaccttgtattagcaaggagttctggctgaaaattccttttgtcattgggggaaacaaaccctaagcaatgtatgtgatactttcttggagcccaggccatctgggtagcatgagttttctttaaatacatcccgagtaaggcaatagatttccttcagagcatttggcaattaagactggggctgtcaactaggcttactgttaaaaacctgccctgctttcccaggctgcctggtctgaaattcagatgcctccaccagaaaataggtttactcacccattgtcttggccaccatcttccttgaccacacctgagtaccgtgaatgaccaccaaccctcactgaggccatttgccagatggctctaagtgtggtccatcctagccctggtttccatttggcttggtcacaccactgtgtcctatatgtgtctttcaatcgccacttcagtggcctgcggtcatctcaatacagcacatgtattaaaaaaaccaagcccagggagtatctcacagcagtttggtggtcttcacttcttccatatgccagtgtcagcaactctgctgtccctgttccttgggcacaactgttctgactgctccctctcctccaccatcccttcatcttttctcctttccactcctccacatatcccagcacctaggttacagctctaatctcttgggccctggagaattataactgaaaagatgttt

SEQ ID NO: 48396 - DNA, 793 bp, Homo sapiens
cctgggaaaaccagagacctttgttcacgtttgtctgctgaccttccctccactattgtcctatgaccctgccaagtccccctctccgagagacacccggggtgatcaataaatactaaaaggggaaaaaaaaaaaaagaatttaaaaattaaaaaagtcaattgactgttaaaagcaaaaaaaaaaaaacaagttaatttaggtagagtaaatcattagactttttaaaggagatctgttatttcttagcaaaaatttaatctattgggaaatgatctcagaactaaccatttctctgaaatcatagtgaaatcaggagtgtagaaagtatccattgtggagcctttgggcaactttatgttgagtaaatgggggacgtgcttttagagtctagagactttgaaggaatagggacggcatcatgggctgcccttctgtggtgtctctggctatttcccagcacagtccacaacgctgcccctattccttcaacttctcctgactctagaagcaacttcaagtttccagaaagctccaagttgcctcctgactgtgcagtctccccatttcctcagcacgctcttggtttcctgcctggcttccttactctctgattactcattggatttgctatctgatctgttgccaaagaacagggcacaacttccactcgctctgctagacttagactggccaaacccactctcttgaaacctctggaaacctcgtgctcttttgagtttgacttctgcctccttaaggcccctgaagctgagcaggctgtgaatgaat

SEQ ID NO: 48397 - DNA, 1411 bp, Homo sapiens
aacagagcaagactctgtctcaaaaaataataataaaataaaaaatgatctaaaagtttattgagtcattttttaatgtttgagtatagcagaaggctagaaatcatagaatgcaattgtggttactgattaagaagagagagataaggcactggagagagagaaagagagagcaggggaaggcgggagaaaggaattcatgaccaagagaaaaagatggcttttttttctgataggaatagtgattttgtaatatgtatttgcatttataattctcatattttccatgcagataatccttaaaagcatataattaattaatgggcttttgatgttcctagtgccagagatgtggaactacattatcttgataatctttgtaaaagattagaagaggcttaaagtgagacagttcccaggattcaaaactctgccaaacagaaacgattaaccttgaggtgggggtggaagaagtgagaggaagtggactgaaaggggtggagttgtgtcaccaactccctcttttagtcagcgtcctggtctttaagcatcaagcctgatttaactttggctgtggtaggtccctgcctaactccaacagtccggagacaagttcaaggccctggtcattgtctgcatctagtgaaaaccctctggttgtttgctcctggttgtgttagataaacaggtaatgattaaacgtattttcactggcagcctttttaaaacaaaacttcatgtttctggagtgtcctctaaagatgaagcattttgcaattcaaaaacgttcccagtccctttccgtttctcagacgccctctgggctgggtgtctgtttggctgggtgcctcctaagagcccctctggtgaatccttcctgggaacctgagcccatccaggaaacacaggacaattttcagtttggtaggaaatcaggtgcttgctgttcaggttgaaaattgaggttaagaaataacacttataaggaagaaacagagtgacttcttgtgcagaatcgattctgtttcagacattggttatccagtgttgtgaattatttagggctttcattttactgctttctttggtggccttgccttttctcatcaaacattctcattgcctctgaaaagcaggccaagtaagagacgtgagttaaaactggagtctgatcattttgctgcttttgagcagctcctggagggcagcgggggagcattttttattcacctttgcacttctcctccccaccaacacttcatactgcatgtagctggggctcactggttctttatagatgaaatccacacagtagttctttataggtgaaatcactatttcactgtgattgcaggagagacatggagaaagggctccagctttgtttgcaaggagggcttccaaggtccgt

SEQ ID NO: 48398 - DNA, 1253 bp, Homo sapiens
ctcaaggacttgcagggttccctagaccatgctttgagaactgcttccctaggtgcacactccccaaaacttgcctctctctgtgtttaatatgtggccatcttgtatgatgacatttctgcattagcagaaaatgggcatggtgtcccaagcaaataatccttttcatggcttttggcatttgaatagtgcttacgaacattcgggaaagcatccccgagacaagctagaataagattgatgttgaacgtcctattggacaggctggccaagttcttgctcatggactggcaacaggataatccagagcatgagacaggctcctttccctgcttttcagcatctgaatctcaaattgcatgtgctccacttcgtctgcacaacacatacgtttttcctcttcacaattaccaaaggctttgtaagagaggagcagttgctccaaggtctctctgagcttcctgtttccagtacccaagggcagcttaaatctgcttctttactcaccaataactgtgcagtttatccaactcatctgctatttcctgggtgcaaaatcatctcacttaattgtaacctcctttttcctgcattaatcaagacagtggctgagcggtggcattagcgaaataagcatgaatggaaagcagtgatttacaaggattgtgggctagtttcactcagcgccagtctatgcccgctggagagaatgacagtgggtacagccagtgagttctgcggccaaagtgcagatcaaagagaagctattaaaacaaacaaaacacaacacattttgatgttattctaacacaggaatatcatttttaatgtggctagaaaaatattcagctttgttctttgtcctttaggaaaactacctgcatcagtgctctgatctttccagggctggcggaaggatggtgtctgtagattcatttacaatcatggagtgttacagtgaggagagtcagagatcacccagcgcagaggaaagggtgtgggaggagggtgttgggcagggtggtgactatgccaccatagcaaggccctgggtctggtctctctttgtcccctgctaaacctaactgtagcgtgcaagccacacactagggaattagaaagccagcattctctctctgccccctgtgatcttgatggttacttaacctctctggatctcagtttcctcacctgtaaaatgggtatagcaataatcttagtctcatagggctgttttgagaatgaaaaggtag

SEQ ID NO: 48399 - DNA, 1064 bp, Homo sapiens
tcctttagagagaccataaagcccatatgagtgggcttggtggagatagtctgcgattataaatatatcacaagcctgtcttggtttattttttcatatacctttctcctttattcacattcatttatataaacgtgaaagttgccatgggtcttataggatacctatgctacctgaagaccaagagcttctgtttgatcattgaaaaagaagtgttttagttgtggttaaatttgacagtgcagcattcacctagtattcatttaccatctctaataactatctcccttcccctggggatggggacccttttcttctcctgtatttttagtccatttgtttctggtggagtcccctctatgctctactttatacgggtatgcagcttaggtctggccaatcagaaccttatattctcccttgtttgattcaaggcaccaagagggcagagagacttttgctgagtctcctggcaaaaatacgcttggtcttcttcactgaacttttcaggttttgaggctcaagccatctgagccaccttgcccccaggaagtggggatctgaaagaggatggcactaacacagagaaagtggagatgggagatggaggcaaactgaactctgggggcatgagggggaagtgactacattctagactcagccagatttcttgggtttgaattgttctgccacttacaaatgtggtcactctatccagattggtctctgtgcctcagtttactcatttgtgaagtgggaattgttatgatacctactcatggagtcttagtgagggtcaggtgagtcatgtgaaatgctgagaacagcacccagcatttggtatgtactatacaagtgttagtcatcatttgagccctatgccaagacatgactaaaatgagacccaccccttgatttttttcagctcaaagaacaataaattttcttttgctgatagtccgtttgggttgtgtttgttgtcacttaacccaaagagtcctaactagtagactcagtgaaatcaaattcatattcaggtttaaattttgtcttccttaatgacc

SEQ ID NO: 48400 - DNA, 1320 bp, Homo sapiens
actttcttttttttaaccagtcaactattgttacgtatttaggttgataccagtttttctttctaataaaccatgctgcaatgaacattcttgtggctaaagctttgcacatccttaatgttttttttaagtattaaatcctagaagttgaattgtttgatcaaaaactgccacgattcttacatgaatctatcctgtataccctttaggatggcacagagtatctgtgtagcaaaagttagcaccgaatgttttccacactaaacctgagatagggaaagagcaggaaggacttttgccctttactctcggaagttttgtttgtattactgcctgctataaatacaaagagaaggacttggctcctcctatattttggctgttgcaagccctaaatatttaattcaatatgtttaaagtaggccttatgaactaccggggcggaggattttatgacacttttaccatgatgtgcaaatttgtatatccacactttatctgtaggagtatctacatacatttagttatgggaggcagaggatggagcgagagacgggccagcacccttaattcttctctgtgttgaacagagatgcatgtttttgatatgctgaggagcattactataaaatgcagactaatagtatttcactggagaatagaaaatacttagggaagctggagtgctccgagacaacctttcaatccatttaccaaaagagcttataatggaactcaggtttcaagggaggtcaaacactaataaatattgagaaaaaatagttaaaaggacatcaagttaatattttacaatctattctttgatcttggaaggcttgaaatatttttctacactacttctgtgatttattgattcacccctgccaattggcatattggaacagacacagatgccttgcttttaactacagcttccgcttctataatgctttgcaatgccaacagatttttatgtattcactggcatcacttattgatactgccacagttctggaatatttgctagttaaaaactggatcgttgtcagtaaaagcgactgaaatgttattgatttttgtttcaatgctgtaataacatctcttggttttgttgtattggtttggggggaaaagtaaaacaccctgcatttcattgactcttccacctttatctgtattcaaaatatgttcagaatctgattatttttctacttttgttgtcaccaccctagtcttggggaagaaaatatatctgtcacggattacaataacctcttaactggctgtttccactcttgcctctcttcagtctattctgaa

SEQ ID NO: 48401 - DNA, 1828 bp, Homo sapiens
aaccttccagagaaaatgggtaagacaaaaaaagtttaaaaaatcagcaccttcagagaaaataacctctccaaagcataatgtttgattgtcagacatggattctatagacgttttgaacagaaagctgagatactccataggcacagagatagttagtgtccatgaaaatgcttgttctttgagactccagcctgtgagtctttaaagagagttcatcctgggcagcgtcttcatttctgctcggccttgtaacagtgaccctcctccttggatctggaacccgagaagtctgaatcgtattttctacatggtcattctttatttaacttaggcaaacacttccttttttagacaagactgcttgtccaatgtacacactcattttagattagatttgcaagagtacaggctagttcattttactctagttcaaagtctttttttctttccccttagtctcaagccgatgaatggccaaaaaagactgagatgaagatataacaagagcatttcttttgagagtttaacttgggctgaatttatatagagaatgcacatgtggatagataatcagagaaacgtgtataaaagaggcttttataccaacagtatggtgtgaagaaaaaatttttaaatgctaaataaccatagtttttattttgtatattataactttaatactcaagcataattactaggcaggaaaaaaaccttcactcttttattaccatttcctgacattttaaattacacactattgctgaattaaaaaaaaaaaaaagaaacagcagaaaaaggctaatccagaccctgaatcaacatactaatttataaatcgagtctcaggtaaacacggttgtttctccttgtgccttatgctggaggtcaaatgcttacaatagcctaaaatgacaagtcgagacatgttttcgtaattggaagttaaaaaaagaaattccaccatctgttgatgaaaagaaaagttttgcaataactgctgtcatttctgaagaaacatctctaaattcttcagaaaacagtcatggtgcttatgacagctaaaaatcatttggggcaccattaactgattatgaactacctgaagaatcatgctcatacttaaaagggccacatggaatccttttagcagtttcacaactgtctggggttattcattgcagactgaaaaatgttgctttttcaattccaagtaagtcaaaatgaatgggacagcagatagactggaagggaaaaggaggaggaaaaagagactccctcctctgcactttgaagatcattagcccaacccaagaatggcttctgtttctactgagcttgatcacgatttgctatgcactacagtgaaatgaaatagtagtatggctggcaaattatgagtgttgacagcaaacagacaggaagagtttaactcctccttaccttccacactagctttaaaccttcagataaggcaaaaaaaaaaaaaaaaaaaaaaaaaagtcagcaattgggacagtgtgcccttcataatagaacatgggccaaccagagatttttctcattttttgatcacctatcttctctgggcctgtcttttcttatcagatgtaaattatttgtttgcagcatttctgaaattgctgtaagaagatcaatagaaaagtggtgaggaaagaatataatttcaccgccctcactctctgaaagccagctattctcgagtcgtgtgtacttcctgccagttcagtaataattaatgtatagtgtgtctgtaaactgcagaaacagattaagaaataagtgcatttttatcattgtttggatg

SEQ ID NO: 48402 - DNA, 811 bp, Homo sapiens
cttgaaggtaagaatcatcttctatatttccctatttctcaaagtacctacgtcaacagctggtcaggttgttgtaataggattttatgtatttaatcacatttactgatgtaacccatttcttattgaaataatgtgttccacctcagtgtatgttcatatcctaaagtcatcttgaaatgtattatgtttcccagtctcttttgtaaaataacagtggcctcattcaacatagtggttcgtagtaaagtgctttcctactgggctctgggtgtataagatgattacgatattgcaccgttgaccttcatcccagtgcacagggtcagattgggtcatttctgtgtgagtacagttgggaattgttaccactctgagaaccttacacagttggacaacgtaagaaaaagagagtcccccgcttagatggtttttatttatttattgcaattaatgaagaattcatgaaggtggccttgctgaaacttgtcttttgaaagtaaatttggcctctgattgaccttccagagacaaattcatgttcttggatgttgtgtataagtgtgtgttttagaaaaacaaagtaataatttagcatcaagaacatatcattgaaattcttagaaatcccataattgcagctgtgtgcaggcgtattatatgaagaaaaggaaaacaaccccttaactttgaagccttgcttgtgctcagaatacatcacagaaaaggaaaggggagagcgttggtggtgttattgcttttatttttagaaaaagtagaggctcagacgaaagtcccgttgcatacagtg

SEQ ID NO: 48403 - DNA, 1776 bp, Homo sapiens
gtagagacagggtttcaccatgttggctggactgatcttgaactcctgacctcaagtgatccacccgcctcggcctcccaaagtgctgggattacgggcgtgagccaccgcacctggctgatttttatttcttaacatctcacttgaaaaggtatattcccttaattagtagagttggaatactatgtggtattgttcattgttttagaaaaaaagaactgatagcatcgtgtgttacaacatgtgttctgccatcctcctctagcctatgacagctggaacccaagatcccattactcattgatctcaggtggtggtggtagtgagagtgtggatccaaactgagacacaattgttatgcggaggtactggcttttgtaacaccaaccttactcatccaaacacagagcaaatgtcacacctccataggagttgctacctacagcagccccatattaagtctgctctgtgactcagaggtcaggccccacaagttttggggtgtaaccagggttatccaggaaaaggagcaggtgcataatgctggagctatagtgaggatttaaagacatgcttcacattttgctcacctggttaaactgtaactgagaaataatgctgataaaggcaggttatactttgctccagataagccatgtctcctactggcgtgtggcctgtccaaccaagcactgagaggcttggacgtagatttctgaccttgattctgctttccattggaaaaaatgtggatgatgcaatctcagacagcctcaattttaatatgactatgctgaatgatattacctaattatttacttgttgtcagtcttttaatagaaatgacagctatcacatatggagtacttcctgtgccctgagcaccggcttcagagttttatggatgctacgcccaccacaatcccatggggcttgttatccctctcactttacacaggaggaaatgagacaggaagcacaagaggggcaaaggccagattccaacccagatagttcatatcaatggctgggcttctaatccagtgagtcacggagtgtgatcccagcatcagctgggaacaggtgagaaatgcaggttctgtggcccatcccacacctgaattacaaaccctggagatggggcccagcaatctgtgttttagcgagctcttcaggggattctgatgccgccttgggtgtgagaactactgttctaaggactgttcttgcttctctctgctttctatttcatccttcctccctaatcccttaggatagaagactcaagatgcttttgcctcctggtaatgcttgctatttgctcagcacttgtgctagactattcacggatttcagtgtaggcacccatagccttccttatttttcccagatgtacttcctcccagatgttattttccaccctttaaaaatattttgtctttcttctttgctatttctaactttcctgtactcttttatgttgcagagaccaaatgtgaatcctgcttgtaagggtggggtcagtacttgattaagcctgatctcctccctctaccctccattttctggtattatacttctaatgttatgtttgtgttactaattaacaaagctatttcaaattcaggtttttttgtttgcttgtttgttttattttgtttgtttatttgagacagagtctcactctgttgcccaggctggagtgtagtagcatgatctcggctcactgcaacttccgcctcccagtttcaagccccctgcctcagcctccctagt

SEQ ID NO: 48404 - DNA, 869 bp, Homo sapiens
tttgcagcattggatgtggccacgagagccctctgttggaaggggtatctctcagatcattggtacaacagatgagcagttgggaacctgtagactctgaagaaggaaaggtcaaagttccatttgtagtctttcagaattaaaggcttggcctataagaatttgtaggggtgggtgggtggggtcctggatcaactgtgggaagaagaaggattttgttccctgaataattcccattgccgttaatggaaatgaaactgtcagggctacattggtttgttttcatggcctctggaccaggttgcagaactggcattactcattttgcaataaaaaaatgtctggccgggtcttatgatgatagtttataaatgcccctgttggttttctctctccttatacacaatcactttgaagttcccgcaaagttaatatttcactttgttcctaagtccccatttatgaacttaatgaagtccaagtatcagaagagaaagttaaagtttacacatgcaactttgattgttctcaagtgactcattggtttaaaaaattatttaaaaagtcaaagcactgtcatttgcaagagacactttaatacccaagttgaggattagaagtaagacacagaactgtgggctatgcgtgtcccaacacacctttaacagagtaaaagcagttatattttaccacagtacatataaattccatgaaaataattcatgatataagggacttttattatgttaatctcaaatgattttaggaaagttacaattactccccctagaaagaacattacatgtattaagcatatcattgtttttaatctatcataaactacattatttcattctgcttcatgacaa

SEQ ID NO: 48405 - DNA, 2349 bp, Homo sapiens
ctagtcgggaggctgaggcaggaggattgcttgaacccaggagacggaggttgcaatgagccaagatcatgccactgcactccagcctgggtgacagagaaagactccatctaaacaaaaaaaaaaaggaaggaagggagagggggaggaagggaggaagggaggaagggatgaagggaagaaaggaaggagggagggagagaggcaggaaggaaggaaggaatctatcttacagttctctgttaaccacaactgaaagagataaaccggtagtgtgtcctggatgtgcaccaacctctgaggatcttccctcttggccatcttttcttcctctcctaatttgtactcttttccttggtaaaatgaaaagtgcactaagatagattaggtggtgggggttttgaacctcaccaggaaagcctatgcagtttcactttcttttgtaagtatctgcattctttgccccgcatcaccacactagtcaactagatgctgctaatgtggttctgattataactcgtctgcatcccagagagctaggagtgtctgtaacccaccatgttctctgccatgagaaatgtaaaggccccttgtcagtttcatcaggctgctatagcagataccatgaactgcatgccttagaacaacagaccttttttttttttcttctcaattctggaggtggtaagtcagaagtcaaggtattttctgggccatgctctctctgaaggctctaggggaggatcttctctggcctcttcctagtttccggtggttgccagcagtccttgactacctcattccaatctctgcctccattgtcacatggcattttctgtgtgggtctctgtgtacaaattcctctttccttataaggaatcctgtcattggattagggcctatcttaatccaatatgacctcatcttaactttattacatctgccaagatcctatttccaaataaggccatagtcgcaggtactggggttgaatatatcttttggagaaggtcaccacaggtctaaagacatagttctttccttcagaaacttgtcatgtacagtatttggaaaagatattaacaggccagcacagtgtctcatgcctgtaatcctagcaatttggaaggccagggcaggcagatagcttgaggacaggagtttgagaccagcctgggcaacatggcaaaaccccatctctacaagaaatacaaaaaattagccagacatggtggcatgcacctgtagttccagctactcaggagctgagttaggaggatagcttaagcccggaaagtcaaggcttcagtgagccaagattgcaccactgcactccagcctgggcaacagagcgagaccctgtctcaaaaaagaaacaaaaacaagcaaacaaacaaaaaaaccaaccagatcataatgagagaatgaaaaatagaagccagtaaacatatccatctgttcatcaattattttttaagagccaaatgagagaaaccaaaagtgaatggtttaggagaggagagtgatttccaaagcttgggctctggaccagagaccaacagcttctgcatcacctgggggaactgttagaaatgcaaatacttgggtcccagctcagactttctgagtcagatactgtgggggtcacatgtcacttaatgacagggattcattctgagaagtgtgtcattaggtgattttgtcatcatgcaaacaccatagagtgtacttacacaaagtaagtggtagagcccactacataccttggctgtatggtgtggcctattgctcctaggctacaaacctgtgcagcatggtactgtactgaattctgggggcaactataacacaatggtgagtattgtgtatctaaatatatctagacacagacaaggtacagttaaaattataatattataatcttatggaccaccatggtatatgtggtctgtcattgaccagtcattatgcggtacatgactaaattttaataagccctccaggtaactctgatacaggctgtaggttaagaaccaccagtctaggaattcagaaaaagcacttttcttcaagctggagtggataaaactgccagcagcagccaaataaatcattaagctgagaaaaaaaattatgcacacttctctaaatcctatcagaagcgcctcctttttttttttttttcttttttcatgttttggatcatgagaaggggtgaaagttggattctaggagataatcggcccagaattttaactaaggtgtggaatgaagcagtcttctctcactagattttgcttgccctaaagatgcaacatctgccctgtaaacacaaatgcagcatgcatg

SEQ ID NO: 48406 - DNA, 985 bp, Homo sapiens
catgatatgtgatatgagtgacaagtgaaaacatttcaagttgtgcacttaaaatatgtgctgtttattgtatgtcagtcataaccccaataaaactgatctattaacaaacagtaacaaccctgggtgcatattagaatcactgggagaactttgcaaaaaaatagaaatttccgtcttcaaaggttctggtttagatagtctgggatgaggcccaagcatccgtatttttaagagcttggcaattctatttggcaagtttgtttgaaaatcactggaaaaaggaaactgcagaaaccttccccatttacatgagctggtggttaatgacctttattctgactaagcagttttatatttcagggatatggccctttgaggtacagtgttaatttccaagttctgagttttctgtatctagtctttccacttataggtacgcaataccttattttattaaagaatgggattttgatacctctttccttatttttgaaactttctgggttttttttttcttttagaacattaatagcttcttgatattcccagaacttcacaacatcatgctcaaagtgggtccattgatttcttagtcgttggaaatgatcttgacctagtcatctgaagacttctaaactccacttgaagaaacacacagcagctttctcctaattctttctttagtttttacttttagtttatacatcccagcatgtcacttccctgcttaaagtcattcttcaccagctaccccaccccaagcttttagatgtgacccagtctcctaatacatcctgtaagatcccgcctcatagatcactacccacttcccttactttcttctttctagccataatgaattttcatttctgtaatagatcaccctgtaactcacctccaagtctttgcaaattctattccctttgcctgaaatattctcctgggctttttctcactgtttggctatctccttctcatcctt

SEQ ID NO: 48407 - DNA, 1316 bp, Homo sapiens
aatcaatagaaatcattcagattcttatggtgggagactaataagtcagaatccgtcctgcaggcccagaacagaggtaaataggcatcattttgtaaataaagtattattggaatacagccacatccattcattgaaatataaaatatgggaaagttcgtactacaatgacagagttgagtggtccagacaggacagagactatatgggctacaaatcgtaaagtatttactgttggtactttacagttgctgatccttgagctaggaaatgaataagattatttgcattcattcagaatcatttatggagttctgtagtatgttgagcacagtgcctggcttatagttaactcaaataaatgtgggctgtgattgacattatagtggttgggcattgatgaacagacactgggctcaggtaaaggccctgctacagaaggcaggggtacagatgttcaaggcatgtgaagtaatttaggccaaggccaagcccaaagagcaaagacaaactgagctgggtggtaacttggtgtttactctgttctaaagcaaaccactcttggagaatgtttttatcactttcttttctctatttccagagaaaacgatcacaggccaagcttaatttgtggttagtcagtatttcactctgagttccgtgaagtggcttccaggatcttccctaggggatgtggtacaggtttaagaaattcagggtgtgtatttcacatcaattgaagaatctcttgaaggcaaacagaaaggttagtttcttctgtttgcagtgcacacttttgtttgcatgtgagcatgaatcatcagtctcctcactaagcataatccaagcagacgaagctcaaattaacactaaaggaaggtagcaagaatgagtttgtttttaaggattttgtggtaggcagaataatggcctccaaagatatcagatcctaatccctagagccaataactgtgaccttaccttggcaaaaaggtttatgcagatgtgattacattaagaatcttgagatgaagaagaatcttggataatctttgtggaccctaaataccagcacccgtctctttttaagggagaggcagaaggagatttcacagacagtcacagaggagaagtccgggggaagtggagcagagaaggatttgaagatcctggggtggtgcagccacaaggccaggcatgcaggaagcccacagaagctggaggaggcctggaacagattctctcctagctccagagggagcacagccctcgattgcagccccaaaaattcttttcacacctctggcctccagaac

SEQ ID NO: 48408 - DNA, 894 bp, Homo sapiens
cagagcccatgtaaggaaaccagggcaaagcagttgaccacagagtaaccacctgcaaccacacaagtatgcccaaagcagtgatagccaccatgcttccacccaccccacagacactctttctccttagggtctcggcttttgtgcttttaccagagcgcaacagttttctggaagtgctcagggctatgggtaaaagggcagtttcctgtggactcagattgtttaagatgtcatttgggggtaaaggactgtttaaagagatggtttcttatccatcagatggctttagaaaataaggtgggtggatattaacactttgggtgagggcctggaaatcttgggactttagactctctggcaccagggagttaaacaggtcacaatgtggaatgctgggattcagatgacaccctgggctctgactagcaagacatcatagcagctctgaggggcccacaagaactagagatgtgtccaagctctgctggtgtatagatgtggaactgagtgcccagcagtggtgcctcctgccctgcctgcctgcctggcaccgacatggctgaattgtaccttatgccatcgggtgtggccagtaatcctgtgcttactttgactggcattgccccctccactggccctgaatgactcacctcatagaagaaaaaggatacataacaaccttttccactccccacagtgtcacccaggacttgttgacaggaccaacaccagtcttcttatgtgtgcattgttcagggtacagcaggatggctagctaagcttatttaaagcatagttacgattaatcataatcatagctgacctttattgagcccttattttgttttgggcactagaaactatgtgtattgcctgtttcaatcaacacaa

SEQ ID NO: 48409 - DNA, 1781 bp, Homo sapiens
gaagaaagtcatctagggcaagaaggaagatagtagctgggaacttcgtaatagctgcttctcccttaggttttacactatttacttggatcttagttttacaaaagttttaaggagtttgatttaacaaatgttccattctctcaagaataaccctaccatactttctaaagtttagcatttgagaaattggactaagacttttaaagttcgtatttaaggaaatggattactctgatggtaaaacatgttgttgttaatattgactctctcaaaaactgcatacaaaacaaaacaaaaaagcaaataataacaatgacgtgttgaaatgcgcgagatccttaatgcaacacaaagtcttcctctatgaggtggagtatcttttatttctatatctaaaaagtctgtgagaaacatcagaaattagccacaatttttgacatcagtctcagcagaacagctggtggtatcatgtgggaaggacagcaactgtagcattgcacgatcagccaacccaggaagcatcaggttatttatttgctgctaaacaaggtactttggtccatttcagcgcacatacaggcctttcaggttgggtgaacggtgactgttttgaatgaggcaaaattgtattctaggaggggcagtaagactgttccttcggcacttctgtgtgtctctcacatcgagagtcgccatctgtccctggagaataatcggcgtggcagctgggcatggtgtgtcatcagagacaaggaaccttgtctcagatcagaaggcagcaggtttggaggtcagcagcagttttaggactgagccaggttaatcgttgacacctgatgcttaaatggcctcaaataaaaccaggactatacagcttgaactagcccaattgcaggaaagacggcaggtcccaccctgatctttctcatttctttggcgccatggcaatgtgtttgcgtttagttatatgtctttgttgtcttcctcctctttcaggactgaaaaccataaacaaagaatataacaaacagggcaattcttaggaaaggcaaggatgattcatttggcagtatgcaagagggttcaaagtacataggatcaagcaggctgggttgataaaagataaccacccctttgattatcattcggcaattggagcttatttcacttagcatttctagttttttctcttcccaaaaggaatagagaaccagctccacaatgccatagcaaaaaaccagagtggacatcaccgcacctccttatccaccagtcccctcaaaatccccatagaagcttttcaaaacaaaatacacacacacacacacacacacacacgcacacacacacattagacacagaaataggtagtaggcatacccttagtataccaccaaccaacattaaaagtattttagtgtgacccacagagcgtgaaaacaaaggaaagtgtagatttcccacaccatccagggctgtacgaatggctgcagcattttgctgcgtgttcctggatctgggcaggatttaacattttgtggctttggggaaataacgggacacccagggtcatcacccaacaccagtaccccagacatatgttcagggaatgagccaatgggccaagggaaaaaaaaagagcatgctaactcttcataaaagtcgaaatcatttctgatggaaggaaaggaagacagagagctgctgaaaaatgggcatgttttttttttcctgcaacagaactgtcctgaatgtcaagccaatgttggcatcatggt

SEQ ID NO: 48410 - DNA, 854 bp, Homo sapiens
cacttttttctagaggcctcctacctgacattcaaatttgccagtagagtttctcttcttaccccataacaagattgtttgccccagtcagaactattaccccaggtaaaaagccctttcctttgctctgcccaggaactttgtcaagaggaatgaatagaaacccccaacattccctaagttgggaccttgcgctctattctctcagaaagctcacagtcactgcctttgcttctcaaacaaagcttgtctaagcaaagtaaaattcggctctgagaacaaaagctttgggaaccaaaggacagttggcacctcatcgcatgcaataattgtatacttttcaacactgtgtgctgatgcaatctttgcttatttaaagcctggatttcctagggttacttgtacctactaggcactgagacgtatttgttggaggaatggtgaaattaacagactcctctctaaaatgaaaactgtttgtcaagagaaaaaccactcggttatttagctcattttataactgcatctctgtttatctagttgatttaaggaggcactctgctgtaactggaacagctctcttttgaatggtccaccctaataataccttatggctgagctctgaaaatcttcaggccagccaaccccagaggcccggcagtcggcttgctcggcttcctgcccacacttagcacagtgctgaggtagctttagcccgcatagtactcctggccacaccatgttcttccaaagagctcagctctctctgcctcagttccctcatctataaaatgggagtgttgggaggtttaaagaatacatgcgagtcacttatcgtggtctctggcacccag

SEQ ID NO: 48411 - DNA, 1829 bp, Homo sapiens
tggcaatggggagccactcgaggtttttgagcagggaagtgtcaaaaggatgtgggtgtcgatgtgctcataaacctgatcaaagttaagtagcatgaggacatcttactttatgcagtggggagactcccagaaagctttgagacaatcaatattttagaaatgcaatcctatcttaaactagggcagctgctaatgagaagtccagggatctgtggtgcccggtttgagaaactcagctctcctgccccatctccttggccagcctttcagagggaactcagagtgtctgtcatagattgattcacctctgctgtgttttcgtacatctgaaaagggtcacttcaaggttaggacttcatctggtcttgcaaaaggggagagttcaaagtttaacctaatttttcatatgagatgaatgtcacatggttgtgggaaatacagtaaattataggaaaagtccttggcagagatctggaagccttgactgtgctgctgacctgggtgacgcaggataggctgcctgccctccagcctctcagttaaccctgggcaaacactagactagacctccagaacccagccacatgtagctggaagggactttagctctctcttctgtgaacataaagtagctaaacaaacaaacaaacaaacaaactgcctctgacccgaagattccttttcaaagcaaaagaataaaattctgatttttaatatgaataataaaatgacaaattgaggcaataaggtttccatctataccactgcttctcaataaaggaaacttcacccccccacctccccctgacccctgggggacatttgtcaatgcctacagatatttgtgatttgtcccagctgggagtgctactggcatttagtgggtggaggccagcgatgctgccaaacatcccacaatgtacgaggcagacccccacaacaaagaattttccagcccaaaatgttaatcagtagtgccgaggctaagaaatcatgatgtatactggtaagaaaaagcaaaaattctcaactgcagcatgtcataaacggtacttttccttcttacagtttcgatcccaggctgagctgatattaatacatctgggtggtgtctacattgacccatcaaaacatatctggtataaaaccaccagagaatactgccttccagattcagcagctatgagacaaataacatcctgttcatttagaaagagctgtgttgagagatacttgctaaatgcctgagatctttctggatgactcttcttgctcttgtttttgcaaagtagccattcctgggccatttgtcaaacataccttatctcgtgtaatatcatcttttttgtttggtgtggtttttgaattccaggcagaccgtgcctagtgtaatagtcttggacagacattcttcctgtctggagtattttcttcctgtctagaatattttagttactgccctcaagttttcaaactgttctttctctaaaaagatattcttgcaaatcagtgaacttcagaaaatggaaaaagccgaccagtgaattttaagatacggtatatttcaatgaaagagtagacataataagtagaagccaaataaaatgggctcagagcatgccctcagcatttacacgtagccttctgtctagagattgtccttgtggatccaaaagaaaattgaacaatatatcggtcgtgaaaataaacaatggcccatcaccaaaaaggaaagtaggcaatgggcctaaaataatgtttcactttacatccttgctctattctcattttgttttattttttggggactgtgtggggacactggg

SEQ ID NO: 48412 - DNA, 526 bp, Homo sapiens
tttatacttttttttttctggagttgcattttacatattattttattatatttaattgatcttcacagcagattaacaattgactttgctgccataattaagagcatttctagtaaaatattaagaaatgtatgattgctgaatttagaaaatgtccaactttagataggatactttactgaggaactcttttagtactgcattcaatcttggtaggcctctaagtgaattatgacatttggccctgtaagtccttctgggatgaattctctgcattcctgttaaaaaatgctttgtcatttcttagggtcattccctagaaaaatgttgagaaatttttggcatcattttcaaagcaggaactatataataggcagtttgcatatgataaactgaaataccagaaagactactataacttcgctttattacagagttataagttgctcttttttatttattaactagcttatcatctttctctgcttttactcattggtttccttagaagagatccagatccatt

SEQ ID NO: 48413 - DNA, 953 bp, Homo sapiens
cctgtctgtgcttaatggggaaactatttcaagtgtttgcaggaatgaaaaagaatatatcatgtttatgcaagaaaagaaaaaaaaaaacaaaaagtacatttccttaaacacctacctgcctcttacaataggcagtagtccgtaaaagaaaaaaaaaatcaattccaatggaactgcatagctagaaaagccatactttgtcctaccccatcttgctacaaaaggtaagacataaaaatagtaatagtgctggtgaatatttaccacataccaggcaccagttaatctctatttatcatgtcattagcctcaccaacagaccttgggggagatgcaattatcctccattaaaaaaaaaaaaagacacagaggcttgttatttgcccttggctacgcagtaaggaatagaatattgattcaatgggagccagattccagagttcatgctcagtatctcattgtcatcagattagcagtgaaaccatgcaccttgatttgatatcacatattttcaaagtagtttgaaagcctgggtgattttccatctggaattggaggtatacacctattgctaacagcatacatcttattaaggtacatctaacacaatgataaatgatacaaattaatgtgtaactgggtttcctaattcatgttgccatggtttttctggcaaacacttgtggctgggagcaagaccagcctcctctgatattgatcaggtttctaccaacaccctgactgacttcttccttgctaggatatgatttttaaaaatctcaggagcatttagaatacaataaggtaatgacactaattaaggtgatctttcccattttggctcacagcatcccgtaaaccctaagtcctcctctctgcctggaagaggcttctagcttccattgtgtaaatacaccaatcaccggtgttgatacctggatggttcaagt

SEQ ID NO: 48414 - DNA, 2092 bp, Homo sapiens
agtttttctcgtcgacgtcagctcctcaagaagccctccctgacctactccccaccccaagtttagatcaggtgctccctctgggagccggctcaggaggcctctgcctcctcttggttgtgctgtaatcgcccattggtcgctttccttttctagactgtgaactccacgagggcaagaggtaatcttgttctctcgtccccatcgcttatgacaccgcctggagcttagtaagggctcaacattttggaataaattcaaggagtggcgtgtccccagagtagctgtgctgggccgtgtgccgcccgcgcaacagctcctatttggggaattccagccttaggcctcagtctctccgcagctgagacttgggactctgtacccgggaggcgcgcccgccgacttgggacccgcctccagggtcccagagcgaccccgcccgccggggccgtgtccctgccgcggggcggcggcggctcccaggcaggagcctgcgagcaggtgggggcggcggccccgcctccgcgtcccggcagcaccagagccggtggccggggagcgagccgggcgcaccgagcgcagctcggcggtagcggcgccgcttggagcacgggcgctgcgggacggagcccggagccggaggcggcggcggcggagacgtcggccggagctcgagtccagtccagcccccggctccgccacctgcaggtagcggcttcccgcgcgggtgcgggtcggtgcccgagggtggaaggaacgggcggtgtggcggccgccgccctggtcggtcccggagcagagtggcccggcccgggacagagatcctgagggcgtgggagggccggggaacccccgccgggctgcagccccgggcccaggaggttgtcgacgtgccgcgcggcgctcacgccccccacccgcaccctgccacgccgccccggccgggccgggccgggccgggcggaaacaaaccgcggggtggggagcgaggtcaccacggggttgcttggtgacttctccggactggactccccggtgagcagcccctggcaccgaggccgcctcggcctggtccttcgcgacgctctctcttctccgcttcgcccccggaacaaaaggctggggtctcgctggggagggggctgtcgcgggaagggctggggcggagtaaaagagagctaggaaattgcagagccggaggtggcttggggaatacagaaggagccccctagtgaggaagccaactccagagatgtgaagtgacttgtccaaggtcacacagctcatggggacagagcgcaggtctctggacacccctcccgtgctcatctccaagcccctggggtcagtagtcagactgtgctccagcaatgtacatttggccacaaatgggtttagggtcctttggaggattaggtggtgggtaggtaggtggcagagcagatttcccccagcccctgacacgcactctctgaaggtggcggggagggcgggcacccggccgccctggacctggaggagcgccgcccgggccccgtgggcaggcaggcaccggctctcaggaacagcgcctttggagggtggcgtgccagccgcgtgggtgtgcccgtggcgggcgccggggcggcgtggggaccgtgtgtgcgcctccctctggaaagaagtttctgcagggaaaggccaggagagcggttccatgcgccctgggacagtgtggccaatccctgacactcagggcgctttgtaactggctgtattggggaggaaagttactctgtagcaggaagttaggctgtctcttcgcctctgtgcctggggtccttggctgtaaatgagggccttgtttggcatgaccagtgtgatttagaaggtttgtgcccctccgcctcctcctttccagaatcttttctcacttcacagggaggactgggagtgcacttcttgtgcccagcattaatagttatcactgggactcctgcctcccttcaattttttttaactttatcattacgaaagaggtcagaggagaggttgtttttgggccttgcaaggagataaactccaggtcaatacctggacaggacatgaggga

SEQ ID NO: 48415 - DNA, 970 bp, Homo sapiens
agttttgccaccaataaatggtggacccagaatcccaaccgaggtgatgggactctggagccctcatttttaactgcaaagaggggctgtcttgggtgtctttaggggtgacttactccaccaagcacacttggccactggcagactggacccagatgctttctgaaatgcagacagccagaacagaatagtaaattgaagaactgacccctgaactcagctctttccactataccacactgccttcttaataacgagtgggtaaatacgcttttggcagcccaactagcaggaagaagtggctcagagaagagccaagaatgttgaaaacatgaaccacagagacactaggggtatggaggatcactgcaaaccaaagaaggacttgttgggtgcagacagggaaggaaaggcctctactcttcattgacagggcctagaactggagtgaggccgagggatgacacagttatagaacacatatgctcagcagcctggtctggtgacctaggggcccaatccagagagatttggaagaaggttctggaatggaagagaattccattagatccagcaatgcaaccatttcaggactgtccttgggctagctgtgagtcattgtttctctaggattcaatccaagtctggacccagaggcgtctgttggacttttcatgcaaaggtcctagaaactgactgtaagacaaggaagtctaggctgggcatggtggctcacgtctgtaatcctagcactttgggaggccgaggcaggtggatcatctgaggtcaggagttcaagaccagcctggccaacatggtgaaaccctgtctctactaaaaatacaaaaattagccgggcgtgatggcacatgcctgtaatcccagctacttgggaggctgaggcaggagaatcgcttgaacctgcgaggtggaggttgcggtaaaccaaagtcgcgccactgcactccag

SEQ ID NO: 48416 - DNA, 638 bp, Homo sapiens
ttgctgttctcccccaggctctaaaaggtagcatgtggaacccgggggagttatgagacctggatttgggttctcactgccagttgacagccagatatatgatcttggcgtccattcgccccgctggcctcagccttcctgctgtaaaaagggggttgacagcaggctccttaagactgcctccacctctgccccccgaccttagctcatcctcctctattccattatccctgaagcatttgcctcctcatgtatctccttcccaaaagacaagatggctggcagcacggaagtgaaaagggaaagaaaggctgtttaaaaaaaaaaaattctaaaatgagtcacctttcaagaatttcccatttcctcatgcctgggtgcttcctcgtgtcgctaaatcagttcttccaatgaaacttgatctaagaacctggtatttgttatgtgcactgctcttggatgatgtttacaatgtgcacacatctcttttaagagcttgtaggtatcaaacgacctccaggttgtgcatcaaaaagacatcagcagccacagagtcaactttagttgagcctggagaaaatcatacaaaaccgtagagttttaactaggttttgtatcatcttttgataagttaggaa

SEQ ID NO: 48417 - DNA, 3733 bp, Homo sapiens
attcgtcagaacaaaagaagtaggtcagtgaaacggcattagtatatccttcaacaggcaaataagtgatagtgtagtttgcttttgaagtcgctgtgaaaagttttaggtgaacatcacctacaccacattaaaaatggaatcaagtcattttctttaagaaatggagtttgagatatgagaattcttttgggctttttctacttattggccaattatacacccagatatatttctgcaatatttcaaagattctagttctaatttgtataataaaaaaaattaacagccttttccagaccacatgtttccaacaagaccttcaaaggcctcgctcgctatataaaactggctttaaacaatttcctttcccaaagaaggaaataagatatttcggttttgtaaaagaggcaaaaccaggtacaggccacctttcctgctggagagctggcataagtgagtggattcttaattactattttacctgcggggcataattacttacgtggagtgaaataaggagccgtccttttctaagtagccttcatagtggaccaacatcaaatcccctcctttggtcttgcgatggcagatgaatggcttctggagaacttcaattttcacttctggttcagggatcaaagccccaatcaaagaagtgacgaacagagtcaagaccgcgttccacaagaaaagcctcatgttgctgaagcaaggaaagaagtccctacaaaagcagcgaaaggtccctcgacttcatagatttaagaacgtagttcaaggcttacggacaagggcttcagacaagttcaggactcccccttcttagaagacgtggcacatttaccaccaactcttttctcaagggtcacgaacctacctttaaagagttaagcccaaatgccggcctgactggctcttataacgcggccgcctgggaatagcagcctcccattggctattggtgctgtccttcaggcagctctcaagccaatgacgctgcaacgatggaatttacagcccggtagagccgggcagctgccaagcggcggatcatcccttgtggtcctagagcccggtggatttcagcattcaaccagcgtggattttgggagaggggcggggcgcagagccaaccggaaactcctccggctgatttatctctgtgaagaaccctgctgagagacgtaggaagagtcccggggccctatgaaatcttcggggttccaggaaagactcgtttactctcgccgttggagagcggccccccaagatgccacaatcctaggattttgctattgcttataaactgtaaagactgacatactgcttgagggttcacaaagcgcgttcccgttgcatgaacctcactacacccagtaaggcaggttcttttttcccatttaaaagagaagtaaatttacaccaggagatattaactgtcctgcttaaggttgtttggccccgaagcaaatgagctctgccttcaaaccaggtctgattcattccacagcaccacgtcatgttatggctgctaataatttatcccttaagttaccttacagggtaaataatgagtttcgacttgcagacttccgctttaaagaagaaatggtaatcatggttacgaattacacagcctcatcgtagtttacattttctagttttacattttttgcctaagttcaaaagtaatgcatgttcattgaagtcattttggaagaaattggaaagcactaaagtaagatttccagataatattggggagtcgaatcaagttggaatttcagatacataacgaataatggttttgcatttttatttactaaatcaggcaactttaaagaaaaagaaagctcgccgataccaccaccagccgcaaacaatcctcttaatattttggtgcatgcttctgtgacatatacttaaagcgatttaaatcgtattgtagtcttttctcacctcctctttccacttaatctgtagttaacattttttctggtctaataaccttaacacagtgcatatccgcactctatgtgcataggaatccccctgaagatcttgtttaaaatgcagattttgatctggaggtctggggtgggtgcaagattctgcatttctaacaagctcttaggtgatgtcagtgctccgggtcagtagatcaacacttccatagtgagaccttagagtctggacaacatctgtttacactggcctcatagtattctaccctgaaattccaataatctctttacgccctgttattggttacctcaagtgtgtgagatcaattaggcagctttggaacaagaatagggactagaactcaggaggtatcgtgagaggtcacgtagaccctcaaacggcgggcaccatttacagtcagaactgcgctccacacttgtctcaggggcctccctcctcccgtcgcctagtccgcagtccgcgtctcgggactcaatttccctgcgggccgttcccgcaaactccgccccgccgccgctgccgcgaaatcccggagtggattttgggaaggggcgcgcgagcggcgccctgggcatgcgcgagcgcgtcccgggcccggcgagtcgagggttcaggtggtgcgccgtggcgccgcctgcgaccggcagctcgttcgccgcactttggaggcttcggctgcccctccgacccacgtagggcccggacccgggcctccttgtgaacagcgtgccggcttcgccccacgggttcaccggctggctgggcttcaagcgccgaggccgccgcagtgaccccgcccccgggccgaggatgtgaggcgggccgggcgtccccacaccgggcccgggcgccgggagtgggcgtctgggcagcgccaggcgatggccctgctgctggtgctcctcgcctcttggggcctggggcagtgagggggccggcgggcgtgggccgagtggccgcgggcgccatggagggggtgctgtacaagtggaccaactatctgagcggtgagtggccgtgccgggccgggggcgcgccgggggccggtcctttgtctgcgcggctggagggcggtgtctggacccgtcttagggagggggtcacggccctttcctgaggccagcgcggagcgggagtatttcccaaagcagttctctcacgggaccgtgtcgccgtgcaggacgacacggccctctcttggggttggttaagagctgtggctgccctttcgcttcaaggaaggctacaaagactgagattttgggtgacttgaaaggcacggtgctcttgatgtcagcgggaggaaggcgcagacgccccgccgtggggttctctgggaatctcttgaattttggcgaaggaaccgtactcccttggctcgcagctaggttggaaggtttcaaaagaatgccagcagtaacctggaattccacagcggaaagatcctttatcaaagtcctcagtgcaaacactttccctttgtcaccttcagagtcatctgcgtgcacaccagggtgtcaagagtcccaactccacagtttcaaagctctgcacaaggttttttattttctcgttgagcatttccttttgttttacagactcagaaattaccgttaaatgaatgcaaatatttgcaactttcttgccgtgccttacagattggctttaaaatagtccccgccctttttttctagtttgtggaggtaaaagcttcatatcttgagaaggttgtaactgttctaca

SEQ ID NO: 48418 - DNA, 686 bp, Homo sapiens
gaagttgggtgggttggaggctacccagacagggctcttctgagtctctgatctccctctgtcttgctcccagttcattctgtagataatacacgcatggacctgataatccctggggaacagtatttctacctgaaggccagaagtgtggctgaaagacagcggtggctggtggccctgggatcagccaaggcttgcctgactgacagtaggacccagaaggagaaaggcaagtactgattgtcctttgctgtggaaaccttgggaatcacccactggcatctctgatttcccttatttgttatcttgcttctgaccacctagccagctttttgtgtcatgcaaatgctgtgtatcttagtataatttaaaccagggtccatatctaactcttctttcttggcatagcatagtgcaaagaatgcaggctttggagccaaacacagctgggtacacatgatggctttgcagtttattgactgtataaccttggcatcggtcacttaacctttcttactcttagtttcttcatcttttaaaaagaggtaatagatcctaccttaggaggattaccatgagaattagtgatgataaaatggtggagtatccagtctgtggccaaacttgacctttggtgaggagtagttgagccagataagccttggatcagggtgttttctgtagca

SEQ ID NO: 48419 - DNA, 592 bp, Homo sapiens
gagggactggtccagggactctggctgtctacagactggtagttcatggggccttactgcttgagaagctgtgctgccagaacagtggttctcaaactctaacctgtattagcctcacctggaaggctccttgaaacacagattgctctgtaggcctgacttgaggctgagactttgcatttctaacaagttcccaggtgatgctgaggctgctggtttggagactacactgggaattgctgctgtagtacataatacaattggaatggctgaaccacatgactagatattgccaaattgctctccaaagtctataattaccagcagagtagtgagagttcccaatactccacattctttttagcacttgtcattgtcagccttttaaatttgtgcctgatggctgtaaaatgatagaatattgccaaagtttttgttcttagattacaagtaaggttgagtagcttttcctgtcttcactggcagtttgatatccttctctgtgagttgcctgttcatgtatttgaccacctttctcttaggttttctttatcaactcctgggagttctttatatttcctggatattaatc

SEQ ID NO: 48420 - DNA, 475 bp, Homo sapiens
tcattgtagagtgtggtggacccccggcaggtgctgctccttataatgacatttgcttcataactcctatcaaggttctttaaaatttctagctttatctcactacatttttttttcgctgctaatttttctcataagctgctattcctttacccacacgaagctattgctcatccaaacattccattttatacaactcattaaggattgggacattcttttggggctaaagggaaagactgaatgccagtatgatacctagggacttgcccagtacatctgaaataaatggaaaattagggaaaaaaagccatttggagtggttgacagtcatcttacaagaagccagaaagactcttagcaacatggggattttgcacatgaattggctgcagttcaccgaaggagctgaaagatttctttctttgtgcttctgtgagtttggaaatgaaatgtcaatcctttctctgcccaa

SEQ ID NO: 48421 - DNA, 741 bp, Homo sapiens
cctctctactaaaaatacaaaaattatccgggtgtggtggcaggagcctataatcccagctacttggggggctgaggcaggagaatcgcttgaacccagaaggcggaggttgcagtgagcagagattgcgccactgcactccagcctgggcgacagagcgagaccctgtctaaaaaaaaaaccctacagtttattgatttcctttcctttacaaggaaaaagagttggctgccttcatgtatgacttttaatctttgtatctctgcccagaggcacattttggagatgatgctgtttaaatttccaaatcaataaataagcagggtcaaagatccaaaactagcaaattgctatttccaggaaaagatgctggccttgtcaatgtggttctgtcctgcacataccagggagttcacacttttcctgcccaggcctagagttgcttggagctattcattctacagaagtgccatccaactatcttggtatgattgccacaaagaacttttgaagagggctgaactaggtgggccttagagacctataaaggaaagtaatatgcctagatttttatatgtgtatataaagcactgtaagagctatgactaaagaaatgagaatgtcagtgtgaaactttttgtgattctgcctgggcgtccatcagatggcctttcttctaagaggtagaatcagaacacattggcttagaagctgctgtagaaaactggcccatctggctat

SEQ ID NO: 48422 - DNA, 1768 bp, Homo sapiens
gggcaaacgcttcctgggctttctaactccacagaaacgctaaccaggtattgggcgctcgcaccgcttccaggtaacccgcggagctgcggattccaggctcgcgctgtgacgtcaccgggctcgcaagccgcggcgcggtctcaggctccggtgattggctggggcccatgacgtcacggcccggggcggcaccgcgatggccagggccccgggatgctccgggtttgtttaaaaataaagggggggcgggagcgcccaggaaaatccgggcgcccgcgggggtgccggccgctcctcccgccgccccgcgtcccggcccggccgcgccaacccccacggcggcccgcaagggggcggggggaggcggggcggaggaggagccgcgggcgcggcgccgcgctgtccccggccgccgcccgccccactccgcaccgcatgtaaacagtcccagccggcccagcccggccccggaggagcccgcgcaggccgagccgagcgccgcgctgcccgcccgggaggagggcgcctaggagcgggagggcgggcggcggcgggaggcgggcgcggggccgcgatggatttccagcagctggccgacgttgcggagaaatggtgctccaacacgcccttcgagctcatcgccaccgaggagaccgaacgcaggatggatttctacgccgaccccggcgtctccttctatgtgctgtgtccggacaacggctgcggcgacaattttgtgagtgcctggaggagggaccgccggagccggcgggagtgtggacgcggcggtgcgtccctgcgcccgagctcccgcgcggtgggcggcggtgggcgcagagtggggggccgtaacccgcgccccgcgccccgcgtgctccgccggggaagccccgggccgggcggtgcgggctccgctgcccgggtggggcccggtgggcggcgggcaaggcgcccggaggatccggggagccgggtcggggcgggaggtgtggcgtccccctaaaggccactcctctccccgctgctgcgggcgccgtttcgggaacccgacctcgcggcccgtgcgcggtgcctggcatggagcatccctggggtgtgggtgtcacccgcgtcggaccagccgggtctggggcgcacggaccctccggcaggagcccaggtccggagcttcccacatccaggcgtcccgtccgggataggaatcccgctcccctccggtgcccagcctcggctcctcgcattgcccctcccgggagaaccccactccccgccctcgcgggttagtccttgcactgcctgtttggacacaaagctctgtccatactagcgatgcccgatctcctggaccttctttgcggaattacaccccggatcttaatacgcacgcgcgcctgcgcatacaccccaacacacacacacacatgctcacaccctcaccctcacacgcgcacactcacgcgcacacgcggcacgcctctccccctgcccccgcgctgccctcgctgcctctctgagctgcccgagaggtgtgtgtggcccgggcgggttctctccagccgaggcggtgccctggccctgctgaagcccgttggcttttccagatgacggggaatcccctcagccccggctcagagggaccgggaactgggactgcggtgtccaaaccttccactttgaatcctgcacccacctgggatcccgactctggcagttgaggaaggggatgcggagggcaggggagtcggggtgggaggggtggagtagg

SEQ ID NO: 48423 - DNA, 3565 bp, Homo sapiens
catatgtggagtggacagggaagctcctgggaaatacagtgaccttggcctcttaatccatcaacaaaataatggcacttttatgagaactctagaaatagaacttttcatccggcaccatcttatggtacgctttggagcagtgatgtcaccaaggagacagaaactagggaattcatcctcttgggccgggtgactaatcctgtttcccaacctcagaacatttgctgatatcatccatcttcccgaaaccacaccagcctgggggtaagaagagagtgacatcaactcacaaattcacatttctgtgactgtaacgcgtactttggggattcccagcccttctcgtattcctcccaaatattccgggaggtggtcctagggggctgactcgtgtgcttcccaagttcatcttctgtggcaccgggtgttctccctggctttagtgcacagcctctcttctgatgctgcagaaccccataatggcagtgggtttgccagagcccacagaggggcacaaggtcacccaccagaggagcccactttcctgccactacccaccagtgtttaccctgaggctgccagcatgaggcagtgaggacctgggtgtgtggtccagggtgctgttgccagtgaccacagagagtgccacaccaatgagcaatgagtgatgccccagtgacagctctctccatttttattcatctttcattccagccactcaccgaaggggcatgagtccaaacagttggacattgctctgagtaacagagccagaatctccttttcatccagccttgccattgtcacccatgaacccagtttgtgagcttgacatgtttttcttaggatgagctctgcccactgaggctccttgggtcctcctgtaaggaagctcctggcagatccaacctcctgacataccaatatgtccagaaacaacattagctgggtcttgccatccccctgaaatagggtgggtaattcctttgggtggccctaaggtgctgagtggaggggatttagccagggcagaggaatgctaaagtcccgaaagtctcccttcccacacagaagtactttggtgaggaggctgtgggtgaggtgactctctacacctatgaaagctcttttgcttagggttgaccattaaaaagtgatttcttgaccctcagggtaacaaaagcctggcccaccaatcaagccagcaagtttcaaactttaaggctcctaagaatcacctggtggtggggccagagcggagggttggtgctgtgaaacatgcagattcttgggctgcgctccagaatctggagacagaatctggacacaggaagctgcaagtttacaaatactccaggtttacagtttacaaatatgtcaggccgtcctcatgtaggtggttcatggaccacactttaagaaactctgggttgagccggcctccaggctcaccatgtcattcactatgtctacagggagccaagattcatcacaacgtgactgggtgccaggagctgggcaaaattccttcctgatcctaacacatctcattctataaaaataaaatccttgtacagatgccacagtgatctccattaacatctcaaaacttggggaaaaaaaagtctctcttctaagctcacatggtgacagagctgggggcagctagttgtgcctgactccaaagcatggtctctcatcataggatgtcacattgcttctgtgacatttaggggatatgaatgagcagaggccaagttgtatttggctgcatgcttgattgcgtagaaaaatgacgacactacccttggtacatctattggccccaacaggaaggagatgaaagtattgcaaagggaacagtgagcctagactgaatcagaggactcccagaaattcgctgcactctcatgatataattatgccatcaggttggccagttgaggattacacttcagaagaaggcagatgtcattatctaaataggccattctgtactcatttctttgtttgcttgtttcttgtcagtccatccactggatcataaacctaatgaaggcaaagctctgtttgtcctgttcttcacagaatccccagtgtttagcacagtcctggccttctagaaacctttgtcgaatgaatgaatgcatgggtcatggggagatgaaaggcagtgttactctttctctggggggacatgggaaggctgcttcactctcagatcagtgcactctcattcatgtgttgagtggcaggtgctggaagtcagagcatctgaaatgcaagctcctgtgccccttccctggacctcaggtctccaacattggggcatgtggttggtaagtctctgagattctcaggtatatcagggaataggaactggagggggtggatggtacaggtctctgtgcccccaccccatgatccctagatgaccatccagaaagtgtcatcagccaattggaaagtcatgaagcagacacagccctagactattctagtgggaaggcaagaacatgtgctgtgtccccgcctgctttccaacctaaggtagaggctgtcccaggcacaagagcactttcaggtcactggtgtagcttttccaaggctgcctgcctctgcaccatctctgggaagattccgaaactgccccattccagtggggtggcctaggggcagaaaaatgctccatgtgcctcccaggcagaggtgggagcttggggtggcatttctttaatgaagtcacctaggttttcacatctagaactgtggacatccaggctcctgctcactgctctgagtcaccggaagcctggaatgatgaggctttttttcaaacactatctaagaatctttgatgaatcctcatcatctgccatcaggcaccacgatttcatgatccccaaaggagtagggcaggttcctgaagatctcccggggtcggtccactggcgctgggccactgactccatggaagtggttggtgcagctggccttcgagactctgtgccttcagaacctcatatagtctggctgtgtcccccacccaaaatttcatcttgaattgtaattcccataatccccataatccttaagtgccaagggcgagaccagggggaggtaattggatcatgggggcggcccccctgtgcagttctcatgataagtgagtctcatgagatctgatggttttataagcatctggcatttccactgctggcactcactctgtcctgctgccctgtgaagaaggtgcctgcctttcctttgccttctgccatggttgttaagtttcctgaggcctccccagtaagtggaactgtgagccaattaaatctctttccttcatacattacccagtctcaggtatttattcatagcagtgagaactgactaatacaaaaccctatttgtttttcgcttccatctgctttccttttccagttacttcattctaattggtgttcctttcctacttctgggttcgtacctcccttctcattactgctgtgacacattctccctctactgactggcaggcctgcccttctccctggtgact

SEQ ID NO: 48424 - DNA, 814 bp, Homo sapiens
tctgttaatctgtgctctaaaatccacagccagattgaaactcaagtgcatgattgtgttatgaaaatcaaagtgaggttaacccagggactacctatcaagaaagcccccatttaggtgcttggaatgcagaaagattcccaaagttccagcagagtctgtgcagcctcaaacaattgcctttaccagggccttacaacctgatgtcatttggggatgctgtatttaaagttgcctgagttacagagaacagggatatggtctattatctcagaggtgggcatgagctctatggggtggaatgatcatttgcctccttatttgcccaagaaatgtagggtggaatgatcatttgctctcctctttttttttttttctgtgatggatcagtttctatttaccatcttggctccctgccagtgtgctgacagtgccaaatttggttggtacatacttgtcagcaaaagaatgtgagtactgctctgaagtcacagcaaataatgggtttctgagatcttctctttgactcacaggtttccatgtgtctcattctagccagaggcttcactgcaagaccaagaagccatttaatatctagtggaggtttctggtcttgtattgttggctaagaaagccagaaatgtgggtgagagagaagtctgttcttgttccccaggcttcccccattgcactccagatgcaaatctgttctggtaaccacatagccaaataaacaaatgaggatggaaagtctcttgctgaaaaatgaaatgtcacttctaaaacagaattcatgatcttctttcagctcttt

SEQ ID NO: 48425 - DNA, 806 bp, Homo sapiens
taagtccccgtctaggaagtgactcagccatgtcagtgtggggctcacaccccaacaggcttcccactccttgctgcaccagtcttcaccccagacctaggccctctgggtggggtggagctccttcccagtgttccctcccttctccttctgcccacctcagatctaccctttgtcacttgcctactgagaccagccaacttgaggcaatcattcctgccaagttagccagtggctgcatatatcatactcaaggcaacattcttatggtaaaaatttactttctgcagataccaaccctggtaaagtctccaatttatttcctacaacaactaaccttctcacattctttgtttcagcctcaagggcagttcctggaattcaccaggctcttcactgccctcagccttggcctctagccaatgctgctgccactgcccagaaatcttctcctccactcagcactctgttaactcctttccgcccttcagcaacagcttccaagtctctttccccaactgagccctctgctattctcttttccgtcatagatcttagcagaaagtacaaacatctccctcagtagatgacagatttcatgaaggcactgtgccaccgtacacctggtacctgcctggtacacagcaggggctcaggttaataaccgttggttaaatacatggatgaacaaatgaatgaaagcactgtcttaacccaaagatgagacagatggtaggaattgcaggccctggcacatgtcgatgggggaaagagacatttttgagcaggtgaaacttgtctcttat

SEQ ID NO: 48426 - DNA, 2449 bp, Homo sapiens
gacagcagtccttagaatgtgaagcacaatggtttaaacattaaattgagaccgtaaggctgaaacttgttcccatctcacaacgaacctttggcagaacaaagaccagaatccaatttttgtcaatcaagtcacttttcccctctgggcctcagtttcctcctctgtagttgaatgtacctcttcctccacttcactcttcccaaagtgctgggattacgggtgtaagccgccgcacctggccttcatgtttatatctaaaaaaaaaaaaatcactcacatgtgaacttttctttaaataattggctatagaggacacattttcttgggaataaaaaaggcactagtagtgctatttttgttgtgccgattgatgccagcagatttatagttgccctacttgttctgtttgtcttgcctgcagagtggataggtggctgggtacattgccctcaaatctttgaacaatggccccagctttaaaatgtgctttcttgtcctattttcaccactgaatcaatgttaattagaaaaatcctttaacctctttatgtcttagttttttcacatgcgaaatggaaagagcacctggctctccacatgcctagagaaatctagcacggggtggttagaatttgtgactgctgccctgtcagttccatggagatgtctggcctctgggcagtatggagatgcaggcttgccagcagtttgtgatgcctcttttgctgggtcccatggaaggttgctagatgccctgactcctggtgttctatagccggagaagacagattcggtgttacttctagaacagtgcctccccacaggaccaagtctaatccggtctgatctgtagccaatgagaaaaataaagataatgtggtgcatgtgtctgtgtgtctgtgtgtgagtgtgtgagtgtgcatattgtcagttgttctttcttctgagataatgtgcttcctatttttcggtgtgaaattgtttttttttttttatgtccataatgcatacttgtcataaaatttcaaagtctgctttaaaacactgagctgaaggacaaccctgttattgtttcctagatcttctgtgacctggttttgacagtcaatgattaacttactttggctagaagaggtaatgctaagtgttggaagtttactcagcttcttaactagaattgcactaacatttactaagggtacactgcgtgctaggaactgtgtttgatgcttccatgtacatcattttattcaatcctcttaggaattctatgaggttggaagtgttatagccatttaaaataagggcaatctgaagctcaaagaagacaaaccacttggtcaaggtccccaattgttaaccatcaaagtctgaatttgaacttggtttgtctgagcccaaagtccatagtttttaacctcactagcctaattctgtaaatagatctgggatgaacaggactctttcatccatgacgccttcctatctgctgagttggtgagagtctgaagaggggccaaagccagggacaaagtgagaccaagtccctgagtcacacagtgaccttgagtgcattccagagatcagactgaaacatcctcgatgatctcttctgtggtatcatctacccttgattttctataaataggaataatcaatgttgactggactgaatgacacagaagcaaacgaattgtttgtcctccaggactgtaaccagcaatcagccttgtattcagtgacatttgggccagtatttacttctttatctcatatctgttttgtctgtgattaaattccactatgaaggtgaccaagaaagctaatgttttgaattttcaagatttcattgttaagaaatctgttcaaggaaaggccaagtctttgggcagaatgaccaaatgctcctaagcctcaagtttgcgaactttatttcaaaaagtagagtactggtctttttagctaaaggttcccattctgtaggtctcatgggggtgtcctggaatcaaacctggggattgaatataggcagaagatccaggaacacacattgggaacagttctaagatacccacatttcgttcaagaggcatatataatcatcattggctggctggacacttttcctttattgtttttctttccaatcaacagggatgaagaatagcccttgttgaccctacatgccaaaaacaaattgcacgagcctccaaataatcactttttggagggtatattttagtacaaaaaaatggaccaaactgaagaagccttagttgtagagtccagagggttgaaattggggaggggtgagaaccaaggtgtcctcatgggccaggagagcacaccctggcccatgcctttcttaaggacaaggcacgtgctgggcactgtcagcgtggagtcatgaatccggaagaagcagttgcactaactcaaaagtcct

SEQ ID NO: 48427 - DNA, 1026 bp, Homo sapiens
ctaggaagctagagccctttccccaattactgaggtacgttgacagtaaaaataacaacgacaacaacaataatagcaacacttttatgtactaggctcttaatattattactattataatcatcccttacttataactgtggaaattgagtcacagaaagattaaataacttgcccaaagtaacaaggctaatgaccagcaaggccagagcttgaatccaggcagcctgttgcagagctgacatgttgaactaacatgatgtgttgcttttttttgtctatacagttagggccatggctagaggcaacgtgtagacccagtaatctgttgggatccctccatgtctcggatccttgggaatgtccctgagtttagatctactgttatgctctatatcagacaatgaaaaacacagttctaagtccttagcttgggaaactctcataacatttggcttagtgaagtcaaatggtacaaaattcaaaagtaaaaggcacatggtataaagtcttacttcagcatccagccatctagttcccttgcccggagatagcaaatgttagctaatggatcaactttgagcaaattgttaacccaaaacttacctctttatcatccaagacaaacactgcttccatgccccacctcccatctgtgctctgacttcctggctggagacagaattctcaatgaaggagagaaacagaagtagtttctcttcagtgccagcctcaccttcccttcccttctctttacgtctcccctcccctaccactcctgggtctttctttcccaactcaaactatcaccactttacactacactaaaggtatcctcaggagaaggttgggacatctgctttaacttccacaactcctttgctaccgtgactatcattctgggtttatcaccaattaacataccactcacgctgtgaagtataagggctggtgtggctggaccaccaaagaagactcatttgctgtaatattcctaaacacagaaagaaaaaaaaataagatttt

SEQ ID NO: 48428 - DNA, 1637 bp, Homo sapiens
gttgggcctagattctaggttttgtgagtcaggtgcagcgttcctggcaccacagtatttgccctaccacagagggtcaacctggattatcccgagttcttccaactctgcgcttcctcccaggttggtgtttcatgagtaagtctgagatcaagctggcttttgagcttctgtttttttttttaatcagtgtgtaacaccaacacccaccgaaaccaaacggctctgggcagaggacacagccattcacgccccctgccaggaaaagctgcagctgacacaggctcctacagcgtcggcgggccacgtgcgggaggaggggccgccttctggttggcgcccggtgtccgttcctcctatcggcgtaggccccgcgaggaagacaagggcgcgccctggctgggagggcgtggccagagacctgtccatcaccgagtccacgagtggcagcacctaccacaccgcagtaccttggcgaggcggagcaggggcaggcaggtcgcggaagggggaggcggagcaaggccggcgggagccaatcggcctggcggcacgagggggcgggggcggggtcaacgcgcgcgacccaaacacacgggccgggcgcaccctgcagccgcgccgctccgcggccttccggcgcggggccggggaacctcctccccatctgcgcaccccccgccttcgcggcccagatcctcccgccagcccggcccctccttcgcagggggagcgaggcgacggttgccgggaagcgcgcgccacctctccctcccatttttcgttctcccctcgcgcgccacccgtttttcctctttctccgttaataacagctgggtggctgggggaggagggaaggtggccccggcggagtctgggcgggcgcctcccactcagccgccagccgccgtgggagccggaggatggcggcggtagcagcggccgcccgagaggaggcggtgccgagatcgggggcgccgagcgcggcagcagagagcggtagcggcccgtcgtggcgcaccagaaccgaaaccagcggcagccgcacggccacttgagccgccccttcctgctggagccagcgaggggtgcctgcagccgggaccccttcctctccgcgtctcctcgtctcccgcgcccgcgtcaggccgtcggcctcgcccgccgccccaagaagagcgcgccgggcgccgactgcccctctggacgccgggcggcggccctggacgtgcgggggcctctctgggccggccgcggcgcctgggccctgccctctagctcccgcgctcgctcccgccctcccggctctcggggcgcagcgcgcgggcccggcccggggcagggcggacatgggcgccaaacagagcggcccggccgccgctaacggccgcacgcgcgcgtactcgggctcggatctaccttccagtagcagcggaggcgccaatgggaccgcgggcggcggcgggggcgctcgggccgccgccgcggggaggttcccggctcaggtgcccagcgcgcaccagcccagcgcctccggcggcgccgcggcggccgcggcggccccggcagccccggcggccccgcgcagccgctccctcggcggggccgtggggagcgtggcgtcgggggcccgcgcg

SEQ ID NO: 48429 - DNA, 572 bp, Homo sapiens
cggccggtgggcgggagccccggcgggccgcgcctggtgatcggctccttaccagctcacctctcgccgcacatgtttggaggtacggacccctctccgcgcacccgcgctcggtcctcccgcggctgcacgtgggccgtggccgccggctatttttacccttctccttttctccttctgccggggcgccgggggctgcctcccggaccagcccgcgtcggtctccatcctggaagaaacccggcgcttaacaccggcggtgccgctaccgcatagacgcgtggttttgtttttaaacatcctgagcaccctcacctcagcggctgcccagtagagaaagtctattttccagtgagatgactggagcaaatgttgttttacaacaaaccgacgaaacagcccttgtggttgtggtttttagtaccaggaagtcaggaggagaccagttgctaaatgtagttctatctggggactcgagtggggaacagtttttaaaggccaaaagtcaaagcgtctcaaatgaacactgagttaccatgtttggaccgacttttagtataaagctgtaatcc

SEQ ID NO: 48430 - DNA, 1343 bp, Homo sapiens
cactacatatacattgatggggaaaatgaatagtgcctgccctaatggggcttaattatttagagtatcacaaatctataaataacaggctgtttgaaacctagttcttgaataagtatttgtgtcagttcttataaggtatgaggttattaaggtcattggaaaaccctttatttgactctacatccggtaagacttttataccttgtaccagaccttcctgtgtgtcagtgctactgaaacaaaggagaaagtaggtgaaagtacttcaaacactaggattgaggtagagccagccagacacagatttcctaacttgtttacatttttagagggctatttcttcagtaagaacagtattatgttcctaatcagctttctcttcattgctttgtaaaggcaacttttttttttaaattaattaattaatatttttttgagacagagtctcgctctgttgcctgggttggagtgcagtggcgagatcttagctcactgcaacctccgtaaaggcaactttattaagttacaatttacgtgcaacaaaaacattatgcatgtacagtctgattaatttggacaagacatatgcacctgtgtgactatcaccacaaccaaaatgagaatattttcatcacccctcaaaagttattcaagtctcttaatactgggttcccacccatcaacccacagccctaggcagtcattgatctgctcttcattgatctgctctgtgtcactgtggattagataaaatcattcagtatgtactttatttgtgtaaatttgttttgctcagcatagtgtctgagaaacatcacagatgcaatgatgttgcctgaatcatcgcaagacatcgcttgaatcagtagtagtgttccattaaatgaatatgctacggtttgttattctcctattggtgggtacctgggctctttctggtttggggctacccctatgaataaagtgactatgaacgtttgaatataaatctttgtgtgaacatgtgatttcatttctcttcaataaattcctagggatgaaactgccgagtcatgtggtaagtatttgtttaactttgtaagatactgccaaactgttttccaaagtagccgtgccatgttacatttccaccagcaatgtatgagggttgcaattttaccacattattgccaacacatgttggtgtccatctttttaattttggccattatagtgggtatgtagtggtatctcgtggttttagttgcaatctacttaaccactaatgacattaatcatctttttatatactcatttgccattcctgtagcttctttggtgaaaggtctgttcagttcttt

SEQ ID NO: 48431 - DNA, 751 bp, Homo sapiens
tttaaagtgctttacacctattaattcatttactcacaaccagacaattctgcaaggggagcactgttttataaaactcttatggatggggagctcaggtacagaaatgctaagtcatttgtccaagctcacacagcttctggtagtaccgggatttgaacccagatcctcagtctccagagaacttgccacaatagtgttcttttaaggtgccctcagccaactcttgcacttattgatatctttgaactcatggatgaatgggcttaaaattgtttttaacacaatgtactttggtttgagccttatttaaatagaacaatgtgccagtcaccagaccccatgcacggttgaatcctttggccacttacataatggattaattactggacacatgctgccctcttgtgatgaaagtcactcaattgcaaccttctccacttctctggaatgtacccagttacttcctttgttccagtctcatggttgggggatggaggatctgtagccagtgacgaagctgttggctctgtagagccaagatgtcacctgccattctgtgtggtgctcccgggctgttggctctgtagagtcaagatgtcacttgccattctgcagggtgctcccagcctgtgactccagccatgagacatgaccccagagtcctgcaacttgtagcaactgaatataggagaaaagaccaggcttcctgaagaaatcctaggaacattaaagagaccccatctgtgtc

SEQ ID NO: 48432 - DNA, 1691 bp, Homo sapiens
caggacactgggagctgctgtcccgtctgcaggcgggactccatgaaggcccctgtctgcccttccagcctttgccacaaaccctcgaacgctggctgcacactggaatcacttggggagcttttaaaagatacggaggcctgggtctgactccgtgagattctgatggaattgatctagggtgcagcctggatatctggattttaaaagctccccaggtggttctaagctgctggcacgattgagaacccctgcgttcgaccacagtgggataaacgattccgctgactgtgaagttcatccctctcaactttcgctacatgcttcaaactcgcgggtttctccgcttggttccacccagagctcctccagagccgcgctgcgttccgcccgcacgcaaatcccgcctccctgcgcctcctcactcgcagcgcccaggacctcagaaagggcctgccccgcgcgaatccccagtcgctgggacttacttggccaccaggtttacagacttcgcagccgctgagagctagagaagagcccggagagcgccatggtccggggacgccggggccgggaagcgccgtggcccgggaggacgctgctcccgcagtagcgcgagggaggggcaggaccggggcggctgcctcgcgggcccggaacgggaactggctgcgactacagccgcagccgcgcccctctgttggcgcgcccaagagcctgccggctgctgggagaggccgccgaagggcgggggcggtcaaggcagggtcccacggtgctgccattcgcccgggtctggcgcgggggggcgagagaagctgcgcgcagagggacgcccggtgcgagagggtgagcccctggccaccgcgcagggccgagtggacaggcccaagttcgcccagaggtgacacacttgggaatttgtggtgccatcgtgccaggtccctcctcgtaaaagtgcctacccagcgcctgcaaccagagccaaagcctggacatgatagggaaactcttgttaaaacgcgacacgtggtcctgatgaaatggaggttaacgtaatcaaatttaaattacactgcatacatttcaatttatactttttaaaaaatgtaagcttttcttcctatccttaaatttgttcttggcagtgtacattttatgttctatgcatatgctctaataggttgtaaaagagttttaacatgctaataaatgtccccaataaaatagttttaaaacgttttgaatggggatcgtgtccataagggatatcatgctacagaaagttgtcacttactcacactgaagaagtacattcaatcatatagccactgatgcttgtgagtattaaaattcccatcagaggctgccctctgagaaacagaaagtatgttcttaaatcaaaagtgaaagtgcaaactaaagttgataggatcaaatgtgccaacttgtgtcaggcctctgagcccaagcctgcatgtatacatccagatggcctgaagcaactgaggaatcacaaaggtagtgaaaatggctggttcctgccttaactgatgacattaccttgtgaaattccttctcctggctcagaagctcccccactgagcactttgtagaccttccacccccccggcccccgccttgcccaccagagaacaaccccctttgactgtaattttccactacccaca

SEQ ID NO: 48433 - DNA, 1767 bp, Homo sapiens
caaataagacatggtcccagctttcaggacctcttagatgaggagcgaaaggcaggtaaacggattttcacaatgccaggtgagaagtgctgtaacaaaggttatgtacagaacagaaggcaaccaattcccagacacgggtcagagaagactctccagaagtaccaactgtatgcaatctgttaagttagtggacgagaggccaaatcggtgcagaccgagcagccggtgcaaaggccaggagggggaaagctccaggcagcccgagagggcaccgtggcccgggcagggccgggcagtgggcgcagcggaggaggtggacccgcccaggaggcggaagccgcgtcctagtaccctcatcaagaagaactgcattcctggcccgatcggccacgtgtgcccccgaggaagcgccttctgggcatcccggccccggcgtgggtagcgcgggagggggcactcacctgcaggcgggccacacagaagaacgccgccgaggggtttcggaggtggatcctctctgtcagcaggttgctgccgtaggcaaagtacagaaaactctcctcatctggacccgtgacgtccttgcagcccgagttggccatatcccactacgcccctgcactggagcctgaagcagagtgtaaggaacggccagagagcgcaacactggggcccactaccccggcgcagtgaccgccgcgcggcagcctcagggttaggggactggcgggaagcgtgggccggtcgagtcaggagcgagcgctctcctgattggctgccggtccccaccgacctgagtcgccccctttgattggccatccccacggccttccctccgccttccgccgagactcagaaatagtctgtcctgaagcaatccggcgctggctcctcattggacacgacctactgatgtcccgcccctccttgctcaaggcttcctctgattgaggggtggacaggcactcctcacaggcgggtcgggtcccatggacactggctgaaggtcgtggcgcgtgactggtttcttcgctctggggtgcttgtgtgtggttctttggtactttctgtgccttaggaagttctggtcagatctgaggcgaaacagcggcccaggcgactccatcaacggctccctcatccggcagctcgccgggtcctgccttcctggcctagaggagtcgggcaggacgggtccgttcaccctttctgctggttccggcacccccagcactggtcatcaatctgacccctttccacggacccgtcgcctgctggagcggcccctctgaatgcttgggactcccttccctgttacatggaagttacatgcctgggcttaaatcccgacgctgccatttactagccaagtaactttgggcacctctggtctccgtttcctctttttaaaaatcgggatcataatataagttagggtcacagtagaaacccctatattgtgttttggttaccccctcccacacacacacacatcctgggtgtattttttaaaacctatattgttaacttttgaatgaacataagggcataggaacattgtctatccttgacacccagctattaatctctaaataccaccccccactaaaaggtaccaagtgatccttcgagaaatgactgatgccaggtcaggagctaggagtgaatgaggacaacttggaacatcttgtgtcagaagctcaggacgcctctcaagacgaacgaggtccttctaaaaggacatgggaaccagcctgaagttgc

SEQ ID NO: 48434 - DNA, 3531 bp, Homo sapiens
aaaagaaaaagaaaaaagaaagaaagaatgactgaagcagcagtggggaggatgaattggtcggggaggagggaagaacggatttggagtcctttcaggactgtcctaacatgaaaatggatgagacattattgatctaaggaattttttagaaataaaatagttttattcaaaggatatagaatttcaacattttaataaaaatctaaataaaaataaaagtaaaacttaaaatgatttttcacatttaaagatattaaaataaattcaaaattgcctagtaaaataaaagccaaataaattataattaatatcaaatcttgaaataaaagtgtttaaaaatataattgttcaatattgcagaaggttcttaagcaacccaccctgctcatgttgaattgtaagtacttctccagaactgcacactggaacgggaagagaaataacatggactttcacaccattaggaaaggagacttcattatactgagcccgtctactcctgcacactcctggggtgggattgtgggtcacagggagacgtacgtgcatactgccgaagagctcccaagtggctggctgcaccagttaacactcccctgagcagtgtaggggagtctcagagggtcacttggcattttccatcattttcattttagccatttttgcaggtgtgcgcaatgctgtttttataaccaacacatcatttttctcttcctttcctggagggggaacccagcttttctaggccctccaccctttgggcaggaggaactgggtgtgtggggcggggggaagccatctctgggtggttggtcagctggggcctaaccacaggaggcagatagactgaggctatgccaagcagaaagacttatcaggcacctcttgcctttcctcatctctgccggttcaaatcctgctcgccccgcaagggcagattggaatttaccttctccagaaagcctggggtgactctatcccctcactcctcctcccccgttcgccagcttttgtcttgacatcggcggaccaagaatgtgtgactctgggcaaatcattaacctctctgggcctatttccttatctggggaacatctgcacttgagcaacagaagtctaagatccctatctgatttgatgttttgcgacccttttaaggcgcagggcgcgaaagaacagaaacagaagtgtccgttcaagtaggtcggccggggtgtcactcgtataaaaacctatgctttgaaggttctcgtgtgtctcggcctgcaggtctcgctcagagctgtgtccctgaacatccaccctgctggggtggcttgacgcacttctgtgcaaatctgttcgctcgcaaccctacctacctctctcccgaaccggagaaaaccttcggcggggtccttccgggttttgtgtcgaatctgcggcggcgacccggcgccgcgtcacgcggtggtgaatgtgcggcagcacgcgcgccgcgtcgtttacgcggcgatttcatcatgctccgagccgggcggcgcgcgccgcttccgtcgccaccctctctggacagcccagggccgcaggctcatgccctctccgcgtccagtgctgcttagaggtgctcgcgccgctctgctgctgctgctgccgccccggctcttagcccgaccctcgctcctgctccgccggtccctcagcgcggcctcctgccccccgatctccttgcccgccgccgcctcccggagcagcatggacggcgcgggggctgaggaggtgctggcacctctgaggctagcagtgcgccagcaggtaccggtgttttgcgctctccgctaagcctccggctctcctcccagggccttcttctggtcatccttccctcctccccggggaactgtcctcctcttcggttacccctttctttcccttcatcctctggcgtcttcttcgcctcccccactttggtcccaagtcccccgtgcgtcagccacctcctctcccgcggacctccgtcctcctctctttttggatgactccctggaacccctccgacttcctgcgtccctctccggctccgttctcccttccccattctgtcacagcccgcgtctcctctatttccagtggggctgggatctgtgaccctttggttgtcctcgcctcctaactgaataaccttaacttcagttttccaggctctgctgtactctttgtgcaccctgggtggaaagcctcctaattctttcagtggtcaatgatgagccgaaaaactgccggttctttcgtcttacggccaggccctttaatctttaggatgctttgatagtgtttcccccttaacatcttccttcattcagtgcttagtttagcggaatgattggctgagaaaatagaattgaaatgtggatgtggggaggtgtcgaacttttctattaatgctgtgaactcatcatcctttgctcttgtcatcttttctggcttctgaaaaggccgtttggaaccagtgagccctcagatcgtaaacctgggaaactaagtgttgcggagtgaagtcagccatccttagtatggaatattttgacatttgattttcccgaaggtgagggaaggtttcatgggctgaaggacttggtgatttaatatagacctccttttcctagggcactgccatagagtttagaatttagagatatcaaggaaaagattatttcagatgattcccatatgcaattagggagagccagagcttgcagtaggaccccggagatcatgacttagtagtaaacaccaaacgggtttctcctgcatgggcgcctgatgcaataatttgccttagctacagagggtggaaccctatctcggaaataattcattggggcatagctgccgcaaattcagccactttgccatctgtcctcttcgctggtttgagcctgaccgattttaataaatagcctttcattttgaaatatcaccacgggcttaacttttttcttcatgattggtgtcagaacaccgattgcatattctgtctccctccacccaccttccactccacaaataaaattaggtgtggttcctttgtcttttcttaacttgccattttaaaaaatatccttccctttagaaggaagcatacaactaatttggagaaaaaaaaaaaccaccacacccaaacccctccctctgccacgttagcctggaactgcagtgaaaatcatccatcggtagttaagacaggatctagttaactaaagtaaactttgatcgcggcagctttccgatgctactaactactgtcttgtgtattgtttatgttgtcttgattattgttttgtactttaagatattttccgaatatacgagttagttgatttaagttagtttggatatttttttctaattttccaagaacacacatatatcagttagttaattgtgtgaattactgagtcctatgtcagctgaaaaataatttaaagatgatctaattttacccattttttgtatatggggaaatgagacacactgtcacccctatcc

SEQ ID NO: 48435 - DNA, 2273 bp, Homo sapiens
gttcaagaccagtctggcaacatggtgaaaccccgtctctactaaaagtacaaatattagctgggcacggtggtgggcgcctgaaatcccagctactcaggaggctgagggaggagaatggtttgaatccgggaggtggttgttcacttggcagtgagccgagattgcgccactgcattccagcccgggcacctgagcgggactctgtctcaaaaaaaaaaaaaaaaaaagaaaaaaaaattcccgtgttgaagtcctaatgcctggtattccagaatgtgactgtgttggatagggtctttaaagaggtgatgaagtggaaatgcagtcattagggtggaccctattccaatacaactgatgtctttataagaagagattaggacacaggcacacacggacggctagccacgtgaagacactgggagaaggtggccatctataatagaggccagggagagaggcctcaggagaaaccatccagctgacacctcgatcttggtctgtagccctcagaactgggagacaataaatgtgttgtttaagccacatggtctgtggtactttgtatggcagcccaagcaaaggaatacaataggtaacatgcggaagtggcaaagattgtgaaggtggaacccaggtgactaagttcggggaaaatgtactgggcttggttagaaacccaactttcccagtacccagctgtgtgggcctcagcaaaatcttagcctttctgaatctcagtgtcccgttttaaagaatggggccaacagtaactacctagccaggaagttgtaaggattaaaagtgcaaccgtgagttaagagcttggtgatcaataaatggcagtctcattacgggaaagcaggcaccaagggggcgaggaacatctcctttaatttcggtgcccaagaagcagaatgctgggcttccttgcccccaccgtcaaggcccgccaaggtcagtagcgttggtggccccagagggggccgtggtgctgagggtggacctgagggggtcacttccctgtgagtttagtcctccagaaacaaggaggcaggtattcttcccattttatgtctaggaaaatggagcctcggagcggagcggtaatttgtcctaggcctctcagatgaccagggccagggtcagagtgaggccccgagtccggagccgtggacggggccctaggcgacaccagggcgccctgactgcggcctcccactccgagacgcgagtttgcgggacgctccaccccttccctcccgccccagcccgccagccccagggaaggggaggagttcttgccgcgccgacgccgccgtcgccacggcaacgcggccatactgcgccggacagacccagttgcctggtgctgcggcccggcgtgggcctcgtgggcagagccagagccagagccatggacagcctcttcgtggaggaggtggccgcctccttggtcagggagttcctcagcagaaaggtaacggctcgccccctccaaagcccaggaagtggctctaatttggggggatcatcggggtctcccctgaaggctttgcagcttctgggagggcgcccgttccctacctactgcctgctccagagatgccccagaagagcgccgctttcccgggacaggggaaactacatttcccacgaggcgtttctgccgtcgtcaccgggcgcttccgcaaggcacggtttggaccccgtccgctgccctcctggggcatccgcgctccggggcggcggcagctggggagggggcctgggggccgcgccaagcaatcctagcgcgggcgcacagcgggcaggcctgcgccctagcctggctgccggcctccgtgcgctacccacgcaagtcagggtcccactcggaaagaacttctcccagagggaaccccaaaagcccagaaaagttcttgacggtcaaacccttagtcattttagtcaacagtgggaattccagtggttgctttaatttttgtaagttttcctattgtcttgtcccaggagagtttttgcagtgttcacaagcttggaaggtccttagctgtcatctggcctcagggtggagatggggacctcggtggggaaggagctcgccggggggtcttgggcgtggtagtggagggggacatacattagctcattcagcacatggtgactgagggctgcactctgtgtgttttgtctgtccttgcagtgtcatactgggctagggcgatgggtacttgtcttgtatgaaaacacatacacgtaattttttg

SEQ ID NO: 48436 - DNA, 474 bp, Homo sapiens
gctgtgaacaaagcagattgagtccctgccctcttggatcttccacttccagtgagacgaggcagcccacaataacaccaaaacaaggaaatatataacatatctgaggattacaagtgctaaggggaaaaataaatcatggaagagtgacagggagccctggggacagagctgctattttataaagaggtagccaggaaaacctaccagagagggttacacttgagaggaggccagaaaggagacagggaacttgcactttgatctctggacgcaaatgccgacagcagttgtgcacaggccctgcagtgggagcatgttactgattgaggctggactacatgagggagagaggaaaaaaagcaagaaaggaagcaagggcttggtcatgtggggcctggaagctgctgaatgcattggcttttactttggatactcccgcatctaggagatatgggagcctttggaggtcga

SEQ ID NO: 48437 - DNA, 1262 bp, Homo sapiens
agaggtgggtggcagaaggcagcttgggaagggctttggccagctgctgatgagcctgggcccctgctttcccttcttcctccttgcaggtccctctttttccgtcctgcggagccttccaccaactctccccctgcctcctgggctcccatcctagccctctcctcttactgctttgagaatggaaacaattttgaccctctagcctgtggggcactctgcagtttgcaagacctgatatggtctagtcccttattgcaacagccctttgaggtaattattgttatccctgtcaggatgacacactggaggctcagaaatggaaagcgatttaccaaaggtcacgcagtgcaggtggcagaaggggcctgacacccattggttctgactcatcgtctactccctcttggccatcctgggaaaacagttgatatccgctgtatccaaatcctcttcagatattcacagctccatttcaactgctcggaggtctcggtttaatctgggttcttggccgtgatatgagtggttgagatggcaggaatcatgacctcttggttattgttttttgttttgttttgttttttgttattctggttgttatagtaggaaaaaggaagtgacatttaccgaatgccaaatgctttatatagttcatctcattcagttctcacagcagtctttaatagaaggaggcatcattgtacctgtattgcaaatggggagactgaggctcagagagggaaataactgataagtggcagtaattggatttgaccagggccctctgactttagagcccaagttctcttggttgtaccacagctgcccttacactattgatgttgtccttaaaagtcaatataaaccccacgaaagggctgttatctctggaggtcactgctggtgggtgggggaagtgtggtcaagggtcagtttctgagagtggcaagcaggagctggcctggtaggacagggatcctccagggcctggtgccctagtggtcaggtggaggggggatagctggttgggtctccccagggtaagtactgcctgcttcaggcttggtgttttcaatagagtcatggaccaggcacacttgtgcacatcctaggaggcccctagagatttcttgctccagtcctctggctttctaagtgaagacacaagctgagagagaggtcaggacatgcctgaggtcactcacccagtcaggggccgagtggacgctggtgttaggtgaatggctgtgactgtaggc

SEQ ID NO: 48438 - DNA, 410 bp, Homo sapiens
gctagtggcctttgctactggaggcccagtggaccatccttacgtggccactgagctcttaggggatcctaaaatttgcaggaggcagtcaggttgccaagtctatttgcaggtatttctccacccaccacagtccgccctacttcctaatcatgcactaatcctcatgggggctgtgggagctttaattaccaggcaaaaatgccaggcatttgcgataatagagattgcttaatgcaaactccagcatgagggggtggactgataggtgcgtgggggaggggccaggaagaacatggctatagtgtctgcgtgtgtgttcccggcagacctgttatgcacagaaagggatcaggaccctgctggtcaagggccagtggctaccaacgcctgtgggtggcctttcctgc

SEQ ID NO: 48439 - DNA, 567 bp, Homo sapiens
tggcgcctttcctgtggcccttgataagggtgatcctgagtgtttctctggcattttctgtttaaggcctgtctgaggttcagcaaagtcccacctccccacggagccctccatgataagcacagcactcgcgggtccacctccctgtggcctgctctgtggggagcccagggttggcaccattcctgggccctgcccctcccctcccctccccagcacaaggactgaccctgaggagtgctattaataattatatcaggacagttttgtaatcaggaactgccgtgcacgggaactgtagtctgcgggaggattgttctgttactgattgatctcccaccaccgtgcccttcaaactccgggttcagatccttggattgtatttgggggttggagctcagatgaggggaatcctcttggtgggctggagcagtcgaaagcttcttgaagggggaggattgaaactggaccctgaaggaaagtgggtgggaggaggggcagagagcattccagataagcagagggtctgggttgtcaggggcaaggggcctggggagtctgggggtg

SEQ ID NO: 48440 - DNA, 670 bp, Homo sapiens
ggggtgggagaacagtctgtgagtagcacagaaggggcatgagccaggcaggagagtggagctcagattcccagggctgtggggctgggggaaggtggggtgagggagctgccagggggccagcaaggaggcattgaacagagttcagaaacgtttgtccatctaggtggatagaaagggtgagcccagcctggattggggtgcccctttgggtgagaccttaactggctgagacaggagaaaaggctggaggggaggtgggtgagaccagaaggcatgaatgcctgagagggaggtgcctgcgtcaccacagtgaaggggactttccaacaacggccttctttcctctctccccaggtgctgggacctggacgacacctccccctactggtggatcatcaaagggcccattgtcctctcggtcggggtcagtccctgggccagtgccctttgctttattcagtcaacttccctggaactactgacgggctgtgcacagcaggaaatgcaactccaggctgggtgtcttgaaaactgggctccagccttgctctgccactgattctctgtgaggccctctctgggcctcagtatcccattggtaaaactagaggggtggtggtctccatcagcatgcaggctgttccagctcaattttgatgagcctaat

SEQ ID NO: 48441 - DNA, 1190 bp, Homo sapiens
agtaccaccctgaagaacagagcaaaccataaagatctcacagaggaaggcctcccctggcaggctaggttgaacactcaatgggcttatgatcacatagccagaatctggaatattagtgcaaaaacaccattcttggacgaaggaatattactccaagagagggatagtgacactaagcagaatggtgagtttttgttacacagctgtttaaaactcgatgcactgttatctgtgttatataacactttgagaatgatataaattggacatgttattaagaatataatcatgtaaacatgtaggtaccttcttattactcttcaactgttgtcaagcaactgccaccggttccctcttactgtaaccctgattcagtgtccaacatagacctgtacagaaagaattggaagtctacagctttaaattctgagatgttgtcctgaatatctgggttttaggacaactcaggtgagcaatcattacaaatgatggaaaagttgacctttgttcttctctctctcatttgccacgtagtgctctatgtgcaaccgcacagtcccccatctctctgtttacagaaggactgggcttgatgtttttttcagctttcggaatcacgtggttttctgccccacattgcttaggacaagctggaagggagagatcagagccccaccagggctcctcagtgtgattccctcctaatgatccttttccaatcagaagggagtaattttcctccgcctcattattttcctgcctagctttctgccctttgaagctgagttttccctgccattaacaaataactaggaaagtatacttactagaacttcttactaatctccttgtagttttatagctcgacctcttaccaaccttttgacacatgtgatttcttaaaggggcaatgcctgctattttctaaacttcttaaaagacattcaaagagatcctacttccttgtagggttctctgtagaaactgacacacacaaaacataactatgtttaattcttgcggtggggtgccttttaatactgactatatgtcagactccatatggtagcctggatacttgacattcagcgaccaaataagaaattagcatttcaaactgatacgagacacaaatcaaactcattctcatcatctttgacagggatagcacttggtaaacccatagg

SEQ ID NO: 48442 - DNA, 1647 bp, Homo sapiens
tcttcctcactcagccagctgcttttcttcctagctctcccacattgccagaggggggcgggaggatacatctcctgttgcaatctctcgttccaatatgaatttgtgaccccggaaagactgtgcgggtttcaaaagctgtctgaaccaagattctgagcaggtgcgaggctgttctcagtcgggcagcgggtcaccttggagcaaggatcaagggagaaagatgggggcggggggtgggggaagccacacctattctgctagtgatttaacaggatcgcttaaaaaaataagccaaaaaggccagattcttccatttccagatgcttcttcactttctttctgtttgctcggacagggtgagcaatggccgggctcttagtgtctgaggggccttaaagaggcctggcagtcccggacacagtgccagggaaagcaggttttgtgcgcatatgggaggaagcaagcgcgagtcactccggtgcagagagacaggtagaggggacagacggctgtctagtttgggcaaatttccctctacctggggcgtgggggcgcagttcctcctctctttcgggccttttcccccgccctctggggtttgaatgaacaggtgctaacacaccagcttagaagggcgcgttcagcacccgcgccagcagctgctcggcacctttgcccctcggtggcggctgccttgcgcaccaaaggcccaggggcgtaaaactggaggcgtagagggagagggagacgctgtcctttgcagaatggggcgcgggcctcgcagcctcggctcaggaagtcccgccagccgtgggaggagcagggcagggtcagctctcggctgcacttgggcaagagatagctggagctatcgccgcctgcgccgcgtccctgcttgtggcacaaggggcgggtgaaggggcaaccccctttctccctctccgagcgagtgcggggcagagcctccaggcccgcgcgcggcggtgcgctcgccgctctccatgccacccagcccctttcttgggcaggccaggtcagtgtgggcgccgcggcccgggttcgcagggcgcagtcccccggcccccagggcgcccactgcgggcgggacacgggcagtgcagcctgtgcccgggcggccaccgaggcgacgcaacgccgccagcaacctctccccgcgccgcccgccaggccccgtcgggcctgcgccggctctggcggtgcccacaaagtccccgaggggcagcgttggccaggcctacccaagacctgccccgtcccgccaccactgcacccactttctgctgccctcatcggtctgcgcagctgtccccgctcctccccctgaggcaaaactgcaccagaaggcatcttggcgaggtcattgccaccccgcccatgattgtagaagagactcaatcctgtttaagaggtttagctccccaagcgctattaaaaataagtttttggtggcctttgtaaggaaacttttaatcacacagaatttagcctctgatcggccagacatttaaccggcgcagagtaaaaccttccatttttaacatccactctggtgtttgttggaaatttgccaccgattttaggctcgagctgaaggttaccaggatttatcattgtttccccagg

SEQ ID NO: 48443 - DNA, 365 bp, Homo sapiens
ctcggtttatggtgggaatattataagtctgatttcagaagcacataaaatgttgaatcccaagtgctttaaaggagatgtaataagtaatctttttgacacatgcatttggagataaaaggaaatgtctggtctggagacaagaatttgaaagaattacctgtgtgtaatcagtgattgaggtcttagtcatcaatgagatcacctaagcaaagaaaatacgggagagagaagaaaagaggcagccaccaatccttgtagaatagataggtctgcttgtgtgactgagaagggctgggggcagagagctggggaagaagaacctgaactatgtcaggaacagatgctgagggaaaagattattt

SEQ ID NO: 48444 - DNA, 1595 bp, Homo sapiens
tgcttccctttcccaactctgtctatcctctgtgctctgacggtagcttgaacatctctttagctagcctagcattatgtggcatgatgtctacttgtccagtgttctctcctccactggcttgtgtgctatttgaaggcaatggctatggtttatcattgaaaaatgcccaggcacggtatctagtgtatagatactcagttactacttattgaatgaataaataacaaacagagctggtttccagattcctcatttaaggctcattccggaccagggtgttagtgtcactaaccaaccacatacataacatggtctatctaatctggggatcgtaaacgccaggctgagaagtaggcctactacctataacactgcagaggcgggctcacaacaaagtaggccgacgacgcgttcactaaatgtggaccttttccagtgaaggtctggtttgagaagtcaaagtccttgcctggaggagcccgaccacgttaaagagcaggtgcggcctgctgtcgcgaagacttggagctcagagtcgaaccgcatttggtcttatacatttccccacactcggccagggcctgcctcggaacagcccctcggcccccaatcctgaatgtcagctccctgttcctgctccccaaaggacggcgattacctaagggcagcagctgcgacgggttggtagtagcgttagccgccatggctacgccggaagtggcctgccttcattgatggtgggacgactttgaaaagcgcgcttccgctttttccgcagcccaaacaggctcgaccaatctgaggccgagcgcacgatctagtcagctgcgtgggtcgcgttcactggcttttttccccggcaagtgagatccggtgaaatatttcctgcccactggacattttaccatctcggcagatacccataatgcccttgaagttttggagagacgttgaagatattttgccttgtgaataaattgttcctgtaacgtttgagtcttcttcccccgtaaagttgcatttcctctcaagccagaatcttcaaaccagtataaatcaattcgtatttcctgccatcaattaactgttacaattttcgttacaactactcattaaggaatctattgtttctttttaaagtccagtggattgaaaatctgcaactagcattttttaaaatttttctttagtgaggatttaagatatgttttttaaactttttactactttaattcatcgttcttatctttttatgtctggtagtcttatttattataggcttttaaattcagtttcttcaacaattcttgtctcacaggcaaccaccagatgtcactctaaattattccagaagtgtaaaatcatgctttccacttctgtgttgaaaacagcaaagtatcggccctagtctgttttatatttgtatcctaggaacttaaacctgaacagtctaggtcaggcgcagtggtaacgactgtaatcccagcactttggaaggccgaggcgggcggatcacctgaggtcaggagttcgagaccagcctggccaacatgggtgaaaccccgtctctactaaaaatacaaaaattagct

SEQ ID NO: 48445 - DNA, 1852 bp, Homo sapiens
taaatcttttctataatgcactttaaattgacatgagattcactgcttaaaaaagaattgtagtacaatcagtaaaggaattaaaaaaccctggtgacaacagagcccatatattttgtattgaccagagtactacacccaaaatgagatggaatgaaaagaatattcttataaaatcgcaggactagaataatcattttacacgtatccaagtaaacttcctttgttgtcaaggatattctgtttcaggttttaaatgcgtctcagattcctacacataatatttaaacgaagaaaaaaaaactctagaaagaaacaaacaagaattctcgagtaagcaagtaatttaaaggctgaatacacagatacgcaacctcaccagtatgctccatgttactacatatttaagaataaggacgggggccacagaggcaaaggcaaggaggtgaaggaatcggacactcggagagtgaaccgaaaagatgtgaaaaagcaaggaaaacagaagagaagagggaagtgggaaaactttgaggaaaaagagaaggcaaaagagaaggaagtgctttgagattgaatccagggaggaaaaagcaggtgtgccacgccgcacctccaggtcccgcggacaccacaggctctgcaagcccagccgcccgggtcacgtaagccccaccccgccgctcctcgtcaagtcccacccggacccgccctccccccgctcctccccccgctcctccccgccccacagagtcgatctctcctctcctagacccaccccgctcccccaggctccacctcggcctctcagaccccgccccgtcagggccctcccggccttgcccagccctgcctcgccggcggcggccgccgtgtcaggtgacagcccggaagctgcggaagcggatgagggaagggcggccgtggccctgggggcggcgggagctgctttgcctccaccgatctccctgtgcggccctcatgtgctgtgctcgctgacacccgaagtccgcggctttccgcacacggtggggtcgtcagacccgctgcccttggcggtcgaagtcgtcgtgcgggcccgcggcggccgcccatggagaaggccaggagaggcggggatggcgtcccccgggggcccgtactgcacatcgtggtggtcggatttcaccacaagaagggctgccaggtgaggaaagggcccgcccccgcccccagccgttcgggcgttcgccccttccggggcccccctgccctgcttctgtgtgctcagctcgcgtcgtgcagtcctccccacagcgcctgcgacccttcgcctctcaacctgactccttttgcagctcctcccacccgccccacatgaagcccagcccccacaacctcttccttctgcccctgaaaaatggttgagcagcggaggagctggttgatacgtgtaggttgtaggtttttaacttctgctttggtggagtgggaggaaagcatcgaagaccggccccactctcttccccgtccatcattgtctccactggctttctgggtgtccacctataatgggagtctagaaaaattcagtgcttggactctgctttcaaggtaataggctcagtgggcttgcatactaatgcttcaggtagcttgcagcacatgcagcctccgtagaaaaatcagcttcctttgtttatctgatggaagccttggaatctctcctgttaggtacggttgtcgattgactttgcctcccccttcccattggtccttagttttgctatttcatcttctccagattttgccttttggtgagagattaatctctccatatcaaccgcaataagagaaagtgtattaccaaacc

SEQ ID NO: 48446 - DNA, 694 bp, Homo sapiens
gcagctggtcgtagtttctccttactgttatagcgctcagtaatcatattgttgggtttttgttgttgtttgttctggtctttctcccatcagatttgaccaattctgcctgacttagtcaaatctgaataaaaattccaaattgtagggaacaaggcctctctgaattagctaaaattccttgctgctgcaaaagaaaaaaaaatcaatttctggttgcttcctgtctttaaaaaaaaattgttctttcatttacttttctctaccctattcctccttccccactttgccatactcagtacgaagaaaaatctagagatgactcaaaccccttaaagaacacagaacaaaggcaccactcaccccatttgggggtgttctgttttctttgtggagtttcaagagtcatgggcagattcttcttaggtctaaagttctgctttcctgtattacattacctcacctctttggcttttgtgagtagcagagattaccttgtactgtgagaggattttaccttgatgtgtgtactggcggatgagagctacaaagttaaagctgactgaggacagtttacaggaagcagtcttcactgttttgttttttccacctaggaagttgtttaggatcctaattctaattcagaggtgcattctacagagtcttctccattgcctttcctctcaaaattaat

SEQ ID NO: 48447 - DNA, 570 bp, Homo sapiens
catgagttacaagactgaaacaacccatcaagtgtctaagagaacacatgaaagcagatctacactgagatggtattgctctgaaatttcagaaccatagagacaaagaagatattctacaatcttccagagagaggaaggggaagcaaaggtcacatacaaaggtttagaaacccaaataacttcggaacatctgaatggcaccatctgaagcaaccgacaatgttttcaagtctagagttcaatacttggccaaacagtgaaccaaatacgaaagcaaataaagacattttcaaatatgcaaagtttcataaatgtttacctcccagctatctactctcaagacctacttactagaagatgaagtctaccaaagtgagaaaataaaccaagaaagaagaacaaacaggataagggcacaggagatccaacaggggagagcagtcaaggaaatcccaatgagatgccaagaggacagatgtacacaaaccatggaaggtagccagtccagaaccaagtacttactgactcatgcccaaaatctccacattttatttgtgtgagcctgga

SEQ ID NO: 48448 - DNA, 1224 bp, Homo sapiens
ctaggtttgtgcctgatactcagtttttcaaaactaaacacaccatatttaatatatacacatgagtggcataatcataaagaaaaacaaggaaaacattggtccaaaagttaggatgccatttcctctgagggttgagggaaggaaagagaatgcattaagaaggaattttaagggtatgaaagctctgataatttatttatttttttaatctgtgtcatgggtatgtaagtattcattttactaatctttaaaaatgtatataaagattttacacaattccatagtcgtaacattttacacataaaaaagtattttttttactagttatttatttactgggtcacagataatacactcatatgataacaatgcataaaataaagtaaggaatttcacacagctgtttctgacaagagcctcaacataaactgaagggataatttaaaagttccagtaaaagtattgcatgcggtacaataaaccaaagtccaagtaggcagcagtgactgggcagctatcagtcaataatgagacactccacaggggcattgttctgtctgccccaggatgactcatcagccacactcactgcccactgttttctccagaagacctcctctgacggcacttgatctagatggaatcaaaggctaaagagtctaaaaagctaatgaggtattttgggggcaacctcggataggatactgaatgggaaagaactcaaagattctaacataagatctaaaaatcaacttaagtacttttataattctaagacatttctcttaccttagggaaaggaatttttgtctatccttcagctccagttttaaggagagtagtaggaactctgaagacagaggcagcagtaatcaggggagaacgctacaaagaaaatgaagttcaaaaagacagcaccagagtcctctctggccagtcacagccctggtctgtgaaaaccctgggtggtttcatgcatcatttcaccatcctaagattcaaaacaaatcaagcaatcaaaggcagggctgctaagtaagcagctgcacaagcagagcagtgggagtggtgaatgggaccagggcctcgctgctggggagaggaggaaggggtgggagactagatgggaatagcaaagggacccaagggaagtccagttaaaaagttttgttggccgggcgcagtggctcacgcctgtaatcccaacattttgcgaggccg

SEQ ID NO: 48449 - DNA, 3262 bp, Homo sapiens
gccacagcactcccgagttactgacagaaaacaacctcttgaggattccaggccccaacctaaaagggcttcaataagcactaagccaacagaagatcaaagtgaagaagtaagcttaacattagttatcagccagatggaaagaatagcaaaattccacatcatcgagattagaaaacaaccgactggcttttcaatttactttagatcagaaaaaaaagtcggggaaaaaagtccttatcaaaggttaaccaaactaagtcattcacaattacaagagatctaagacccatactactcaaattcggcaaaaatgtacaactcagagggaagagggggaagatccctgttaattagttgcctcgataaaagaaaatatcattttggtcagtgcacagcgttgatagggtttcgtttctcaatgcctaaatgctgtgagcccgacgtacagattcaagtataaacaacacgtgaccagtcctgttgcctacgtcttcataaggctaattgacacagaagatagttcacacacacacccttttaaagttcattttgtattttgaattcttttcctattttcactggaaggggtcaccgtggtagcccgtgggatggacgctcctctaccttttgaggcaggtagagttcttagatagctaagcccaagggaaaaaaagatgttaactcaaaataaccgccccacaccaaactaagcgatttttctattccccggttgttcaatccgtagggagaaggaggtggtcgaattcaaggaagttaaagatttcacaaagtaaacacgtacacaattttccgtttcaaagggcagtttctgctttcttttttaagtcgatatagaccataacaggagctctgttcgtctagacctctcttggttagttcagatgtacgcggggggaatacagaaggaagggggtgtcctccttcggcccaccatgtcgcgaacacgtcgcgagtctttaagggaaacagctttacttcggtaagggcgggcgcgagccgaggccaaggcgccgcccgggagccccgcgggcgccgaggcgcccggtgccggggccggaaacgcccagctagcggcgtaccgggccgccccttccccgcggacctgcccggagctccgccgccctggggccgccgcggggtgcggagggcggcgccggccgcccgcgcccctcccccgcccgcggcggaagcgtctcgggtttgaaagatgccgcggccgccgcctcccacccgccgagccacaaagggccgagccccctcccgccacagccctcctccccggcccctccacaggtcgccgcgggctcccagcctgcccggcgctactgtcgcctgctcacccgcgtccctcggtccggaggtgtgggatccgctccagccggtggccccgtccacactgggcccctccggcgcggcggcgggggcgtggccctcccgccgcggcctcgcctggggtctcgcctccgcctccggccgaggaaggctggcgccgccgcctcttccttccggtttcccctcgcaccctccctcgcttggtccgtccagcgcggaaagcagcgtcctctgcgggcgccgccgcacgctcctcagggcccgaccaccgccagactcctcccccgggagccgcgccgcccgcccgcccgcgccgccttgtcagtccggggccgcgagacgccgggcccgccgcccccgccgcccccgcccccgcccccgccgcgcgctctcgcccccgcccgcggcccgggaacgcgcgcgcaatggaccgctggccagcctgccgcgcccgccctcgccacgccgccctcccgcctcgcgcgcgcgcgcgcctgtcggcaccagcggcagttttgcagtttcccgggtcctcgcgaccgtcccccgcccctcccttactctagctgcccccgcccttttcctctgccggatgccaccggaaagccaaaacaattggggccgcgcaggcgcgaaagaggaaacggaaagagcaggaagggcgggggcggcgcgaggtgacgggaagcgtaattgaagggggttcccgggaaaggtcatgggagagcccttgaggggcgcgtgcgcggcagaggggcactccgagtagccgcggcggccgaggccttgggcctagacgggcggatggagaggcccgacaagttcattgctaggaaatctagagagcaaaacaccaattgttatgctgaaggaggtgttttatcccttggaatttcccctgaaatacagatttttgcaggctggctcggaaagtgggaatgagtaggactaaacaataccagaccgggggcaggagaaagttgaggaggcgttgggcgggtcgctttgttgccgcagcacctcttctccaaaccatgccctcctctctccagagccgcttcggcttttcccaaggccaaggaagaagtcagagcagcacccaaaagggcccgcagttgggggaggttaggggaaaagggagagagagacatctgggtgcggacggcagctccagcgtctgaagccttccgttgtgtgctgcaatgcggcggctgcacgcccccaaccccccgagttccaaaagagcgccttcagcgttgcttcgcaaagcgaagcgtttgtagcagcagctaatggctgtggcccgtactgttttagttaacttggcacagcttgctggcaggcaggctgtaaatttgctaggagctattcgtggatcaaaaaattgtcagaaatgcccacacagactccacctaccttcctaacttacagtcttggcacaagcccaatctagagaatatagatgactaattataatctgaaaggccatacagtacattactgaagggagcctcttcctgtaaactaggctagatcaactgaatgcacaccaagatgcgtgttatcaggaactactgataaaggattgttttactgtagaatctggaaactacattcaacaaatcttcattgagtttccagcatgctaccactgtacttagtctaattaagtagttaagtggtatgatatcaaacaagctatacaaaagattaaagtcatttaacacacacttgagcacctactttgtgccagattgggtatgagagatgcggtctaaacatgcagacaacaacaacaaatgatacctgcggcaaggagttcgtgattcatcctgtgggcaacaaaaagccacttaagatttttaagcaggagaatatcttgataagattttagagaaaaaattct

SEQ ID NO: 48450 - DNA, 1716 bp, Homo sapiens
aaagagagctgcctggagacagcttttatcacctgggagcctaacaaagcaacctttattcatcatacattttgacccttccataatttgtctccaccacgccccaaaaggcccatgctcctattccctggcccttctttcagtctcccacttttgtggccctccagtgcatgggtatgtaaaaatagtttttctcttgttaatctgtcttatgacaatttaatctgtggcccagctaaagaacctagaagcgtagggggaagccatatctccctcccccacctttgaatcttctttacaccacactctcccgggtcatctggaccctccttgaactggagccacgggagcgcaaggcctcccaagtcagggcccgaattccgcgtggtgccaaacggcagctggctccctgaatgcccaccctgaaccctggtaaaaaataaaaaaaacaacaacaaaattccctccaacccggagaaaacaagtccgcctctgttctacctagcagcgccgtggccagtccccgccgcccattctctcttcttccgggcctcgccacaccaacactgcaggacccgtgtcctcgtcccttctccgtagcagaggatgaaaagaacggggtttctccatgtcgcagtggcccagggaactcagaggtggagcgcgggggcagcgtgctcggttgaacttgcctgttcggtccacaaatgccgagcaagcgccaataactcttggcttccccaaaagaggcgacgcccacaccaaagcgggggcgaggagcgcaagccgctgccgcctccccgggccgaggcccccgcccacccgcgccgcggcctccagggcccctccgtggccgggcgggcctcgctccccacccagtgaggactagaagtcccgtcgcaggcactaggttcctcacaggcccgcacccctgcctgggtcctgggggcttggaggacccagcccagcgcccaacacggcgccgggcgcccctgttcccagaaaacgggcggcgcgcggactgcggcccagacggctgctcgagactcacaaggactccaggcgcttgagctgctgcagctgctgggcgtcgtgccgccgccgcttctgctcccgggcccgctgcagttcctgatccagcggctcccgcggccaccacgcgcccccagccctcgcatcctcgcgccccggccaggacgacatcgcggcacctgcggcgcggctctggctgcggccaagagggcacttcctccgtgcggcgccccttcccgccgccgccccgcgactcgcccgggaggggccccgaagtcccggcctcggccgccagatgcccgcctgcccgcggccggccccaagtcagtgcgcagagccccagagcccagccgccggtgggcggggagcgcccgctggcggcggctggagccgaggcggggcggggccctggttgggagcctggggaagcttccaggagcttcagggttcccgccaggccacactcatctccctgcccctttgaggttcccgaccgaggcaaggggtcttgtgcaagtcaggtttgtagatccctagtgaccagacccacgggagctgctcattacatagcaataggattcagccatttttggaagaaagcaatactctgcatataaattctccaattttcagatcatatgatccatgcttaaaacatagtcaatgtatattgtatttagcaag

SEQ ID NO: 48451 - DNA, 1463 bp, Homo sapiens
tgtaactaagcttaaaaaattaaaatctaattttccctccctctccaaagcagcaagggaaaattggatccacggccacgtaggagcccctcacggcaccaaacccggtgtctccagggacgggcggagaccagcgggtgggcttgggcagtacgcgcttttctcttccgactttgggccaaagccttgtccggagatcacagtgtctcgctcggggacacgccctctctaggcccagacttggtccccactggagttcccagcccccctccccgctgcggcacgcacattcccaatgccgggcggggcagggcgcagcaggcccgccctcggcgcgcggccaggctgggctcctcccctggagctgcggccgggagggcgggcggccggggagacggggtggcggctgcagcccgggtagggccaggagacccggtccacgtttgcaaacgcagccgaacgcccaggccgacccgtgccgcccgagcgccgcgctgcgtccgcgccactcttctcgccgccccgatggcgttccggggctggaggcccccgccgccaccgctgctcctgctgctgctctgggtgaccgggcaggcagcgcccgtggcgggcctgggctccgacgcggagctgcagatcgagcggcgcttcgtgcccgacgagtgcccgcgcaccgtgcgcagcggcgacttcgtgcgctaccactacgtggggacgttccccgacggccagaagttcgactccaggtaccgcgcccttggcgcccggcgcggcctcagcggatgcgcgtccctctctccggacaggcctttccctcctgccggacctcccctagctccgccccgtgcagccgcgctcctcccttcttccgctgcccagatcctcccggaccccagaccctccgccgcgggtgagcctcccggccctcacgtgccctaggctgccagccggggactggacccttggaggaccttgagcagcggggttggggcagaccacgtcctccctttcctcccagcgcatggacacacgcaaaatcagtgtaaaataatcagtgtaagtggaggccacgttgcacaactggacccccaagagtggatgttcgtgcctgcctctcttcgccctttcctgttccttccctccgctcccttgggaatctagtcagatggtgcttctcacacagaacaatgatgaagaggctagcagccccaaacatacaatgagctgttaacaatgtgtaggtgtagttctaagtactttccatattgtagtgaactcatttaattgtacagcagtcttgtgaggtaggtactatcactaccctcattttatcagtaaggtaacaagcaactgcggctaagaaacgtgtttaaacaatggagtcagattgtttaatccaactccagagtctgtgtgcgcaactaccactgcccttcctttcctgccatacaaaaacctctctt

SEQ ID NO: 48452 - DNA, 1647 bp, Homo sapiens
ctacaggtgcccgccaccacgcctggataatttttttgtatttttagtagggacggggtttcaccatgttagccaggatggtctcgatctcctgacctcatgatctgcccacctcggcctctcaaagtgctgggattacaggcgtgagccaccgcgcccggccagacctatcaatatttttaggaaagcaaacccaaggtaaaaattgtgtaaattaatgcaataatagttaaaaaaaatcttttggcttgttttccttcaacagtctgaataactgtggagtgaatacactgctacttgcctccacaaacaccttctagagggctctaggacccaagtaacaacattatacaaagaggattaacattgtttatatgtcagggaattcctatactgcttgtgttcacgtaagttaaaaaaaaagtcaacccaaacaagaaaataagttttagactggtttaattctatgtatcaaagagatatgctcaattccaatgaatcaagtgccaatccttcaatggatagaaagagctgttattaggttgaaccatataaaactggcaatactggactatatttgacatataaaaacaatttcatacgcttcaacctaagagcaataactaaactgacgatgacttaatcaccattttgagtcaactttcacctttgatcctacactggttgggggaaagatgaacaagagatttattaagcgtgacaaaatgctgtgtcacgctctagtttataggccagaaaaaagctagagagaaagagaaagctgaaaaaataaatggaacagaagaggaggcacaacaataataagaacacaaagagaaaacaagagatcatgaggcagttgttctctttaaaagaaaggattatttttaattgttgtttttaagattttatcactgtgaatatggagaacagatgtaatttctttccacacatgcaaataaatatgccagttacacagttaaaacactcactaacgtaatagagtagatcaatatttaatgaatgcttaatctggggttactaggaacttgacgttttcactgagtatgaataataacacatagttggcggtttcacacccatttcttaaaggtaagattactgctctcattcagggctatagaagctaataaggaatgagttttttttttttttttttttttgagacggaatctcgctctgtcgcccaggctggagtgcagtggcgcaatcttggctcactgcaaccttcgcctcctgggttcaagccatcctcctgcctcagcctccagagcagctgggactacaggagcttgttaccatgcccggctaattttttgtatttttagtagagatggggtttcactgtattagccaggatggtctcgatctcctgacctggtgatccgcccgcctcggcctcccaaagtgctgggattacaggcacccggccggaatgagttaagatacgaagccagttctgactccaaagcctgtacatttcctatctcatcctagtatatataatgcaactctattgtcatgcaagtaagtattttaaaaatttctgaatgcttgtcatttaaatttggaaacctacaataatgtatttcacactgtacgatttaagtgtgttattgctgagca

SEQ ID NO: 48453 - DNA, 2017 bp, Homo sapiens
actacattgataaggtaataaaattgtgaatgctaaactgtgtattactcacataagaaaaggcatatattaccataatatggacacagtatccgcaacagtaccaaacatcaatttttcctatactttttcagtaacctgtactatttgactttcttaagcttgggttttttgtttttttttttttttaatgttactgtcttcgggtgattagcacatgcaaaatcaaactgtaacttcatcttttctgtatggctgtaataatttggtggggcatttaaataattcttcctaattagattttcaactcagcggtggggaaaaagaaacacacacgctgcaaagtgaaactttctcaatacaggcataaaacaaaaatgaaactaaatagcaaagagtgggaggggtagaagagatataggaggaaagaggaaaaaacagatttcaaaagctagttatttaaaaatgggcaattttaaccaattttcccaaatggtaaagcagctactgagtcagaattttgtggatatttatgcaaataaacaatttcaatgtttagaatttattcctctatccttcccacattcactacctctaatatctaatagcattttttcaagataagtaaaccacatacagcacatggaaactaagtaatttatactgacaacccttaagacaccctgagttcttctgtccttgaatttgtcctaggacaacagcataggtgacaagcactacccagagatgccgggcttggatgcaggctgccaataaaaactaagcaaactgctttaagaaatgatctgcagcatgatctaacttctctgatttaaaggaaaaaaaaacctataaaatatagataattcaattatttaaatataacttagccataatattctaggcttttactgtaatataaatttttgaatcttaattttcaatatataatttgttataaatcagtaatctagcttttatcaattcataaaacataccagtgataatcccattctataaaatcctgggtaaagctcacatgcacaaaataaaaattgataatctttattactacccataataactgttcctaatcctagtaacacaaagcttgtggctgtcagtaaaactgagtcacatagccaactgaatgaacaaccaaattgaatcttagagtgtttcccctcaacctggaaagagacttctgaaggtactttgctttttctcaacatctacaggtgaaacaagaagctcttaaaattagaacatataaaatgtaatttctgagacctaagactcttcaaagttttgcacattcatttcttcacaaattataaagaagttttgcattatactggaacattattttatttcctaagtttgtatttcaaaatgcccaaaatttcagtaagttatagaatcaaataagaatcacataaagttagacaagagaaactcatttacatgaaccgtacacacttaccctgaaggtaaccggacgagctacaccagcaaaagaaaattcttcctgtctgagaagtactaatatagcacaaggtgcaactgagggcggttccaaaagccttgactaagccctatgcaaaaaccttgtgacgcactgctgcacagtactttatatatgctcttggttacagcctcgctagctctgagctagtcacaagtcaatctacataacattatcaattgaagttatgtgacgattaaagagaaggtaaatctgtactattagaactggcaactggctctggaaagaaaagaggaacctctacactaacacttaaaaacattcctttccacctggtttgtcagtggtttgtcagtgtacttctgatatgtgaacttttctgtatattctattttaatacaaagttaaaaagattaggttgctgttgccagggctggaggaggaggatggggaattattgctcaatggatagagtttcagttttagaagatgaaaagagttctggagtggacagtggttatggttgcacgg

SEQ ID NO: 48454 - DNA, 896 bp, Homo sapiens
attggtgtaattttaagagaaaaataatacttcctccctttttatagataaagaatctgaagtcaggagaagttaagtcacttactacttatgtgacttaatgtacaagagttgggacacttttttttttcttttttttttgagacagaggttcactcccgttgcccagtctggagtacaatggcgctatctgggctcaccgcaacctctgccttcccaggttcaagtgattctcctgcctcagccttcctgagtagctgggattacaggcatgcaccaccaagcccagctaattttgtatgggacacattttgaaccaaactatatcaggctgtctctgggcaacacataacatgagagggcttgagaagtctatgaatgagtaagaatgtttaaaaaatatgccacaagaaaggaataaggacacaagcaaagcactgaatcaaagacactgaatgttgtttctaatagctctagggcacttaaaaaaattttttttgagaagggatagaaaggatatggaagtacgaagttgtaaagacaggttctttaactgcacaatggactttcacctctgtacacaataaatggggcctgttgccttggagttttatttactcattgacatagaaacagaaatcactcctatcactcctagcggcaaactctggatctgaaattcatatgtcaaagagcacagcacttgtacagaattcacaaatggaagattttttttcctccccttttaacgctgaaactggatgtctttatcaatggaaaaagggatatccatttttatttctgagtaactagttaagagctttttagatagtcaattattcaatcaacttgaaaaactaaaaattatcacttcatattttgccatcaaaagattt

SEQ ID NO: 48455 - DNA, 1952 bp, Homo sapiens
caattacttataatgtatctcaaagggaattcttgagacaccctcttcaataaaaaattaaattcgaaaatgtatacaagagctttgggagttaagatgaaaacaaagatatttcgtgggagttttgagacaagaaggaatacattcaaatacaaaataaactatcctgaatttctcctggattgccattcttgtaaaattttagatattgcacattttcataatctaactcacggcagccccaacataaaactagtcctctgcgggaattgcaactagattagcggcaacggtttgacgcggatccggggggagggcgggagcaaggcagggagagaaggagccacctgcccaggacatgcagcttatctctagagaaacgggttttgcagcacaaagtagcctgtgtccgattcatctattttctgccttgttccttcaaacggaaacctaacaaagaccacgggcagccaagggccgcagccggggacccaaccctggtcaccaagcccgcggagtggccgcacgcggggcggccgggtcccccaagctgcgcgtcccgagctagcgagatcccagcctgacaggcgacgccggcagctccccgtcgcgaccgaacagcggcccagcacaggctgccgaggccagcggacggcccagccggcccctcgcgtgctctgggcgcgccgagcctccacactcaccatctcgatgatcttggtcttccgccccgtcttcctcttcaaggtgaatatgtactgagccagcaccacccccgccaccagggcgcacacgctggcgctcgctaccgcgcccaccctcgccacggccgcgcggtccatggacggggccctcatgcgcgtccaagcaggaaaaaaacaggcagctcgcgtagactgcgagtctcggaagcgcgggatcccagagcatcacggacgagcccgcgacgccccgccccgcgcagcgacgccccgccccgcgcagctccgcccccacgaagccccacccacacgccatcgatgggagaggccaggacgcggcgggaggggtgtggcctgtgcccggagcccaggctggaggcggccttcagcagactcagggtctcacgagctgctgtcagggcagggcagagtattgcggtaattatccttctctgctaatgaggattaggccgtggttcgctcgagccccgccccagtagaaatctaattccaactgcggcccgctaagaagtcggtctccgccttcgcgcctcagcccctctggactccgacccccagaaggctgcgcggcacggtgtgacctgcgcagtggcgtccgttctaagtgctataacaacagggggaagatggctcagagttaggctggagaggggcggtgtcccttccgccgcagccgcggggtttctgctacatcccattcgccacctccgccatccttttttctgtgtgagcagaagggcttgcagttgttctctcctgcctagtgtcttccaagggatagatgccatttcttctgctggtctctgggggtgaggaggggcgcaggggagcttcttgggggaatcgctccaactctgtggagctggtggtgctgcctggtggggctctctctgcccaggacgtggaacaactttcagccggaggactagaggaaatagttgtaggggaggaaaaattgtttccttctagccttttaggtcatttggctggtctacaaattaaattgatgtaagacagaggaacatgagaaaaacgatttgtcgaccgaaaggtgaaataacaggtactaaaacttaaagaaatcatggttagttttattactcggccaagtttgaggacttaagcctgggaacacagactcagtatagaccgagaacgtgtcccaaagtaagttagctgggagtataacctgaagaagactgagttttaatacccagaatatttgagtat

SEQ ID NO: 48456 - DNA, 1264 bp, Homo sapiens
tttttttccttttgttcttattatttttcgactcgcctgttgtaaacagaaatttacacctataaaggaaattttctgtagtaaatgtatctgtatcaggaagacagctgcttgggggcaacttttatcgcctgagcgcctcatcgggataacaaagcaacctttattcaccatacatttcccccatcacccttccaaaaggtctccaccacgccccaaaaggcccacgcccctattccctggcccttctttgtctcccacttttgtggccctctagtgcacgggtacataattaaaagtttttctcctgttaatctgtcttatgacaatttaatttgtggcccagcttaagaacttagaagggtagagggaaaccatatttccttcccctacatttgaatcttctttacaccacactctcccgggtcatttggactctcctggaaccccctggagctagggaagcgcagggcctcccaagtcagattctgcttggtgccgagcggcagttggctccctgaacgccccgccaggaggatggacttcaagtccttgaccgcggcgcccgacatcggtcgcccgcaccaggctcctgccgggcccagcccccctgcctgctcgcgggggctcggaggacccggcctagcgcccaccgcggcgtcccgcgccccgggcccctggcttcagaagactggccgcgcgcggacggcagctcgggactcacaaggactccaggtgcttgagctgctgcagctgctgcgcgtcgtgtcgccgccgcttctgctcccgacgtcgctgcagctcctgctccggcggctcacgcggccgccgcgcgcccgcagcccccacgtcctcgcgcccaggccgggacgacatgtcagcccccgcagcgccgctcgggcaacccccgcggcgcggctccggcggcggcggcggcggcggcggcagccaagagagcacttcctccgcgcggcggtcgcggggcttcgcagcgccccctcccgccgccgccccgcaactcaccccggcggccccgaagtctcagcctcggccacccgatccccgcctccccgcgtcgggccccaagtcaggggctccgggtctcgggcccagccgccaggcgggctgctgcgggtgggtggggagcgccgcctagctggagccgaagcggggcgaggcgctagttgggagcctggaggttcccgcccggccacacccacctcaggtatactagcaacagtcacatagggatgagcagatgaaa

SEQ ID NO: 48457 - DNA, 1169 bp, Homo sapiens
caaaacccaaaaaactaaaactagaatggtattttctactgggaatgtggatttgtggattgatggtgaaatactggaaatttaaagcctacactagaatccattgaaaaaagcaaacaagaaaaacttcaaggttggctacattgaatttgaatgtaaagattaaaaaaaaataagtaaaaaacaaaagaagacatagatccaatcccatataccaggaaatgcactctaaggtatatacggaaaatatatttaacacatgtgtatcaggacgcaggcacaagtaacttcaaagcagcgctgtttcaaatagtaaaaaaaggaaaaactggaaactgttcaaaagcttcatcatctcgatgatcttggtcttccgcctcgccttcttctccaaggtgaatatgtactgggccagcaccacccccgccaccagggcgcacacgctggcgctcgctaccgcgaccaccctcgccacggtcgcgcggtgcatggacggggccctcatgagtgtcccggcaggaaaaaaacaccgcgattgggactctcagaagcgcaggatcccagagcaccatggacaagccagtgacgccccgcccccactaggccccacccacacgcaccgaggggagagggcggtcacgcggccgggggggcgtggcctgcccccggagcccaggcaggaggagggtcttccttaaggaactgctgccaggacagggcagaggattgcagtaattatcactctctgctaatgaggaccaggccgtggttcactcgagccccgccccagtagcaatctaattccaaccgcggccctctcagaagtcggtccccgcctttgcgcctcagcctctctggactccagcccccagaagtcggcgcggcacggcgtgacctgcgcagtggcgtccgttgtaagtgctatgacaacagggcgaagatggctcagagttaggctggagaggggaggtgtcccttccgctgcggccgtcgggtttctgctacatcccattcaccgcctcctccatcctttcctcctcggtgtgagcagcaggacttgcatttgttctcgcctgcctagtgtcttccaagggatagatgccgtttcctctgctggtctctgggggtgacggggggcgcaggggagcttcttgggggaatcactccaa

SEQ ID NO: 48458 - DNA, 3163 bp, Homo sapiens
ttcccctaatatcaatttttaaaactgctaagggaaaatgaaatactagacatgagattttttttctctttattttcacccaacaaaccatttggaatcaggtataaagggtatcaatcaggaaaaaacagaaggccaggagacagagcccaataagggagacccatcccagggagcctgggagtcagcgggcctggatgcacctcccagttctgcctcttattagccagctgtgtgttaacccctcatctggtttgctcaaggtaacatgaccatcacaaaagcaacagaaacagattatttactttcagattaacttgtgaaaatgacaagttgaatattgtcatttcagtattcaagttgaatattgtcacaagttgaaagattaacttgtgaaaatgacagttggttgaatattggtattttctgcctccaattgttgcatttgttatttgcaacttttaatgcaccataaaagcatttttgttttgttttaaaagcatttgttttaacgcaccttacaagcatttttgttttgttttaaaagcgtttgtttacaaatttgtgttttgtgacttctgggatgatttaacaacttttaatgtaccttaatactttctctgttagcttttgagatttaaaaactatttctaatgcaattttagccatttatgaaaattgatgatattagtaaaaggtaaaagataatagaaatagaagataaaataaagccaaaagaactataaagagaaatcaatagtggtaaagctgtgagtaatgcctatttttgcctcgttagtcattatttccacaaaatttattgcacaatgtcttatttcatgtttactttttgcgtgcaatttttgttggctattccttagttggtcactaaaatgttatttttttaaattgaatgtagaataaaaagttgataaatatttgcctagacggtttatcattatttgctcatcccagtagacattgttgtaccttttactcacattcactaatatgcatttacgtagtgcaggtcctttgtttcacagttactaataaggcagaagtggtgtgactgttgcaaaatatgtttacactttttaaaaagcaaggtacttagaaagggataaactatctaaacaaaaattaattaaaattaaaaattataattaaaaatcagaaaagtcataccaggatacacagacatcatcaatatgtgaattactgatcagaaacaagaaattctggaccattttactttcagttagttcatgtagagctggagataaaaatgtaaagcaaaaattattgccagacagagtggacagaactggctaaaggtaaatcaaatatgtaaaaaaaaaaaatcaaagatctgaaaagtgaaccaaaatccagaaatatccataatattttgggttgctctccaaattaaaaaacctgcaaaaatgcataaaaatttataaagagtaccaaaacagcttaatatgcaccaagatgactaatacaaacaaaaattctatgtatctggaaatattcatttttacctaattaatcatttgactaattttttatttcaaccgatttattttaaattaatgtatgtatagtcataattttctactttgtaagatggtgaataaggataaaaatagatatttgtaaagtggctcaaaatacacccttaataaagcatagctctccctatttttttagaagctaaagaaactggatggcatgccaaaaaagtataacaaaaaagtgtaacaactgaaataaacttcaggatgttgagagtttctacaaatcatctttcattctgcatgtctgatgtttgcatacttaatgaaactgtgtctttggcagaaagggaaatgcacatatagttgattcaattctaagactcattgatttacttgtcaatgtatgcaaagaatatttagtaagccttgttaaaggaagtgtaaccaaaggctcaagagcttcaaggctgtctccatattctctccctagtcatcctgttgttggcttgtggtgaccagcactactactgtgtcctacagaacctggcattatggacaacagtatcagaatttgggattaaatttatatttagtgatatacacatcagctatgccaagtaatatatcatgactctttttcctgttatttaagaagtttttttctttctacagttaataattatttcatttcccactccaaaaacaactgtcactctctgggcctgttgcccaggtgttacctgttgcatcatttgttttcccgatcccatttctcctctcttggctttactccctcattttggtgaattgtatcctctggtaacatttggggaaaaaaagtctatgggtaagacactttgttgagacttgtatatcttaaattatctgtgtttctttcttgcacttgatttatggtttgccgagatataggattcttaaaattttttttcacccagcattttcaggcctaaaattgcttctaatactggtattaaaaagcctgatgtcattctgtttcctagtcctttgtttgtgtctgttttcctttctggaagcttttaagatctctttattgctagtatcctggcgaattcatgaaaatatgccttgatgggtatttttttgtttattgcactgggcactcagtaagcccttccaatctggagtctgggaaatttttctcatattatttctttgtaattttctttctgtcatcttctctattctctctttctgggatttccctttctggaaattggacttcctgaataaagtctctatctcatcttttctattatgtatctttttttttttattctactcttggggagacttttttacctgacattttaattttttgctgactaaaaatatttagctatttttaatattcaagaagtctttattccctgtttattccccttacgtagcaacctgttcttgtttcaatatttctttgaaatttccttcctagagaatctctgaattcccttatatttatttgttttgtgtctctcttgttcctcttggaagcttttctcaagtgtttagtgattcttggctgccttttaatatgtaaaaagtagcctaccaaaaagttgattgtaattgtgtataggtgctgcttccctgtaatagcatct

SEQ ID NO: 48459 - DNA, 2117 bp, Homo sapiens
ttgattctattattttttattataaatgaaaggtcaaggaatacttttcgtattccataataggattggttctggaagaatctttgaaaaaaaaaatacgttcaagacattggggctgggaatagaacggaagcatctcaaaagcatgtttttctggttaaggaaagcacacgagaacgtttcacagcggtgctctgctatcttctctgtacccctccgccctacgctcatgggagagctcatttctctccccatcagacactgggaaatactcccaaggctctggcagtctcaaggctgcaattcctgagaccggggactctgtgctgccatctcgtggcagatctcagacacagcaagctggctgccggaatcctgtttgaacttggcttgcggcgggagctgtggtttggctcaaatccttatagagctttgttgccagtcatgttgatttttaaaaaatgttttactccctatgccccccttttagtttttcatgttggcacttcatttaatgtgcctccagaggctacattttgggttttgatgtgtttggtcaatgttaaagaatcggttaactatcttcctgaaagaaggcagtaatgcagacagacgcctttgacagcaggtagaccactggctggcaaccgtagaaagagggacacacgggagactaagaatgaaagatgcagtaaggtttattgctcttattcattggttaggttttttttttttttttttttagagtattctgaccttttccttgagtgtatttttgctaccatttctcttgtttagatctggagagactcaaactcaagctgggatttggggaaaagtgtttgaggatgccagtctggctttcagaggcatgataggcacatctctgttgatatccaaattggaacaactttccttgttaccagaaaacagctggtgtctgcagaccttcccatggttggccatgacacaggcccctggagttgctctgctttcgttagagagttcctgtctggagccaccaggaagacaccaatctcccctggggcctgagggcaggatcattattttgttctcttctgcatcctgaatgcctgggaaggcatttaaatgacaggcctctatttgtattccagatctgtgtcttgggtgaccctgggcaagtttcctaacattgatccctcctctgtaagatggcgatcattgggaatttttggtgaaaaaaatgcacataagattcttagcacagagcctgaacacacagagaatgagttcagtaagtgtgagccagtattagaaaatgtttcttgaatgaagatgtgaacggaatgagccctgaacttgagtcacagtggtgacacatagtgcatgtggggatgaggcagcccagggggtgagggagtcctgaaggcatggctttgcgtgtgccacttctctccagagccactggctcaagaacaagtgtttttgtctcttggcaaaattgggaaagtgaatggagtggtcttaattaacctgtgtttgaatttactctgtagctgctggactcaattaaggaaatggaggaatcaggctctcaccagcaattccctgagcttttaaagttttttcttggaaggcctgggattccaaagactactccacattcacaccaatcagacaccagggcaatgatcagatatggcagttctgtaccaatgtgaccgttgatagaatatttaaaaactcccagtgtaatcagggggaaaaaacccactaaacctacagctaaggtttaggtttgttctatgtgtgtgtacaaaaaaaaaaaaaaaaaaatccagatgtgaatctacaaaccatctggttggaataacttttgtgctggactgtaattacaaactatttattatgaatcttgggatcctgttatggattttgactggctcccaggtttctaagtcagcagagttcctatatttaagcgaatgtgtgccttcctatttatcagatcccagattgtgccatcactttgactgccctgagagctttgaactctctgtatctgaagattcttcccttcagagaggagatgcgcttgggagtggcccttggctaaggccgcagccaggttgcag

SEQ ID NO: 48460 - DNA, 1634 bp, Homo sapiens
cttgtatactttttccagaccctctgggctccctgttgttccttgaatgtgtcagacacgttctcacctcagttcttttgtatttgaatgttctgtccagaagactcttccccagatgcccacatatctgacttcttcagctccttgaaggaaatgaaggagccagatatgcttgaatgtcacctgcttagtgacgtttttcctattaaaatggtaaccctgctttgctcctaaatccccctgccaccagatactccctactaaactgactttgtttatttttccccattgcttatttatcacctgctgatgtgcttttttcattttgtctttctcttctttccctgccctggtagaatacaagctccattaggactgggacattgttttgttcattgctgtatctccacgacctaaaatggaacttagcacattgtaggtgctcaacaaatatttgcctagtgaatgaatgaacaaataccaagcatttgatatttctaaagacacaaaattccaatcacagtatttatcaacagttgattaacatttgggaaagtcctgaattccattctattacccaagataaatggagttaccttgcttagtttggaaaacactatcaaattgtctgtgcgttatccttgttctggtttagaaaaccctctaatgggcccttctatggtgtccaggtcagctagacttcggtgggaatctggtcattgccctcaaacaccagtactgtttgcttttaaattgtgacttgttggaatgtcagagcagactctaatttgtgagttcttgaatgcttttccttctttggaagggaatactctggaattctcaaaacttaggcactctcaagttgaagatttactgggggcagattggattacctcctctaactttacaaatccacaaacacttcaaacaaacctctcccgttcagtttcagcagactccctgagaacgttgtgaacaagaacacagggtcaaggctgaatggtgagctgggctgttgttgttggctggatctgtgtggggagcagccctaaccatggctttgtgcagccaaacagtgtgatgtgatcccccggctgccgaaggcctggcagatgacagagtctggcgcagtggccgacctgctcatcagaggagaggccagtctaatttagaagccaaacaactttcttttgtcttacttgtttttcttccaagaaggtgaagttttgaaggcctcagcaggagagaagcctctagtgttgggaaggctgtctcaagatttcatgacttgcagtatggagatgagcaaggagctctcaacatctctttcttccctgcccgcctgctctgagcccctgaacctaaagttggcaatgactataaagagatttcatgcgaagtcattctttctagcagtggggtgcttcgcaccattctcttacatgttcccagagaggaaatcaaacctttgtacacagctttagagtcaaaattcaaaatggcagtttctaggcactggttcccttttgacttcactttacctgcctgggcactgaggacaccgtgagctttgtctgcagaggatgtgcaacttggtgaatgagaacttagaattctaagtcaagaagatcttg

SEQ ID NO: 48461 - DNA, 1140 bp, Homo sapiens
cccatatgaagcattgtgggaacaaaataaaacaatataaactattttaggtagccagaacttaaaggtcaacagaaagttttaggaaaacagttcattggtgatgtcttgggtttctgtctctgcagttccgtatttgtagaagtcttgagcagtcaaaggcctccgttcggctttcttcttagtgcctatccaatgttgttgtgatgtagatagcctggggaacatgaaaaaatgccctttctcctgcataatggtgttatttccttccttttaggaatggctcataactcataggaggtgtgagttctaaatgattgttcttttcatctgcctggaagcgggccaggctgtagataaagcgtttgatgtgtcagcagtaggcttgtaacagctttgactacttccgtgatgatgaaagtttgaactttgataaaaatggcaagaaaaggaaaagggctcattttcttcctttcacttttttttgtttgtttgtttctgggcagcagttgagaaacatcctaccagggtggtctgcaaggtctccaggaatctgaaatattaggaggtgttctcctgtggatttacttgtttatttattgatcgtttcagagagggaacacccaggctcagaggcatggcaggagctggctgtcagggcccttatcagcaggccccgcctctcctccagtttcagctcagttagccctggaaggggaaagaccttgctgggggcagatcactgagtccagctatcattcagcacctgcttccacacaccacacaatctaggggtgcaaatctactcagacttccagagctttgcctctcctctcggttcccagggcatttgtttagagatctcatctgagcttgggcctatagggtgggcttatcttcctcattctaaaatagacaaagaggaaagtaaaatagctgtggacacccagaaccagttggaatttgcctcaaacaatatcgcagtctttcatcagtgatttgtgtgtctgcctgagtggaaagcctgagttggtggaaggagaagaatttctttctttttcaaagaaaaaacgtaaaagaaaacaaacacatgaacaaacaaacaaggaaaactgccattcagctaagtggcaggaagag

SEQ ID NO: 48462 - DNA, 2441 bp, Homo sapiens
ttactttaaagataatgaagtacataaaataactcaaaggaggccaatgaagtacgacttagtagagaataatgcaggaagacaaattagctatgattaacacaccagttgatttaaaaacacgtgtacaatctaatacatttaatcatccttccagaaaccctgaggaaactttgtttatggatggttcagaggctgccttccagttaattcccttctggatgagcagaatagagtctacactgatgaagttttcctctgtatccatgtcaatggagatgtttgcatttcctcataaagtgtcttccagttgaagcagagacagacctcataggaatgcctcttattttccagttaactctttcaatttgcatgagcacagactcattacctctgccaatcacattgttgtcaggcaggatcactgcttaccagcttcataaaaacatatgaccagccaggcgcagtgccttatgcctgtaatcccatgcctgtaatcgggaggccgaggagggcagatcacttgagggcaggagtttgagaccagcctgaccaacaaggtaaaaccccatttctactaaaaatacaaaaattagctgggcgtggtggtgtgtgcctgaaatcccagctacttgggaggctgaggcacaagaatagcttgaacttgggaggcagaggttgcagtgaaccaagatcatgccactgcactccagcttagacaacagagcaagactctgtcaaaaaaaaaaaaaattaccaatcttgtaagaagcagtctaaatcttgaattatctgactttattttgcaaggatcaaataggtgattattgagatagttgagaaaaatctacattatattatcagtttattcattatgagctggactttccatatctagaaaactggtgacatcgtaaagaaaaagaaaagaatacaaatggaaggaaaggtattataaaatagaagcaagctttaaactggttatattaagtaccatattgtgttaaccatgtgaatgagctcatgccttctatcactgagagaggcaattggcaagggagaaggccacccagctggaggggcactgggaggacagtgactctgcacctgcgcggagcaggtcagtcagtgctggaagggcccaggcatgtggttctctgtccaagtctcaattatatcatcagatggctatttctcaatttcctttggtgttctttccatctgtttactctctcctgctctccagcagttcttccatcattgctgtaaaatgcattctatttggcgaggcttatttgttcagattgagttaagagatgggatgacttccaatttttaagcaatgcccagtttttcttaacacattcaggtagatttattctgatgtcctttagctgtggcttcgagacctcctactttgaaatttctttgtcattatattcaggattcagaacaaacctttgggcacattttttcctcctttgtaaattatgaaagctctcttaatatacagatttctagagtagagaaagcaaggatgaaactacaaaaaagtctagtgttttctaaagccagaaaaacaactaatttatatcttattaaaacacatacactctctccctctctctcggacacacacacacatacacactcactctctctctctctctctctctctctctctctctctctctctctccctctctctctctctccccatgatgttactgcggagttttcaacctcagtcttactgagagtttggccagatcatcctgtcgtggggctgtcctgtgcattgcaagatctttaacagcatccctggcctctaaccactaaatgccagtagcatcccctgcaaggttgtgacaatcaaaaatatctccagatactgccaaatgtcccctggggagcacagttacccctcattgggtgccacaggcattccaaatagaggaaacagcatgggtgaatgcagacatgagcacctgtgatactagtagccataactgacccttggcacctgtggattagatgcagtaggagagtaaagtgagactggaagcctctgagtttaattgaatatgtttctgtattttaattctctaaccctgcaaaaaattatgaaggcgtaattatatcttgaatgattaaaaaaagttgctatctttgcttttgttgctaggaagctaaaaataaatttgtactccacctctaaaagcatgcaggttttgagtaataagcttactcctgacttcatcatatatgtccactcttacgtgttttcagctatttactttttatgtctgtaagctacttccagcccttctctgaaaggaggcaagaatacctccatgcacacatacatgcatacgtcaattaaatggattgattacagagcttcacatactctccaatttattttggttacctgtggtagt

SEQ ID NO: 48463 - DNA, 666 bp, Homo sapiens
caggcaaatgctccccttctgcccttaatgattctacagcatctacaatggaggatgcttagctgtgtaaagggcttgatgccctgagttgggcagctcatgagaatgttcttgggatccttgtgcatggagatttagaggccaggatgtggtgggaagtaggcttgtgctctcctgatcagtgtcattgtgtcatggtagagtgcccttccacagtgggccacttcttcctggaaagggcagaggagctcaggaaggagagctgggcaattctgcctgccctgccctctgctggtgatctcacagtccaacaggaggatgcaccttcatgaacctgaaagggagagtggccagtgttggccagatcctgtttctcccccttatttccaagtgcatgtgtggcagaagaagaaaataaaccaggtgcaatgtggaaagatattctcttctcagtggagctccagaaaggacctaacctcagggtttgtaggagactttatggagcaatggactgagaatgagccgtggggaaggggacagcaagctggactccagcccagctctgccactgttagcagtgtgccctggtggctagctgagttcaacatcctttatcgaaagaactgatacacagtaactacctggcaggattgctcctctgaggac

SEQ ID NO: 48464 - DNA, 602 bp, Homo sapiens
ctagacctcaatctccttatctataaaatgcatataatctaatatccacctcataattgtaaccattatatgaggtatatatttaaagtacttagtacaatttttaaaaatgctacgcatgtatactcatttgccagtgttgagtacaggaaacagcacaagacaaaacaaataaataccttttcagattacaacatggatctgcaagacttggtagagatttgaaaatattaataccagtgagaggcctgcattgattccataagtccaattattaacggtgctattgacgggttaatggagattgtttgtctttcgatatactgatccctggcagattagacctacatgggggttgtacacttctgtttttttcagtgttgtgaaatgaacctggctctgtagaaatggacttgcatcataaccttagataagctaaggaggcatgtggaaccggtctcatgaattgttccctcattgtgaagtcaactcattcctggagcccacagcccactggctgaggtcacacagtttccatgttaattttctttcactgtcctctcttggtcaccaatcttactgggcagtattcttcacaatgc

SEQ ID NO: 48465 - DNA, 547 bp, Homo sapiens
ccagtaccaatgggttagttctattccacttgctctagcttctttttgatccttgcaaaatctctttccccttgagaatgggctgctttttattctcctggtttttaatgttatagagaatcttgctgacagtcactatacagcaaggggggaaatgccatccaaggaaaaccctcagctgtcctagaaagttttcaaatgaagtcatgctcctgatgagattttgaagcagcgacctgaatttgaactgtgtgtcaaggtttccgctggctcttgagtgcagtggactttgctgggcgtgtatccattggctgtgcactgtagtttgcatttttatcatctttggtcttctcgtgggcaaaggacacctggctttataagcacaaaggacatattacttcaaattgtggatcccaagccagcatgttccaacaacttccctgcagtctgctccttccccactcagcttctcccacctgctcagtgtctgtatttgttgaaggtgagggtacggaacaggagggagagtaggaaagtggatgcacag

SEQ ID NO: 48466 - DNA, 2199 bp, Homo sapiens
aaccaggcatcttagacacacacacacatacacacacacacacacgtgcacgagcacccacgcacgcatgtgactggataccgcatgagttttctaaagcttaaagatgactacaaggacaaagagtaaacacttaattgactgcaattaagtttttgatatccagcagagtaggagtttttactagcaattaacttcagttttagaacacgacaaatcttatttttattatacaactacaaacaaatatataatgaatgctcagattccaggaccctatacctggggtgatgggtgggacgagttaaagaagggatctggacactgctgcctctctgccttctttatatggggaccgtatcacaaatgaggctcactgtgcctccagtcatgtttactgtgcagcaaggcttttggccagagaacataattgacatgcacagagctggagctcttgccagctcacagcaaaagggcctctaattcagagaaaaaggagttggacctctgccagtcatgtacctgttatgctttcatataggcatcagttagaccctgatctcagtctgacaaaccagaaaatataaaaccatcaggatcaaggcatactttttactgggagtgttagcctggtaatggagaggaatgttattgctctaagcattcgcataatatctattgatcaaacctctgtgaagctgctattcttcatgccagcgtctggcggcaagggaggactatttcaggtctcaccatcacagccacttcacactcaggccatgccacagtcaccagcacagcttgggattggggcaggaagtccccagggtgaccagacagaaagcagcctcaggacggggccagagcatgagactaggggtggtggcagctgggttttatttactctgggctgtgtgaccttgggcaagctgccagcccattctgttcctctctgcatgccatacaaccgggaattcctacattactgagtcactcctgggccaaggtttgatgtccctattaaaatgctgttgagagagtaagtggcttcagtcactagccctggagaatgagttcaccagtttgatttgtttacaactgagaactctttcagtttgtgtgcgtgaggtgctgggggagcaggtggaagaggctttgctggagtgggggaaatatcctgcctgggagtgggattggcggaagggggcatatttgtcaatcacaatagaatcctagacacttatgtctgggaggcatagcataggccattgcattcatcttccccccagtacctgaatctgtgaccaatggaactgaggatctttacttaacaacctctagtgatgggataatcacctccttctaaggcaagctacttggaaactctaagatattactgagaaaagaccctgagcccagccttgaattagtccaaagtctaatgcttctcccaggtgacagcccttgaaagagtgtgtgacaggcgccatgccccctgaatggtctcttctcccaaataaataatacctgattctccctctgcaatgttcatgacccaaacaaagctgagcctctgtgtggccactctcagtttgatgttgtaccccaaaccttcaacctcagtcttaatgcctgggaatgggggaatgtgtggaaaaaggcatgaaacacagtacacagcaaaatgtcttaacatttctcttgattctctagctccttatcccttttcctaaaaatctctttctaaatctttcaaggataaagggaagggggtagaaaggggaagtgaggagaggtaaaggaagatgttcattattgggagcctataatgttccaaacacgtgggacatttaatcttcacaaagtaagtatacccaccctaattttataaggtagaaactaagacccaagatatctaagtaagttgcccaaagtcacaaagcaattacctggcaaacaatggattcagataatgactatatcataggccaagcccaattacactcaaaataattcacatcttcctaagaggcaagccctgggggcccaagagggggttgttgagtaagggcagaaagtacaagggagacaagttgccaatcacagcttggccctgattattgtaataactgacacaattaaagttcaatttcgtatccttagaaggtttccgtcatattccaaggctgatgagaaatt

SEQ ID NO: 48467 - DNA, 662 bp, Homo sapiens
aaatttcccttctctcccatttttaaatttacatcataggttcttcttttattctgtgggttataatttgttgccatagttatttctttttatgcctagattgctgactggggtcagcaagagccctacaatttggtgcgtgtttctgttgacatgtttctcagcatttttgggcatgtcctcacttgccagcacaacatgatgttccaggcttatcttgtccttttcccagccccaggccaggaatcagccatctccaatgagccaagtaaaaccatggcatatttaagagaaagggccacaggcataatcatggcgggtataaactgaaactgacctagaaatgctgggtcatattcccaatctaccactagatgtccttccacacctcaatagttcttcacaggaagcagtcctggggcatttggaaatggtgggatatttggagttatcacaaagactggggcagcaggggttacttctggcatttagtaagcacagcccaggcatgccaaatttcctgcacaggaccatctatcctaacacagaattgccccataagtagcaatcctgttaataaatagtggcccaatccctgaactaatctatcttgtgttctagtctctcaaggattggcttagttcttttcaccttatccgcca

SEQ ID NO: 48468 - DNA, 470 bp, Homo sapiens
gcccccaaagttgtcactttcctgccctgtgaagctttaacggatttgtttagagcttagcggtcttatttcagctttctgctccctgactcgataagcctcagttcatcatatccttttgaaacattccttattactttgctggtgtcctccactcactgtctgtttgcatgggaggtttgttttgatgatgcaagactgtgcactgacctcaagcctgcgtcttcataatgtggatgattcacaatgggccgaagtgcagagagcttaacacttgccatcgtgggcatggcacccgcaaacactgcatctggaaggcaagaggaatgtctcaggaagacactcagtgaaggcgagaaggtgtctccttcaagtgtaaatcaattatttcacaggtaacagagcggaagcccagcaggttcatgacttcaagattcaatggcagaactagcatgaagtcagatggctga

SEQ ID NO: 48469 - DNA, 822 bp, Homo sapiens
ggagcccaggaacttggcaggactggtttcacaagttacaggtcacaaagaccctgctgataacacaggatgcggtgaagaagccagccaaaacctgccaaaaccaagatggcaactaaagtgatttctggtcatccttagtgctcattataatacattagcatactaaaggaaactcccaccagcagcatgacagtttacatatgccatagcaacctctggaagttaccctgtatggtctgaaagagggaggaatcctcagttccaggaattcccctccctgttcccaaaatactcatgaataatccacctcttgtttatcatatgatgaagagataaccttaaaaacaatcaaccagcagccctcacagctgctctgcctgtggagcagccaccctttcatccctttactttcttaaggtaaacttcttttcactttactctgttggagcattcttgaattccttcctgcccaaagccaagaacccacatggcctcctgggctgagccccaattctgggggttgccctgtgaagaagcgaactgcaagaaaatcttaaactcttttcagtaatcacatttttaattatacctttggtacttttattcctaacaaatcaataatttgaaaccaagattctcaaactaaaagattaatatcaaataagtaaaaaaaaatctaatcttgtttccatttaaaaaattaatataaattcatgatttcttttctctttaaaaaaatttttgtagcctaattctcttcagtaaaaaggccaaaatacaatggccaatctagtagcaatgagcatctgccactgacag

SEQ ID NO: 48470 - DNA, 2849 bp, Homo sapiens
gaagcaatgccattctatattttactacaaagtggttaatgtttagtcattcaataaaaatgcaactccattctgtcatcagatctcaaatcagcatcacacactttcttttattacaacaactacaatgtgtcaagtgctctaaacacaaagtatcttcccatgtatcacccacaccttttagttatgatccttaacagatcctgtggatccctgtggagtaaattcgccatgtgataaccccccactagcagagaacgaaagactcacaaaggaacctgaaacttaaaccaaactgaaccgctgtgtactagatctgaaggctctgcctcatccactgtatcgtgctgcctccccaaggtgagcttttctaacctgcatactagccagcttttcaagcttgctactgagataaaaaaaaagggggcggggggaaatgtgctggaaacagacaaacaaacaaacaaagaaaaacaaacttggtttttctaggcttgaatcggcaatggggggaaaaaaagtaccctaggaacaaccttcttgagcccattaaaacatacagagatgactggctttttatgactgagtggcttttatttgtggctgtgatctcaggggaagccaatttgctgtgtcctattccttgacttatactggaccccaactcctggctaagggaactttgagtcaccaagggaatctgaaaatatactaagggataaatcaacagtaattaaatagttcagtagcgaaaagcccactgaggcatatagaaaaaagcaatgtaacagcatttcactagttgacttagaaaaattaggcctgttatccaaactgctacaacttgccttatcaaaattcaaccaggaaacagaggaaacctgaagtcagtccgaaacatacgaatgcgtcaactttgtttttttttttcagcacatcattacacatcatccatttggtaaatggcagagggaggggaggagagccctcctcaccaaaggttccaagggcagcagggaggattaaggctcgggcgccccaaacacaacacaacctagaaagtgacgtgtcgaggggaatcacaaataaagtgccaccagcggcgtttgcggccaggaagaaaaaagtacgctaaaatttaattataagtttaagcaactctctacgacatggaacgtgcgtttgctttgagctccacggaatcgtttccaagccaaagcaaaccatcctggcggtcagaggccgagataacgggaaggcggccagtcgtaccaatcagcagcgctcaagtctcgttagcgcagacctgctgcccgcggccaggccgggcagctgttgatccccgggccattcttttaaagcccaggcagagcgcgggtgggaagcgtgcgaggagagctgagccagggagttgcggggaggagaaggtaagaatgtcccagagaaaaagtcggagagggctgcaaactggctggtccggctggcggggctcggcgcggcggaagcgggaggagaggggaaggaaggggaggggaggggaggggagggggccagcgcctcaaagttccgcgtcccggcggcgccggcgctagggctgctcacctaacaggagcgtggtccaggtccggccgcgccccgcgcgccgcaggcccagcgcccagcgcagccgggcggccaggcgccccccaaggccgcccccggcgggcggcgcgccgggctcggcgcggggccccttcctgcccgcggcgcccttgcgccccggggacaggggcgcgcgctcgggccccggctccccggcgccgacgtccgacgcccccctcagcggcgactgtgaggcgcggggtggctggggcggcttgggagccgcctcccggtgcttgttccgcgcctgcaggaccatcttggcatagtcgcgcccgctcgctgcgcgcgcccggacggcggccagagaacggcgggctggctgggcggctgggcgcagctcactctccagcgggcgggcgggcggagggtggagggcgggctcgtccctccccgcgggccgggaggcggggagatcgtggaggccgggcggctgctgcctggctggcagtaccgccgggaggcggcgccggacttgctagcccgccgccgttgccgccgctccggttgtcacggcgaccgcggaacgccggggggcgggggcggggacaccctgcgagcggccgcggccccgcccccgccgcccctctgcgccggacgcgcgctccaggccggccagcgcgcacgcgcggacttccggcgcaggcggggcccgacccctctggcgcccggctacccacacctcttcggcgcccgcgcggggctcggccggtgcgaggacgcgggggcggacggccttccggaggcggccgcccttccattgtgggagtgatggggccgaaggaagagccctctcgggatcggggcgctgattcaagtttcggagcctgttaaggctgcgcttggagcccgcgcaggcgagacgcggcggggcagggagaaggcgcccggagcggccacttaggggcgctgtgcgtgcgccctgggcgcctggtcggccccaccgatgtgaagcgcgcgggtggcaatcaagtcaccgtctccgtttactccccgcagtgtggtcgcgcaacttggagcgcagcccctcactcaccgacaagaagaacgggtgcgacccgatttaagatagtaacagagtattaaaatagcagcctggaatctcatggggagctgataagggacgaggcacaagtgtaaactgaagaccagggtaggagccaggctgaaggtgataggatggattggctggagcaggaaagatcatc

SEQ ID NO: 48471 - DNA, 869 bp, Homo sapiens
ctaaaagaactagttataaacttgaaaaatataagaaaatctccacataatctgggagttggtgatttctctttaataggttatcctctgtgccctaattagaaaaaagtgcctcatttggatggaaaccttgtggcagggtgacacagcctggtcaattgtgcatggttgtggtgactccagcttgggctgagctgggcgcgtgtactttggttccgtggcattgaatgttggacctggagactccccaacaatgagagaggagcacacgaggacagggaatgaaaacctgtcctgaggccctttacagatgtgagcaggagatgcccctacagacattgtttgagggttacccaggtgggatcctgtgtcataagctgagtcacagtccaggcaagggaggtgggaacaaatgccagccctggcagccaggcagagaggtcagggccgggcaaccacgtcaccatgcagcatgtcctcaggtagctgcagtgtcctctggcctttgttctctgggcctgagtgggtgtcccttctccgcctttctgtgtaggggcctgaggctgtggtaggcttttgggcagagcgagaactgcttagattctgggaggggatgcaccctataccaaccagggaagattttatgagcagggaagcttgggaggtcctgaccaaggacagtgattttcagaattctttttagccgtggaacttttccaagaaggaaacatttgcagaacccaggctgcaccaggtaaagcagggaaggggctgcagccccacccccacctccagctctttctcttctccctcctcaagatagagattcctatggtcacagaaaagaatttgaaaaccactgattcagt

SEQ ID NO: 48472 - DNA, 1851 bp, Homo sapiens
cctatacaccatgcacctggtcggaagccatcccaagtaccatctcttctaatcctcacagcatatggggacaccatggtcttgagtggtgggtctggttgtacccatctcccctgctgggcccccagggggcctctccaatgtaagggtaaagagtccaggcaagaagctgggtttccatttctgtttggagacaccactgggtgggccaagttctgaggcccaccaaggactgacagcaccagccaggggctcccctccaacctccaccccaagacacacaggagcttgattctatttcaccaaccaagggctcctcctacccaaatccacgttctagttacagatagcagagtccactagagggtcatgaatcactcctattatttgcagttctgaaaccaatcagtctaaaaggtcagccatccctcgcattgagcacactctcatagttaggccacagcaacctggggactctggccctggccctttgacctgccgcagtgactgcctgtgtgccagtgggagatgggacacagaacaaccttctagacaacagggcgctgctcccagtggctgcacggcccaaacccatgactgaaatcagaagagaagccaagtccaggacaagaaatcctccctattgccaagccaaacacgacgtcgtggcagctaaggcctcggcagcaccttcccaaactgtggagaaggaagcagagccgctctctcccgtgagatgtcagactctcccaggccaccaaaggaaagtctagtgggtggcaccttccctgcacaccccggagtaagggtgggaactgctcatatcctggcatgagtgaatgagtgagtgaatgaatgatactcattgatctctgctctgaactaggcactgggaaggggccttttacaggctgcctcagtaaatcctcaccgcaaagtagatgtagtctggccccaaacaaggcccaaggaggctggctaacctgcccatgtcactccgataaggggcacatgacagccggggacctgcaggatatgttaagggccctaggccaagtgaacccccagaaggccaaggtcatttcctcccagccaccgccttctgaactggaggactgagacacacctggaaaacaaagcccacagacacacccaaaccccgaaggagaaagaagtgcggactggggacctgctttcaggaccgcccaggctgactctgggcccgcggcagggcggggcggggggcgggggggcggagttgggggataggactcgagcaccccccggggcagagcattgccgggtgagccgcatccctgcctggaacatatgagaggtgcggggtgtaggggaagtgggagcacgcggggggtctggggaggggacagaccgaaggcagagaccaccgcgacagacacctatcgaacttcacgctaaggactgctcgttttactgatccggactcagcccttagcgctgggcggtaccacgcgccgccagtgcggatcatctgggcactggcgccacctagtgctggcagcgcggcaatggcccttttaccgactcgcgcgtctatagtgcggcctcacacaacctctgcggagtccatgagccctggagagcacaagtggtttgtttaaggatagggcagaaatgggccaggagctcagcctcctaatcaccagtcctggggcccctacggagcaccttggttctcaactgtgtgtgggctgcaacacaagggacaggaccttcccagaccagagccacagttgcaggcagatggtctgctccctccctcggccaccagctgtgccctcctttcatcttatgaaaaatgtatccctaggt

SEQ ID NO: 48473 - DNA, 1194 bp, Homo sapiens
gctaacctagtaataaccccaaaatatcagaagatgagcacaatacaagtctagtgtttctcctgctaagtccagtgtggattttttaaagtacgtataaacaaataagctccacctcaacagcctcagggaaactatgcctccagaaacaaattaccatagtcctgagccactgccactcctctcagaggctgaagcccacagtgggagcccagcgcgagagggtccagctgcccatttctccctgcttcatgccttacttttcccttgaatgtggtgctccaggaagtaccccagcttgtttgctggttacattttgacagctttagagtttgcttcagccacttacatccacctcctctcagcccagccatggccttctttgccagaactcacctgaaagccactggaggggctccgactacactcaagccccttttcagctcaatggatttcacatgctgaatgtctccatgcaggagccattgcaaataagatgggagaaatccaacatcccaaaaccaggagaatttcttttaatttaaaacacttggttgcattttgaaaactaggtttcccggccatctgcaaacaacacagaatcagaagttaatcatttgcagcaaagccccttggacaagagtccacatccaggaaatcagttactcttcatgatcctggcctttggcagcaaatgacgagaggcatcctcctgtcacccgcctgcaggcagcactggggtaatcatggagaagcatcaattatgcaaacaggaagttgagctgtaggaagcacggattgtacaaagaggaagtggggctgtaggtttggaagaaatagaacagagccaaaccaccccataatcttcacaaactagacttgtgttctctatggtcccctgtattccatactgtgaccagtggggctaccatcttctcagggccctcactagatgcctcagagtcctccttcccctgcccatcttctctcatgcctctcaacaaacaaaggcctctaaattttcatctatcttctctctcatgggaaggcttgggaaccagagtgccccacacctcctcagaaacccatcctggaggcagcagctgaattcctgcactcactctaccaccctaagctaagtcgacataagcaaactcaccccattctttgcacctgcagacttgattgcactaa

SEQ ID NO: 48474 - DNA, 2377 bp, Homo sapiens
caaaataaaatagcagaaacatgaggaaaatgtaactatttggaatgtgtaatatgcctgtccccatagaaaatgtcatattctttatgcaaggaaaactgagtaagataataacctggtttctccctctgcccctaggaaattcacaatgaggaaacagctgaaataaacaagctggaggaaatcacagctggtggcagaagttctgacagcttgtttttttcttttcagatcggctatactagttagcactgtaggataataacagaaaaaagggagcaaggcaaattcactgaaacacataaaattactggagtaccttagaaattatgaaaaaaaaaccaagaaggagaaagactgtcattcacaattatatacttgaaagctataccaaaatacaatcatcgtaggttttaaaaagttaaaattacagaggagaagagattaaaggaactggaaacttcaggaacaaactttcacaggaaacttgttaaattagccttgcttcccccaccactccatacaagcgaccaagcagcaacctcatggaatccccactgtgttcccagaagcctccttttcaagactctgcgattgctttattctccctattaacccccttcaaggcagctcaaatgttatcacctctgaagcccttcccactcctccaagcagagatagtcccaccctcctccaggctccctcagcatttttttcgaggccatgacagcccatcagcagatggtaattcatttgcctatctgacctactttcagtgagaaagtacagaattcattttcctctcctgagtgcctagtacacagcagattctaaagtaaacatttactgaatgaagtcacagggtcttcatgcaaatagatttgctcacacagtcaccaatacttaaaatctgacgggtagatctgaccagaaaaaagttttgaattgtggttggaggtgggacactgccattatgaacaaagtcaaaatacgaatgataacctaggaaagaacagtgaaacaaatgatagacaaaatagtcacttcggcaatgctgttaagaatataggcctccaagttaaaaatggatttgaattctagttctgctattgtgaacttaggcaaactgcataacctttaagtctcattctcctcatccataagtggcagataacagtgctgagaccagagtttttataaaatgtagtgaagtaaggcacatataggtgcttaatacaatgcctaacttctgctaatgctcaataagtattagttattaatatccttttggataaagtgtggtaaatgaatttttaaagataaccaccacaccaacaaataagcaactcacaaaacataaagaatgcctctttatcatgtctcagattaaaacaaggacattccaacttatcacgttagcaagtacatatctgtacaagtaaagagactcaggatcttcaacattaccgagaaagtaaactggtacaactttactgcaattttgcaagtctttaagggcctcaaaaatcttaagaacacttttgattcaggaattccctttgtcacaatttatcctaaaataataactgctaatatgtaagcatacatatttaagaatgctgattatggtaatatttcacgggaataaaactgaccaaatatttatggtaaaagatcgccccagttcttcagtcttctataacaggattatacatgcatactatgtgcccctcagtggcaaagctggtttacgctggcttacctggctcataacagtagactgctgagccatgatgggagtatttacaccagagaaatcagcaaatgctacaaatctagggctttatttccctcacccccaccaaagccagctgttaagcatttaccagcacagcacctgatgtaattttgcaatacttccccctctcaatgctgctgacctgttgagagtggccatgtgattgctttggccaatgtagtattagtaaatgtgacagatagaagacttcaaatgtgctcagtcattagcttgccctcttgtcttcctgtcatttgccatgagaagaatgtgtgccacgaaattactgatctaaagagaatgagaaacttgaaacggccctgaactcaatctacaatccaagaaagagctgcaccagtgactaaaagatctgtgaacaagaaaaataaaatgtattgtaagccactgatattttgaggttagcatgcagcaaaactaactaatacgctctccatcaatatatgtgtgaacaaattagtaaacctacataaagaaaaatcatacagactttaaatgttgtggatttatggccgggagcagtggctcacgcctgtaatcccagcactttgggaggcccag

SEQ ID NO: 48475 - DNA, 2106 bp, Homo sapiens
tgtgagccaccgcgcccggtctttgcctgccaattcttaagtcccttgatatttctgcttcctcttactaattaactgaacctcatcaggaaaatattaatgatggttcgaacactcaggagacacaacctcagaactcaaaatacctcgcggtctaccaaaagagacctatttgattcaagactggaggggagaagcaggaaaaaggagggtacacggcacgaaaagctgctggtcagagcagctgcccccagcttttacacacttactggtttgctagggtaaacgttagatagatgcgtttttagtttccccacggtccagttcaagaagcagctaatagtctggtcactgtatttctgattcggtgctttaatgatgagggtcacaggaatctccatcccactttggtccatggtgcccccaaagtcagacagagtccagaggagcggcagttaagcccaaaagagccgagatggtcaccgccggcgcgactgggatgaggacagaagtgagttcttagtattccgtgtccaagtcagttacaagtgcactggaggatacgaagcccattgccggtaccaaggatggactgaggtggtggcgactgcgacggtggggtctgggtgcccggccgtggaggcagctctccccgccaggtccgggctccgccgggctccggactgtggaggccgtcgtgaggagaaaggaagctatacgaaggaagggtgggagggatgagggcacaacggccggcccggggtcactgccccgccccaccgcgacccccaagctggaacgcaacaaggcccctacgccacggccccgcggtgcggatcggggaagcagctgggccgctcagggcggtcagcgggcactggggtacctgagagaaggccgcggggcccgccaccgccgccctccgcgcccaggcagggccgccagccacaccgtccggccaggcgttttccgtggcagccgctcccttcctgctgcgcggcgaccggcacggcccagccccgggtctcgcgaggaggcgcgggtgaaagggagagaagctgaccgaaggcgcggcccggctctccgcctgacccctcagtctggacagcgcagggtggcggcaaggcagggctgggccgggggcggcccaggcgactacaggtagcaggagggcggggacgagagccgttgcgccaccgctggcgcgccggttttgttgttattgcgaggattgtctggggcccctttaagccggaacaggcagggcggaagtgcgtcaccggcggcacgcccctgcacatggacctcccccgtccccgccatccctgccgatcctgttgctgccgccttcccgccgtgctcgggctgcccgggactctagccgccaggcttcgcgtcgcccagcggcagatcgggctcctgggagcctctcccctggccgtttgctcggcctcggccccagctgccctggggcctagccactagctcccctggcgctagcctaccctgtcttgaccgcaccctgaagatttgggaagtctttctccatcccaagagtcgtctctgcaaaagttggtgtccttcctggtgctgaaccacgcttctgctcaaaatgtgttgagcgtcgtctgtctgcaaagcacggtgccaggagctttggtggagaaggcatggggtacatgtgtaaagagtacaggcttttggttaaacctgaagtcctcctctactttctgggggaccctggccgtccttgctgagcctccgttgacttctctaatggggacggtaatgcctacctgaccacaagctgatgagtaaatgagctatgagtgcaaagtgtggtgcagttctggcgtgtgccagcctctcaagtgtcagtttccgtctcattcctcttaatcttcactaaaatggacaagtattcattgagcacctaatgcgtgttcagtatggtgggagatgagggatgacagtattatttttctattttataggttagacatagaacaaaaggttgagtctattgcccatagccgaacttttcttcattttctactgtggtttagaagtcggtatagtaagttaagggttgttagatgtgcattt

SEQ ID NO: 48476 - DNA, 920 bp, Homo sapiens
atcttgggaacttggggagcaaggacccccagtaacatagtgaccaggaggaaattcttcctctcaacagctaatgcagcaggatctcttacaccgtaccctccctcaccttgctcttgctcttcatggtagaacacgtaccatatcttagctgtactctatcaactgcgcatctgaagtaaagagtgaagtcttctttgtttccagtcatggagcaacaacttgctatgatactggccttctgtagctgactcttctttgtctacccaggcactctaatggaactttaattctagctaaagttattttctcagactcctttgaagcaaggggcagccatttgacacacttcaagccaatgagttgaatgttgaacttattgctgaggcttctaagaaagcatatagatggaagggctctgcgaatcagagctcatctttgccctacacctgtcttccaggaggaacgtgaagagctacagcactcatagttcagtcatgaaacaacaaacaggagaacaatggcctgcattccaaggatggcagagcagaaaactgtaaagaggctgggcatttgatggcattgtggtgccaccagacaagccctaagctatcttccctaagacttcttgttttgggtcaaattcctgtttaagccaggaagttttcacaaccttcaccacccagtcctgcagctgttgtctcatgcttgtgactcagacttccaggaatcctttagaagtgatgtggtgatctcgtttggcactatgcaatgtacactattaatgaaggtaccctaataattataaatattaagacagaatgtgcatttcacagtgatttaaacactctttaacactctttaaaacagtccatcaaaggttcgctaacacagagaaaaacatttaaaattgtaataaa

SEQ ID NO: 48477 - DNA, 736 bp, Homo sapiens
acaagcaaagcgtttgtacccctctcatccacaagagaagtccctccgggtatttcagatgatacctgaaaggatgataaggcagggaatcagaggctgacaccgctattggatggactgggggagtgaagaccaaaaggtcattttcaggaaaaaaataaattaggaagtacagggataagacagaagccaccaccaataactccacacctacagctccaaagcatgtgattcagaaggatccttgttgatattggccatcaccttgtgtcacaataccaggtgagttgtcacagtggaaagcaggggtattcccagaagccattctgacaatgggactagtagaaatgacttaactatacacagaattgtctatgaatcacataaatgtatcccacaaaagtcaaactaaatatgtccccaactcaacttccccttggccagagccccaggatacccttggccactctaatcccccacaagatgacaaaaggaaagtcagaggcctcaagtaattgtgatttaaaatcccttttgccaattttacaaaaaccatctgacccagtgtacacattgcctgggcctgggaaggggttctgcaagggagaacttcagaaacttaacctcctggaaaatcagcttttgcctagaacagaagtaatttaccttcatgcccagagaactgattctattataggaaggggatttattagccattgtttgtagcaataatgtt

SEQ ID NO: 48478 - DNA, 1197 bp, Homo sapiens
ttgataatgagattatattactttataactagaaaaaatacttatatattataaatatgtactaaatacatacatacaaagtctgtttccaaagcccattctctttgctgagcaaggaggaggaaaggtaggggacacagtttagaaggaaatgaaagaaagcttcctcctcttagcaactgggattcattcagaaatgagaaaccatgaatcaaatttaccaaaagacctggagcacagctctgctgtctctagagctcatcacagtctaacatctccactttcaaaatgttgttgagcacagatattattccaaagtgctgaagatgagccctggaggcctatcaagcccactgagaccactccagacccacagaccatccacgtaagcatcttcctgtctcttcccacatctccagaaaatcaggtaggaacaagctaatcattcttatgggcaagtgaatgcatggcagcctttcactgtactgaggaggcaggaacatgaataatgaggccaaagccaaagggaacacagatccaaatacaggtcacatttgaatacagaagcaatccatagacagagataaaatatttgcaaatcatatgacaaagaattcatatctagaatgtgtaaaaagctcctatatctcaaaaatttttaaaaaccaacatggattgactttaacaaacagttcgttaaggaagatacataaatgtcccataaccactttaaaagatgctcaacattgttaatcattagggaaatgcaaattaaagccacaacatgataactactgctcacatgaatggctaaaataaaggaaagactgcactaaatgttgagacaacacaggacaatctgaactctcatacactgttggtagtgcaaccactttgtgaagaggtctgacaatttcttatgtgactaaacacatacctgccctatgacccagcaattcctctcctaggtagatagccaagagttacgcaagcatttccacaaagaaacttacacaaaaaccatcatagcaggtttaattgctaaacaaactaaggcatactcatacaatagaatactactcaacaatacaaagaaacaaattccagtacatataatagtgtggatgaatctttaaaacatgctgagtggaagaaggcatataaaagcatatactgtgtgtaggccatgagtggtgg

SEQ ID NO: 48479 - DNA, 2915 bp, Homo sapiens
catttcttcctcaatattaggttaatgactctatccatatgaaaaatggtagctttagttcactgattttttggttcgtgttgtatgtcaatttgttcaacaatgacacttattcatccattctcctattagtagacatttattgtttcactaatataagctattttgctctgaactttcttgcacgtgcctataacttaaaaatacacatacttttttaaaacatgcagttaaacaggaacatacacatttctttaacatgtagttaaacaggaaaagtaacacatgtgcatgaagaatacaaccaagagagccatcacgttcaagaaaagaccacaggttattccgagtgaagtaaggctttcactagaaggcacttggggaacgttccaatgacagcgacattcatcgctacagtagaaactcacacaatcgcagccctttattagtattttgttacccagtagttcctgtgtccattcatttcctcaactggagtgtgagctccaagaggaccgaaccgggcaccgacaaggtgagccaatatgaatgtggcgagtccgcaatgggggctacagcggccgacctctggggctgtgccaggccactagagtgtgatggcgcgagggaagggtcggggaaacagggcctaacctcacttttcaccccgaaagtcaagatagccacggaaacagggatgaatggggagcacagacacctgcctcgaagtgtctcttcactttcactcacaaagccgtcgggtcagtaaccagaagccgaggggcggatgcggcccccgccctgtggcactttctcagtctggttcttccagccgcgcctctttgccttacgccaattccgtaaggaggcgctgaggccaactggccggctcccgcagctccaaaacttgacgtgaaattgcgcggggcagagctgactgcggccatctttaattcgggcaagaccccaccctcgcaccccacccactagtccttttcagcgttcccaggattttctccaacaaatgtaacgcggttaaccttagaagcagtgttgaagaaacacgcaaagaggcctgagtatccatgacctcagtggtgcgaaacccggccaacttaaacatggcggctaaacccgaacagcaaaacgttgctgacgccaatgaagtcatgctcgaaatggagcgaggcggcggagctggggaggcggtaatctcgcgagatggaagccagcctccgctaggcccggaagcctcgtctgagggggcgggggacggaggagggagcgggagtcgagcgagagcctgtggaggagtccgcctgctgtagcgtgcgtaagcaaggcagctacgccgggcggctacgctgcggaatcggcgtaggcgcctttggagaatcggcgggctgcgctccgctggggctggtcgcggagggggggaggggatgtcggtcagtgcgagatccgctgctgctgaggagaggagcgtcaacagcagcaccatgggtgagtctcagcttcgggtgccgcgacttggggtcagcggctccgaatgccgggaagctctgcggccgctggaccgagctagggaacgccctgaggcgaggcggaggcagcggcgaggggagccgggatgggggccactgcgggcccggggcgcggcagcggcgggctcggggggaggggaggcggcggcggtgacagtttgaattgaacgtgaggagagccgaggcggcggcatttcctgtgccgcggcgggctggcccccggcgcagagccgcggcctccgcggccggagcagcctgagcgtggtggtctcagccctgcccttgcttctctccgtcccttcgcctttcctcagtctcctcccgggcccgccggcttccgcggccccgcttcctcctgtccccggccgcatccccgtcggcagaagtcccctcgtggggcagtgggcctggctaggagggtggggacgagtgtgaacgctcgggcgagggtgctgtgtgggccaacccgggcgggcggcggcggggagggaggaagaaggatgcaccaggctgaggctgtggtggaggcggcggcggcggctgcagccgcagctccagtcaccgcgtcgcctccccgctcctcctcccgcctctcggggttgcctctctccaggcgcagcccggaaggccggtggatggcgggcgagtcttgagaacggagggagaatcggtagtttggtttggaatttgggcttaatttttaggagtaagggaaagagaacgcctgggaagggcgccccccggaggagatagaaagggtgggaagggtccttggaaaagggagggagcggagatgtggagtggcgaagtttagggaaattaatttttgaaaatatttcaatattctcagttattctcttaacgagccctttcatttcctttcctcccccacatgttggaaaaagaacaggccatttcatttacattttccactcctgagttccatttcagctgtgtgtatagtaagaaataagcaaccgagatttttctaggacatttccatttgctgagttacttttgaagagtacactgtttcaaatttgggtttttacagtcctaggaaagaatttgtgacgtccaggtgttttcttagttactgaaataataacttactacatttcttgagtttattgctaaatagttcagctttaagaattctttcttctggcttttttattttgatgaaaggaaaaaatatctttgttagtgcccctgagaatgtaaatgaacagatcatctaaattactaagcatctaacctgttttacatatttatgcacatgcaggtgatgagtatagtcagtttttccccctaaagtttatgtgcagacatggggaggagagtattttagacttaaaagtgtacaggtag

SEQ ID NO: 48480 - DNA, 490 bp, Homo sapiens
caggacagttgctgaaaatgggtttaaactcactggcattatatcccacacaaaaatatattactttgacatgtttagaaaaaagtctgcctttaatttctttgtaatttacctctaatttgttgagttacatgtaagtaacttttttttcccctctgtcttgctgtgtttcaatggatttgcctctcctgtttggactgaatatgtcattacaattcttggaattctttgtttactgttcctctgtggatttcttctgttggaatctggaacactggaatgatggaaatgtgttctttacaaagtagctgtgagtatactacataatttatagagtttttttcagtctcagttaacttaaatttaatttatagttggatgaaatatgagccaaggaaaccttaggtttaatgcatatttctaactccactcatagcagactttcaaatatttgacttaaaaatgttagattctgattagtctcctaatt

SEQ ID NO: 48481 - DNA, 461 bp, Homo sapiens
tttcattgcaactacctattactgatattcaggtgtccactgtgccaaggtatgattctaatgagatcacttattcctcacaccaactctgtgttgttgtaggtactgcttttatctgcatttcataggtgagggcactgacacacagaagtatggtttgcccaaggtcacaagaaaagtttattgatggaactgagataagagatttcaaggaaattttaagctctaatggactactataacctttgcccctagacttttccaaagttacacaactactttcttacaattattggtacttttgaaaaaaaaaaatgagataacttggattaagggtatgtgatacttaaggaaacacagaaaaatttggaatacacttaatttacaccttcagggtacttcttaggaaaaatttccagggaagaataatagtattaccaaactatttttgtatttgtcag

SEQ ID NO: 48482 - DNA, 1347 bp, Homo sapiens
tggccccttgggaagaacatggataacactgccctaggtcttgggatctcagcaagtcagtgccagacaaaactgctcaagtgattttcatatgtggttttgatgttcttgacataaaatgggcagaggcctgaggagtcacaaactatacacacacacacacacacacacacacacacacacacacacagcagcagcagcagcagcaagtaagaagtagaatgagccaggactaaagccgagtaaaatgcaaatataaaatatacacacagtgacaccagacagccaggtacacatccagggatacatctcaaacatactggtgaggagatgggtatgggagcaaaaggaatcttaagcaaaaaaaaaaagccagaagaggggtcacgtgccctgtcagtgatgatagtgttccgaggctgggaggatgacaagcacagttctctgcagacatggcccacagaggtaacagccaggcaaaaatggtgggcagaagccccagagggtctctccagatgccatgaaacctacaagaaatgccatgaggctgtggggaatttgttaggcacatggagcgatttccaggcctgtgtctgcccttctgtccctgttgagttaccagtgttgactcacaccctggcacctggatggatttgtgtgggtcgcctggcgatcgcgtaggttcctgtaaatacaaacagcctaggtctgacaggaatttccttactgctttccttcagaattgatattagaagtaaattgctctctttaaagtgttcaaccctaacatgtcccactgggaaaactctctctttttctgtggccaaacactatcaggctttgtgaattttatagaagaaccagaattgagggccagacctcaccctgggaagccctggccatgtctttaagtgatggggcttgtctgtgaattgtccttgttggaaagatggaggatagctttagtgctggccaccattgctggtgacacacagccttatccaaggaagtacattaagaactcagtgcttgtggccatcaaagagattccagtctctttttggaggaactggttaaatctattatgatctaatcagacaatgtaatattttgcccctacaaaaaatcctgcttttgaggccttcttattgacattggaaaatgtaaatgttacatctgctgaaataatatttagcgagtgcctttgcccagaacatgaactgattagggccaagctgaagcacaaacaagtcacataagaacctgctgggaagaactctggcagtaaaaactgttttccataccatagctgactggtttgcttttcagaccttgtgagccagagga

SEQ ID NO: 48483 - DNA, 665 bp, Homo sapiens
cccagctacttgggagcctgaggcaggagaatcgcttgaacccagaaggcagaggttgtagtgagccgagattgcaccactgcactctagcctgggcaacagagtgagactccatctcaaaagcaaacaaacaaacaaacaaactaactaactcattccacttctggtctgctttatgcttctcctgggacattgacaggaagttgccaagtctaagtaaacaatgaaccaaatatgtttgtacagacatgtagggaagaggtgaaccgcagggctgggcctgccttgggagtccaacacaacgaattcatggctcatgagtgttctgtaagcaagaaatagatcagccatggtccagaactgtagcatgggaagacaatccattcagacttatgaataatcactgttcactggcttatcatcacatccactctagaacacaggactcctcagggatgtagtttaagttccctacaattggggtcaaaggtcactcctttacaatggggagacttctattccccattcatcgaacctgagtgggttttacttgtttgtatttttagaaaaagaagcaaaactgtatattcctccttaaatttaatcttaaatttctttatgcccagcttcttggcagatacttcttcatgagactgttttagata

SEQ ID NO: 48484 - DNA, 818 bp, Homo sapiens
gacacataggttgtattgaatcatccttctgcttgtgtcaatcctctccaggtaaatcaatcctggatcaggcagcaggtgcaggctgtggaaggcttctcactctggaatgctcacagctgggccagaggaggaagccccactctctgggcatttccaggacgtaggacagagaattagaggtgctgagctccctggctggctgcctcacagagctgtgtgcccctagggaaagtgttgcacccacctccctggtctactaactgtggaggcagagaaggaaacccctgatgctcccagtggttctgtgcagctgaaggccgctgtgaggctatggggacttccagaccagggcagagcccccacattctctgcactcttgggcagggattttaaccaccagcccctgcttcctcccctgtcactgtctgggaatgtgggttctggagtcctactgcctgggtcagagtccaccccaccaggcagctctgcttggacttagttatctaagcctcggtttctttacctggataatgagcgtgataataatgacacccacctcttaaagtgagagacttgacaaagctagcgtgggtccagctcagtgcctgggcgtacagaaggcacacaacacaagagaaggctctgagtcctactgtggagattaggcctgtggcagtgtcctgtggttgccgaaagaaattaccacaaccttggtggcttaaaatgacagaaattggtactctcacagttctggaggctagaagtctgaaatcaaggaatcagccaggttggctccttctgcaggctctgaggca

SEQ ID NO: 48485 - DNA, 4464 bp, Homo sapiens
ttaagagttctccatttagtttggatagctgtcctttatcagacatgttttttgcaaatagtttctcacaatctgtgatttgccttctcattcgcttactgtcttttgcagagcaggagattctgattttgctgagattttgactgagattgcactgaacctatagatcaatttgtgttgacagtggatgactgaggagcagtcctccaggcatcagtggagcacaggctgggagatagtctggcatcagaagggagttgcaaaggctggcggcctgccaggctaggagggatggctgattcatattggaatctgtactctctcctctcccacccactctgtaggcctgagtcataaagaaaccttgcggtgccttcccctgtgcacccttggtatagctgtgaacacttccctctgcacagacacattgacacatggggcttatcacaagggacacccagagaggcttccttggaggtgcccttgcatgacttacagagtggcatcccaggggaaagtagctagggctcctcccctggtcaatcagactatctggtcctttctgctctgaaggcagagacctcattttagggctataaacccaggcaggacaaaaataaaatacacattccaaagactcatgtcatcctccccagagctggggaaccacagcatgggtggtagtctagaggctgtccctcagatgcttggccttccataggcagttttgcaactgtcaaatcctccccgacatctgcccctctgctgtgtgtgctctccaggggcccagggtgccggttccctctagcctccttctaccaaatgaagcttctgcacatgttcttccaaactcaaatttcttgtgggtaaaattagatcagagagctggtgttgccgggaagctgcctcgaaagtgggtggctgcgggccattagcggtaaagataagttaaaataactctaataaaaatgatgttgaatgtgggaagctgaagccctttttttgcccattatcctgagaactggttgtctttctgttattctagttgttttgggcctcaaaattacatctgtatttaaaccaaagtttttatttttccacccagataaagccagctcttctcctgctgctccggataagtgattcctcatcctgtgtgcctcagctcctgccaccacctccaagaagccctccctgatcccctcacagagttagctctgcacatcctcttgctccctgtctgcctcacaccagcttctctgtcacagtcgggtcacagttgctccctgggtctcctgccccactggactgcgagcccctcctcagcagtcacaggacatattgatctttgcattccacagaaggtgcacctaggaagtatgagtcagaggagtgagttggtgctttaaaaacccaaggctaaaatgcaagtgctgttccataaaaaccccaaccgttggcaagggaagtgacaggacaggacagggaaagcaaggctttggaagcaggaacattttacttctcctgacaccaagaataaccaagacatgattctcagcctgagtgtcctcatctgtgaaatggggtcagtgatagcaatcttcccaggtcatttgagattcagggcacagaccagttcctcagaaatgttagtttcttttccttccctagttaataaaaacactactatgttggcaagaaagcctggggcttagtcctggctctgtcactaacagttgtgtgacttcgggaaactactttacccactgggtgcctgctttatttcctgtcaacaggaagtactgattggtctgtagatcagattttttataatgctgatgattaaaattttgaaacgaagtgtttcctaagagtttcagtcttaggaatggaaacagagcctagaaagaaggttgtccacttttcatggatgatgttgggggctgaggcttcagtgtcactgtcctgttgggagtggccggaatcgctcagcatttcacaggcttctcctctattggtggaagagcagacgggagaggttggtagagcgctggggtattctaatgacagattcagaggggactgagccagggagcccagagcagaagactgttgaagggaaattaggagagagaattaggcaggtattctccagtggtcacgttatttttagatctccaaatgatggagctggaatgggccatttgaggcctgctggtttgatcctccctggttacagaggaggaaacagtggttcagaaggtctaagtgacttgccaggtctccccttcctgagctctatgactctgcttctatttcagctggtcttgactccaagggaatctcttgtgtgtattttggccctaacaaataccaggactggttttctttaaaaagctttcttcatgggcactgttagtctcatgcagttttaatagaaaactgtctttctattttccagcaccattagttgctatgagcataaactttcatatttaatgcagcatgattcacagcgatgctccatttaaaaatgggagaacctctcctctggcaaaaattagaagagaaaaactaaatgggaataggaaacaatcatttctaaaaatatgaataaaaagaaatatcgattagtctttcatttacttaaaagcatagctgattggaccaaatattgttgaaattcaatttctgcactttattctgaatatttcagaccttttcgccctctacataaccactagctcttccagagcaattcagggactatgtgtatggggaaggagctagaaaagttgtgagaagagaaaaggcaactgtccatacaagcccgaggatctttttagcccccttcttctttggggaacactgagataagaagcctgctccccactcccaacccacagctagtgcttctctgttcacatttggttaactcatacccgattcattcctcaggtgcatcaggtataaatacgagaagttatccctgatgcccccatgcacagttagctctgcacatcctcccactccctatctgccccacaccagcttctctgtcacagttgggtcacaatttgtccctggatctcctgccccactagatggtgagcccctccccagcagccataggacatattcatctatgcattccacagaatggaccctggactcaccattcccaggcatctgacacagacacaggtaccaatagcactctctccaaggagagcctagccatgggcaacggaacaggctgagggacaggggcttcccagggcccccctaaagatcactgtggagcctcctggtacccacctggaataactgtgagagccaacatctgtggagtggtaaccatgtgatagccactgtgataaatgcaccaccaccctaagaggatagggctatttttttttttttgacagtctcactctgttgcccaggctggagtgcagtggtgccatcttggctcactgcaaccttcacctcccaggctcaagtgattctcctgcctcagcctcccaagtagctgggattacagggatgggccaccatgcccggctaatttttttttttttgtatttttaatacagatgaggtttcaccatgttggccaggctggtcttgaactcctgacctcaggtgatccacccacctcagcctcccgaagtgctgggattacaggggtgagccatagcacctggccggggctattgttcttattcccacttaacagactagaaaactgaggtgcagagtggctagggaagttggccaaggtcttagggatattaaaagggtggtgtcaggataaggaccggggctgtctggcttcagagtccacgcttgtaaccactactgagactgcatcaaaatgacacatgcaaactgtctggtgcaattatagctagtgttagcaaagctatggggaaaccagaacatcaagtcactggaggtgggtgtggaagttggtatatccatgttggaaaactatctggcagtttcttataaagttaaacatacatattgccatgcaacccagcaatttcacttctagttatacacccaagagaaaggcgtgcatatagctgctgaaagacacatacaagtatgacctcatgttcatagcactatttcaaaagccaaaccctgggaaccaatccaaaatccaccaacagagaatggagaagtaaagcgtggtatagttatgcagcagaatattgcacaatggtgacaatgaacaaactacacaagcaataaggatgaatttcagtgttgagagaaaaagaagccagacaccaaaagtgcattttgcatgtccatttatataaactttaaaacactcgaagccaatccatgttgttggaggtcagagtggtgggtgtccttgggattagttcctagaagggggcacatgggagatttttgggagtgctagtaatatcttgctttttgatctag

SEQ ID NO: 48486 - DNA, 2269 bp, Homo sapiens
acaggctaatcatatcttaatattattgtgaaaatagttttgactttgtggatcccctggaaaggcctcgggaatagccaggccaaactttgaggacctctagcctagtgattaagaaaatgtattttggtgtcagattgcctggattcaaattccatttcggccccccagtaggtgttcaataaatgttaaatgctattattatcataacagggtactcagtgtattctcaatggattttatttttcaagcacaaagtctggaatcccccaaagaaggattcaaaacagtgcctcaatttcagtaatgagcactataggttaatattgtcgctgtataaatgtgtatcattgttgtttcacatttgcctataggattagtatagaatgaatcctagcaacagcaggcaactttgctaaacatatccactccctgatcggaggacaaatgcatcccccacccccaacactgtgagcccttcggccaaatttttaaacctcactgagtctcattttgccccttctgtaaaatgaagttcataataatacctgcctcataggtttgccatgagaattaacaaagataaggataaaacatacacttagcccagcatctacacataatcagcacttgataaatattaaccaaaagttttttatggcagttctgaaagccaccactagggctcagatatctggaattaccacaagggtatttgttattgatacaaaaataactccctgggtgagccaactgatgggattttggatgagaattactgaattatatttctggaatttttgttagatgcctgggtcctcagaggcaacatataccaatggtccgccttcacagacccctttgggagtgtgcctgttctttggacgctggctgcaccggcaggcacaccaggttcccacgggctgagtcacacacttggcagttttgccggctcaataaacatggctttctcatctgccaactctggcgctgtgatgagctctggccacactttaaagtatagaaggctttgtagcctcaccgtgctcagagtacaaagcccttctagctgtggacagccacagcttctggaacaaggatgatggaattagcagcgaagacattaaaatgttatttttagcagtgttccaaatcattacgactccccaccccccgtaatgtcctctaaatccttcctgacagtatatgtttatttttctttcctgagaattattaattggtaacccaacagttcaaatatagttttcagctggttccagaaattcatttcttcatcatagcactgtgaccttccatcatatgactggccactatctactttgtggttgagtcattgttgttcaacagcgctacaaacatgtattgaactccacccatttaccaaacactgcacgtggatatgagggtgggccacatctgggccgggccccgggagccaggtcttgggtgacatggagacaaatagacaaatgcacaaataaacagccgcagtcagtggagcatgtgcaggggagggtgggggacagggcgctcggcaagggcacctgaggctggctcattttagcatcaggtttcatttctaatgtcacctctgccaagatgtgctcccgcccatcgtatttgcaataacccccttgtccctgcactctgtcacatgggcacattttatttttttcacagcatttatcattattcaaacgttttattgatttgtttacttgtacatcacgtatcacccctactgagtagacacccagtgagcatttgctgaatgatcagtggagtctctaaatgaatgaatgaactacacactcagtagatgtcaaattaaatcattattctaaatcacaaaggcaatttggggggaaaggttaaaaatggctaatgtgatatatgtaattactgtctccaacgtatcagaatttttccatgaaaatattgatcaggggtcttctatgactacagaggaaagtggagttaaattaacaagaagaaattttgaggcatggccctacatattagaaacatacatctgagtaaagacttcagttctatagactttgggaaaaagtgaccacattatccttttggatggtcgatcccttcacctgcctgaaggcagaaggctcaaccaagtataggagtctatgaggccagcagagagtagccagccagccaaaccccaaggatgcctccaagacctgcaatcacatagagatacaggtgtgtagaacatatttatttgtaa

SEQ ID NO: 48487 - DNA, 4042 bp, Homo sapiens
tgcttccacagccacgttgcgcatcaaggcattctgctcaacgaagagttttctctgttttcctgcttgtcttaaactgttttttccttaccgcaccaggatttcagtgcgtggcataatgtagcccagtgtttgggtgggagatgatggtaggtagcaaggcatttttgcgatcaagtgcaaatagcttgcctaaaaataaagccaataaagagaaccgtggagccagagatggaggcagtcctgccatgtcctaatgaccccatcatcacttgggtcggatgcaaccagacttgaggtaagattccttaccttaacttttcaacaaggaaccaaaaatttccccccgacctttttttttttttttttggtctaagctagtttgacttggttttctgaccaatatacatagcaggggaatgtgcctcagaaaggcagtagcattttccaaacttgggctgccgctaattttacaaccaaagtaccttccgcctgtgagaggtactatttttgctgacccagtccttggaattgaaaccagatgcactggtcacattggttggggatgaaacttcagagaacactaaacgtccagggtcaaagtattcaacgatatcaccgcatgatttgcttaatcgaatactctagctctaggtatccactataatgcagagggctctttaatctttaaccaaattgtcatttagcagtgtgatgcaaaaactcttctgggttttgggaagcagcccccatttccctccttcgtaatgattagacttaatattacaaaaacttatccttgtttactcacagcgctaaatgtgcaaaggagcaaacctgtatttgacctatgcgaacacacaggagggtggtgcgtgccctctgctaggagcacaatgcgtcgctggcgttattagaggacatctctctgagcggagcaaaggtaatacactggtggaagaaaagaaaaggccgaaagtggggacagaaattaagacgatcccattcagtctcctctggaacgttctgcaaaattccgtgagaccctggacctacagcgatgcactctcagggactgccccggccttcatccccacacctcaaagacagacgaaaagcagctgagcagatctcgcctcgggcaatcctaaacagcctctaccaggcacaaccagtcctaggccccgggcggcaaccatggtccgggggcagctgacttaggacagcctccctgtgacccgccctcgccggcacggcgccggctccgccccttaagccccctaagtcccgcctctgcgctcccggggcctacccccgcgctcatggccccgcccccgcttttcctaccccatcgcgccctggccccgctcccacactctatgaccccgcctctcgcactccaggcccgccccacgcgctccagggttctgctctccacccatttgtgccaggccacgcccccacacccatggctcctcctctcgcacgccagggcctcccctcgcgctctctggttcgttctccaccctcttgagccttgatgccgccccctcttccatggccccgcctctcccactccaggcccgcccttgcgctctcgggttcctctctccacccactggtgccaggcctcgccccgcgccagggcccctcccccacgtgccctcgggagtcccggggaggagttgccgcgcggaggaggcgtggccgcggtgcctgcggaggcgcgagcggcgcggcgcggcgcggccgggactttggctttgacaccgactgcgagcgggagccgtgcggctggtgctgggtctggactggctctggcggatccccgcccgagttgggcgcaggactttttgccggggtaaacgcaactgcggcggcgccgccgcaagccccggtgcagcctcggcggcgggtttcgccgccgctgccgccgcctccgagcagccctgcggcttctattcactctgggagagcgatgctaagtttctcccatagaaagagccgggacacgcagaccgaagcggcgtagtcggcttccagggcctgaccagtgacccacacccgcgcggacgcctaggctggaggcagggggcccgtgctgtcccgggctgggctcaggcttccgagccgcaggtggaagaggaaccggcgccccgcagagcggccgagaggtggggcgcggggacccgcggcaggtcgggtggggggtcgataagccccttctcagtgcccgctccggggagcacggacttcccaggttgcaggtagcgctgtgtcagatgcggagcgtgggggaggtggagtggccaccccgtctgcgcgagcccaagtgtgggtgacccaagtgtcagagttgagagaggcctggaggagaggcatgaggctgatggggataggtctcttcccaagagaagcggctcgtagcctttttggactccagtgtgataaaacccggacgtccctagaggagaatccacatgggcctagcctcattgtgcctgcgtttttaggggttcacgggcagccaccagtccccgactcctggttactaactctagcactaggtagggggtgctaatgcaaatttcttaattcaatgggtttctatgtttattgatttattttctaggcggccaagtgaaaggtaattttggacacgccaggcatggaagattcggtgtttgtctatagtaacctcttcagtccctgaatcctgcaccttccgtttttctgtgcttgtacggcctactgggcttcctccctagccagagagctcttctgcagtggtgcggccttcccgggagcctgatcctggcggaccatggggagcaccctgggctgccaccgctccatccccagggacccctcggacctgtcccatagccgcaagttcagcgcagcctgtaacttcagcaacattctagtgaatcaggagcggctcaacatcaacactgccacggaggaggagctgatgaccctgcctggggtgacgcgtgccgtggcacgcagcatcgtggagtaccgagagtatatcggtggcttcaagaaggtggaggacctggcattggtcagtggtgtaggcgccaccaagctggagcaggtcaagtttgagatctgtgtgagcagcaagggcagctcagcgcagcactctcccagttccctgcggcgggacctgctagcggagcagcagcctcaccacctggccacagctgtgcccctcaccccacgtgttaacatcaacacagccaccccggcccagctcatgagcgtgcgaggcctctcggagaaaatggccctcagcatcgtggacttccgccgtgagcatgggccctttcgcagcgttgaggacctagtgaggatggatggtatcaatgccgccttcctggacaggatccggcaccaggtgtttgctgagaggtccaggcccccatccacccacacgaacgggggactgaccttcaccgccaagcctcacccgagccccacttccctgagcctgcagagtgaggacctggacctgccgccaggggggcccacccagattatctccactcggccgtccgtggaggcctttggaggcacaagggatgggaggcctgtgctgaggctggccacctggaacttgcagggctgttccgtggagaaggccaacaaccccggggtgcgagaggtggtgtgcatgacactcctggaaaacaggtgaggacaggaaccaccatgggtgttgggtgtgaaggcaacttgtgcgtgacctcatctatggatgcaaatgaatggattcttttgcgggtagggagggtgcaagagtttttaatcaatgttcttgaagcctcagccaataccgtcacctgagaatgggctgtccttctgctccagaattttctgaatacagctgggcttgtgacccatgtcttgagtgtgagatatctgagactgattcataattttggggtaagcagaggttgtgtttttgttactgctttggaggatgctgggtctacaccaagtcaggcactcagagcatgggaactggtgcagt

SEQ ID NO: 48488 - DNA, 1038 bp, Homo sapiens
tgtaaccttttctgtgccatagccagaaaaaagcaagctgacgtgtgtgtgtgaaaattggccggattttccccatttaaaccaaagaaaagagtccagtaggataggccgttaccacagagcgtttatgttattcacaatactgctctctgtaggaatttctgttagcctcgtcataaacaaaaacaatattattttggcagtaactcctgctgttagtaaaatagcaaactgtataatgtaatcaggtgtgggaaagaaagaaatatttgtgatggtcccttccaggtcataagagctgtgatcctggacttgaggcgttttgccctgccacccaccaggggtgcagtgtttgtggctactcgttgatttcctttgcactgagttgttggtgaggctggcggcgggggggcagcagtttggtgacacgaagtgaactctcagcgggaaatcacagtgcatgatggcagatcaccaggaaaattagtgaggagaaaagcaggtcacaacgtttccttggcactgacccagtggcatgctctcatcactgagagagggactccacactgggtcagggaactggactggggagcccttgaatgctctccctgcactgctgtgtcctctcttttgcagcctaactcactccttctgcaaagtcttcttgtgcacaggtgagagctgtactcggcaccgggagatatttataaagaatggcttgataattgttctctttatccatagcagcatgggcgtgtgaatgggaaatgaggaggggagaggcaggaaagacaaagctgcttaattcctattatgctttctagtggctcaatttgggaggggggtgatggattaggatcaaaagttggtccagtgggactgaccaaccaggcagcccctgcctatttattatgtcagtggtttctaaagtgtggtcccccctggggaccagcaacatcagctactgactcagaaactttgtttctgtgttttaacacaccctccaggtggttctgatgcacactaaagtttgagaac

SEQ ID NO: 48489 - DNA, 1893 bp, Homo sapiens
acattgtattaggcattctaagtaatctaaagatgaattaaaatatactggaggatgtgcataggttatatgtaaataatatgccattttatatcagggacttgagcatcatggattttggtatcacaggggctcctggaatcaatctctgcagataccaaggtacaactgtcatttttattttcccctttgattgttttgatcatccttataattattcaaccttgtgatattctttctgaccaagcgttgaggagcttattcatcttctaggacctatgaatgtgaagggtagagaataggagagtgagcaaagacggctggcctcagcgctggctccaccctgcagcccactgagcaggagacctcacgactcttgtccagtgtgaaggttgtcctgtttttttcttctttgggtttcctagagagatgatgatttgctgaagacattgaactactgtcgtcaggcaagagtacaggaaaagtttacccaaacccaccagggtgtagaagggatcacctgtaagtgactgggaaggtgacccgcaccgtcacattctcactcttggccaaatgtgttggaggttgatggttctctttgcctggtcacaatggattcagtattccagacactcctagcacattgttaatgtttagtaaacatgaactaatggactcagggcctgatccccttcagagtagggtgagtgctttgtctgtatgactgtcctagggtatcaaaagctgtcacagagtagatctcgtgtcctcaatgatagcagcacccattctccaagagctgtgtgttcgtcctgattcacagaaatctctccccttccaattgttcccgtattagtaagaggaaatacatttagtatgagcaagaatgggtgcaggtgatttctgggtggctcttatttacatccatgtgtacctgtaataaaagagtttcctaacttttgggtatgccttcgtgctttctaacagctttcccatttacttgattttcctagtaagtctgggatgtaggtaacactgacttttattaatgattcttcatctctgggtaaggaaactaaaatcaagtaagttagatgacatgactctatcaggcagctccttagtgactcagctgggactgcgacccagaccttctcactttagacctatgccctttgcaagcatgctgtgttttgtaagcacgacacctttaacctgcctcttggttagacacccatcctctccctcatcaggcgcacttgctaaattgtgagccagtcacagtgtcttaaattaaatccattgtaaagggattttaaagatacccttaggcagttcctttgcaaagggaatagctggctgtgaatttgctttagtaggtgtgttttcttaggctgaagggtagctgtatgggatgggagttagagtcttctctttaaccttcttacagcatgtgtgagctataagaaactgttttgcaagtgaggcgtgaggtaggacagcattatttgataatcatacagtcaccaggagccttcagggatgccatgctggtagcacagaactgacaggtttcattagattattttgccaaatctcagtcttaggcaatactcttccttgttcggtatttatggaacaagattaaaggggaatgttcctgctaaatatgcttgcaaaatttggaggtagtccacatctggaatgaaaattggttaatatttcatttttacttatttattttttgctgggaagtcattctgttttgagagtctctttggttattgaaagtataaaccctaagggagctgaaagataatctccaaaagaaataagaagatttaacatcccacttgctcattttccctgtggcctacataagaagagaacttg

SEQ ID NO: 48490 - DNA, 435 bp, Homo sapiens
tgtcagtaacaaataaaatgatagattttactgaaattctatttgctcatcatggacatcctggtttgtgtgtggtaatttatacctgggtagaatttcacactgatgacttctcatatcataacatccaggaaatgccacaaaaatgtcctgctctacctgacaggctgttagtcctcatcaaatatttaggaatcttagcagcttcctcaccctccttctcatgagtgttgtacacatgccaaagttcttatgtaatgtcttgattgacagcagccaaattgctgaactcaagtggctgggaaccctggagaggtgtgctcagagtaaacatttcattataaagggaagtgtggaatccttcttgcagactcttgaataaagaaagcctgggttggctgggcacggtggctcacacctgtaatcccaactttg

SEQ ID NO: 48491 - DNA, 529 bp, Homo sapiens
aagggtaatttattagtgaagaaagaaaaaacttttaatttagtgtagcctaagtgcacagtgtttattaaatctacagtagtgtacagtcatgtcctggaccttcacattctttcaccactcacccactcactcagagcaacgtccagtcctgcaagatccattcatggcaagtgccctacacagttgtaccatattttagattgtatactgtatttgtactgtacttcttctatgtttaaataccatagtgttgcaattgtctacagtcttcagtacaataacataccatgtaggtttatagcctaggagtaggctctagcatctaggtctgtgaaagtccactctgtgaagtttgcacaatgatgaaatcgcctaatgatccatttccttttttttttttttttttttttttttttgacagagccttgctctgtcacccaggctggagtgcaatggagcaatctcagctcactgcaacctctgcctcccgggttcaagcgattctccttcctcagcctcctgagta

SEQ ID NO: 48492 - DNA, 3670 bp, Homo sapiens
taggtgggagagaagggagtggcctgtaaagtatttctggcctctctggagctttgcaaaggtttcatgtgttcttgcccatgcagcctgcaggttttgggtcccagcgctgcatctggaggggtaaaagcgtggtgctaagtgatgatctggaaaactgagcaggttaaaagcatagaatgtgatttttccccacgtgaaatggcattggatttttaattatgtatttaacttttgaaaatggtaagaaattcccaaagtgagcagcgaggtggggagtgagtagcaagcataaaccaggtctctggctatttttaaagtgtgactgcctcagcaaagtggagttttctgcaaagtggagtcaaggatagcagagagtggcacagacaaaaccccatagaaactctctctcagactctggggtaatgggggcactgacctaaataaggacaggaatctgccaagtacaatgagctcaggctgcaggacaggcggaattgagggcgctgtgtcttccattcacacaccggccctgtgtgcattcaggccccagatgacatgtaggccactgccccatgccagccagactgccccagccccacccacagaagctttcctggttcaaagggcttgattgaagattgagtgataacagggctaaatccctgaccagaaacactagccgagacataggattttatcgtaataatcccaagaaatgagcgaatctccttgggctccagggctaggtcagagagaacagttctcagtggactgtcagccatggggctgtgtgcaatgtgagccacatatgcaattttaaattttcttttaaaaaggcaagaagaaacagacaacagtcattttaatattttttatttaatctagtatatctaaaatattaacacttatgcacataatcaatatgaaaactattaaggaaatgttttacattctttttgtgtactcttcaacatctcaactcagatctgccgtatttcaggtgcccagtggccacatgtggcttatggctgccatattggacaccagcactagaagccatacactcagcaccttacagagtggggctggaaagctgcaaggatgctgtctgggcccatgaaatccttgcatctcatgtagagtcctcctaatattcatctgccattaaaaacaaaagcattacaccttcataagttataggtaataagaattatttacattttcacaggcccttccagttacaggacactttggtatgttttcctgtgcacctaaaaactctatgaggaggctgagcacagtggctcatgcctataatcccagcactttgggaggctgaggcagtcgaatcagctgaggccagcagtttgagaccagccaggccaacatggtgaaacaccgtctctaccaaaaatataaacattagccaggtgtggtggcgtgcacctgtaatcccagctattcgggaggctgaggcagaagaattgcttgaacctgggaagtggaggttgcagtgagctgagatcgtgccactgtactccagcctgggcaacagagtgagactctgtctcaaaaacaaaaacaaaaacaacaacaaaaaaaactctatgagggaggcaggcagatatcattcttttggcaaaaatttattgagggtctgccaggtgctaggccctaatttgcatacaactcctgcattcctagagtttggattctagtggaagaggaaaacaaatcatgatgtcagcgtggttcgaatggtagtgggaatatgagtgcagctcggcaacacatgagaaacctttaatctgcccatgatatcaggggatgttcttcaaaggagggatatttgattagaaaaatacagaatgaggagctctgtgctgggcagataagtgagggtggaaggagcactgcacgttctgaacatagtccatttggggcagaacttctgaccctggtatgtccattttagaccccagacaggttaggccacctacttgaaatcctaccacgtgttcacaggagatggggctggaacccaggagtttgagctggtcagtcctcaagcaacaattcatcttgaaaaggtggttctttatgcaaggtctttaggacggggataagcgtgggaagggttccagccctagaacctgctcgatcaggtgacctcaattccagggtcctttcctgcgtgcagctaccatttttggttttgaaatctgcagaatattttgaatacaattctgctgtgtcatcatgctaaagttcagtaaggatgtgtgcttgaagtctgtttataaagtgtttctactttagtaatcctcgagtcttagaagaagagtcaccatttcctggagattttgaaccccaggtgaactggctgcttgtctggaatctcagtgcaggagtttttttttttttttttttttttaacctagacagggagccagtctcttgcctttgttcacacaggccattggccaccactagggcagaacagagacagtgccagtctgaagcctgcggccctccaggaacggtgcctcctctgtactcagcagtttttatttttatctcatcagcgtgttcctccttttgaagtgtgaatcctagtgacccaaatgagctgtctgcctgggcctgggccaacaggaccaggttacttgagttcagtggagaccctgggctgcggtggcagggatgctggttcctgtgtgactggatgggggtggggtaggcaggcttactggggccagaggcacaggcagcctgctcaactgacaaattttcaaaccaggaggacttcatgctaaaaataaactggatcctgtattccccctccctcatttgcttcacagcagccctttacaaagagtaagcagcatttgcacagtttagatgttaacatttagaagtgcagaattaagcatgtgtacctcacagtgtttggctgtggatgcaattcaggcccagtggctttgacagttgtctccatgctgatgcattggaacagtgtggtggagagtggtttaatactcagtggttgggcattgggggtgtgctgtgtcactggaattgagtggtcagcagtggtgcctgatgctggaggcagggagtctggtagagtttgagaaacaggaaggcagatgggccccctatccctctgttggctgatgcctgagacacacttggtttagagggaagagaaagaatacttgtgggtcctctatgctgtaacaggaactgtactaagtacttttcctgtgtattcctgtgagttccacacaactaagcatatcctcattagaggcagtgatgcttcaagggtggttcccagacagcagcatctgcgtcacctgggaacttgttaggaatgcagattctcaggccctgcccatggtctatgaaatgaggattcaaacggggtccagcagtctgtggtttaacaagctcctgggtgatccccgtgcacgctaaagcttgggaacctctcctggagaggtagagcgcagacctggagctagactggtctcaggcctcaggtgtttggccttcgacaagttgtgcaaccatttctgtgcctcagtgttctcatctatgaagtgggggtaataacaatggggttgtgtgggattacattaagcaatgtatgttaaaaccagcc

SEQ ID NO: 48493 - DNA, 1440 bp, Homo sapiens
ctgggattacagacgtgatactgcaccagcccttgctgggttttagtagtataagaatgtctctggtttgtttgtttttgcccctccccctactcctaatgcataatactatttggtattggttttagagcagaaaataaatgggtttttatctcatatgccgatttcagtagattggttgtggctcactggagtgttgagaagaatttggaagctgaatctaagttcagtgggggagagttctgtggaggctggggggttggagggtagcactgtgcatgccaggcctgtgccaggtgtgttctagaggacagtaactcatgagagcaggacatggcatccttcaggttttgacttaaatcagagtcagttgaagttattttaatgtcattttcattttagagcctgaaattgttggttttcaaatcttgttctgctgtggcttgaatgtaatatcttagtgaatagtagggagaaaaatagagctgaatattttaacagtgttgagatcttttctttaagctgttgccatttgatacctgatactaaattggacttcatgaccataaaaggggcaggaatgggagactatctgaaaagtccctccagtgtaaatatttatcatggttatttcagaggcagattaggcttctgaaatttgagctacaactggatagtcctaacttagcatataagttgctgtccagattggtaacctggaatctagatttgcacagtgggaatcagaatgtgctgaggagtggccaatggccttgacctgccaccaggcatatttcatgaatgacagtcagttacataattcacgtagtacctttcaacaagggaggatccacccagtcatcttgtttgaggcattcttttcagaaggagaaaccgaggcatggcctttgctattacccattcaggctggaatgtatgagctatgatagcaacttggcctgaaggcctccaggcctggtcagcaaataaattccttgagcgctttccatgtgccagttgtagacaccacaaatgtaattatgagcaagaatgtctcagcccccagcctcaaggagcttccacgcttgttgggaggagacagacaaaagcaccccgatatactcatgcttcaaggtagcacaaagaccactgaagaaaataacatattgtgatctgggatgctggtttaactcgggtgtccagggaagtttgcttggaggagatggcactcccagttagactggaatgaggggatgagacagatggtgttggaaagatcctggggaagacccctccaagccagagaaacaacaaacgcaaacctgcctaagagatggaacaaaagccaacggggttggagcagagagaacgcccacactcctgtccatgagcctggatgtttgctaatttgttgtttgttttgttttttggtgggttttt

SEQ ID NO: 48494 - DNA, 1811 bp, Homo sapiens
cacaaacttgccactgcatcttgctctcagtttcataatagcccttgcaaggtttttctggttttttgttgttgttttttttttttttttgtgctcccttcgcttatttgtaaccatcttgctcaggaaccatgtggttggtatctttggggcacatggagaggctaacagaaccagcagtcgctcgtggtgggagagcacgtgggtgtcacttaccttggttctgtaaaagcagctaataattagctggtggcgggggctgaggaaatgtctccttgtttgctttctaccttcctctgcatgataagaattttaaacaaggatgcaccatcatgcagaatgccttcctggcccccatggaagaagaatggggaagagccacccttcaagtggcacactgtgacacaggagcaggaagcccatggcttctcttgacaaggaagggtgggacctgagcatttagaacagggcttccttacaaagctctgaatgctaggcatgtggcacggagtgggcatggcccaccagccccggcccctcctgggaggaaagttgaccgatgtactgacctctgtgtgaaatctgggtcatcagggcctatgtgacccgaggcatcagtgacgaaattgacctcagcagggtggtgactgtgcagctccagggaactcacaagttggaatgcatttggtgcatgcttacacacacacacacacacacacacacacacactcacgggtcgattggtttctgtttactgagtgtcagtaagtgacccggctatgttacctttctgagccctggtttcgtcgtgtgtcgaatgggactgttattcccaacctcccagggttgttatgaggactgaatatgagctgtgattagtgcctgccatatccttggtacttagtaaatgttggtttcctttttctccccattcctccccctggctttttttaaaaaacaggactcaggagccaacctcatcatagcttcttggccacctgtgtcttcttaccattgttggatttacccaaattaacctcttgggattactacctaagtaaataagagcttaaaagtgagctcttattccaggcagtttaggaaggggtctttaggtggagctcacatggcaattatcacagagaaggagggagaaaggggttttaatgtttatgagactcatatttcctctctcagttgtatgctagcccctccctcctgccttttcctcccagagttctagaatcatgcacttttagaactagaggtgccctggtctggagtcatttccccccatccctttgcttaacagatggggagactgaggcgcaaagatgttcagtgatgtgtgcagggtcccagagctcctctgtgctcctctccttccacccataaatgtggccctctgaggaaacttccaaagccacgaggaagcaagcccagctcattctttcattactggaaaaggataattgctcactgagcctttaagtgacccggggaatggcctgcctcttctccctccatgagctcctgggccagtaggaatggatcctagaggcagtgctgtggcagtgttgtgtgagggttcaaagtggccctggagcccccaagacacactgctccctgccctaccttgggcctgccccctctgggatgcatacctgcgtttgcgctggagcaaaggtagctacaccttgtcttggctctgcaggaacccacctcctctctttgaagggcatgagccaatgagaaatctctctcatacagactgagggagaaagaaggttgaaatactccttgctgttgct

SEQ ID NO: 48495 - DNA, 1505 bp, Homo sapiens
ttacaaggatgaaaaggattctgatgactttttttgaactgtttgggcaggaatgctacagagagaatcaatttctgtgaactgagagtccccaggtgataatttggtgtttcacacacaggcagttttctttttaatgtgtggtgcttgtttagtcatctggctcttgcaaaccctagtgtttgaaaaacagggatgtagttcagcagtgtctgaataaggctgatgactcagaatcatgcagtgcctggcttctcaggccgccgccagccgggactgctttaggcgcgaacccacgcttctgacctgtgctctgtctttgcagttctgcacggagctaaaccagccgaccctgcccaacatccgcaagtggaaggggccccggggatgctggaaggctgttgttgctgagaagccctcgagtcagctccagaaggtaccctcgtctgcaaagcctggcctttcccttcatttaatttatacatacttttcccctaatcaagggcatttaaaaatttcctttgccaatatccccggttcaattttgtatttctgcccaatttttaaatccttgccattcatttccaaatgccctggttttcggttcacgtttagattgggaatggactcctgccaagaaggaaatgagagcttagggtgttgggaggagaggaggggagaaaggcaacaaatgggtatttctgtcctttgtccttctaatcccttcgccacagttctgtcttctgccaagtttgtgcagagctcattactcgttgactgaaaatttcagattcaccttagttcacacatgaagtatttgcttctagtggtagaaattatgcacataatttcaacatagaaatgttctattgaaatgttcagcagattttggttttgaattttctttcatcagtatcacccatatgagcaggtaagggtaaatctctgtaaatacacgttttccctcatattattattcaaggccagatttattcaccttgcaatgcttaacatcaatggagttttagatttttaaacagactcctgataataaccaggagttgaaaatgtattattacataattttcctataaatgcagatttttaaatccctagtatacctaacatgcttacaaacacatgtgatttatacttaatatgattatgtttataatgtaggctcttaaatcataaatgtatactggattaaaagtggccattttttgacagtaagcccctactctctttttagctactacttaaagaggtacatgtaaatcttctgtctctgggttttatgtttgggggtgtaaatggctcctgcagctgacagtgagtcagcacacattcagagaaggctggagataaagctgaatttgaatgcatctagttcagggttctcccttccagtccacgtggaaataataagaataataccaccttccttttttgatcgcactttacatgtatgtaggtgtctgagcttcacaagccttttatagtcc

SEQ ID NO: 48496 - DNA, 3639 bp, Homo sapiens
gtgtgtgtcgcccaggctggagtgcagaggcacgatctcggctcactgcaagctccgcctcccgggttcacgccattctcctgcctcagcctcccgagtagctgggactataggcgcccgccaccgcgcctggctaattttttgtatttttagtagagacggggtttcaccgtgttagccaggatggtctcaatctcctgacctcgtgatctgcccgcctcggcctcccaaagtgctgggattacaggcgtgagccacagcgcctggccagaatttcctcactttttgaggctaagtaatatcccactgtgcatccatccaccatagtttgttgcttatccattcatcttctgatagacacttgggtagcttccacctttgtcctgttgtgacaacgctgctgtgaagattgatgtgcagcagcttttcttttgaaccaggacatgccgtgaccaacgttctactttaaggatgagtcctcaggctaaaaacagtcagaagatgctctatccaagaagcaactgtgtgggaaattgtccacctatagttagactctgatctgtaaaatggacaacttgatagcttgtcacatctgtggacattactattgttcttgatctcaaactttttgtggaagcagaaaggaaagatgccagctcataacttctttgacagccttaggcagtcaccatccccccaccccacccctggtatccagggagtagtcaggattttggcagaaaaccttgggcaggttatgttccaaattgccaaggtactattgacccacagcctggcttggccttgactcatccaagtagggacaatgactcatgctgcctgtgtcccctgcttgtaactagtacccaattaattattaactggtgacactccagacccaggggttcaggaagcaattcagcctgcccaggtctaacaagggtagacaagtcagcagaggggttcagctaaagcaaagacaaagccttcattccacagcttctatcagagcaaacagaaccgatgtggttagcaagctccgggcctttctgcctttgtctggaacgtgcatgcaggctgacgtcagtggggatatgccagtcccctagtggaaccttcttccctcagacctcaccaggacttggggacagggtctccctctgtgaactgagcaagagtgaaacagggtgtgtagtaactcttgacatcttggcagatggtccctcagtggggactggttcctgtagttgtcattggcgttttataaatctagagactctctgaggaagtcagcccaaaacgttctcccctcactgctgggaatcaagggagcgacaaaggagcccagcccaggtgggtggctttttaggaagataactcaggctcctgcgcatctacctgtggattctcagaagcaacaactgccttgatgtcatcaccgacgcggattcaatcggaagaacatgagttgtaagaaatccgatgtgctcattcaaaaagggaaccgttgtcactcctgaagctacacagagctggctctattgacccttgacaccagcgtctctcctggctttagaattgtctttttcagcccagacctttgcaggcctgcatcccaacgaaaacctccctcattatatgggaactttgttttctttgatattcaatgaatgtagcatctttctctttgttcctttccaaatcaaactgcaccctaattctgggacatttgtggttccgcttgtctgttgctcacatatttattgagtgcctgctgatgcacttggtgtcgcagtggacagcagccacttccgtgtggtcttccatcctagccctttgtggtgagccctggatttgaggcctggcctggtgactttggacaaaccttcccacctctgggagcctgtttcgtacctgcagaagggagatggtaacagcacctgccccatgggtcgtggctgttaagtgcggtgctatcgaggaagtggtcagcacagtgccatgactattattcaagctggcactgatttctccatggtgtgggtggccctgcaggagaggcttccttccatcccacccattgtcctcactcctcctagaggagggcgccatctgcaatgcacatgcgccctctggtggtggcctgagtggcttcccttcagattcctttccctgcagttgttattacggaagcacacccgtggccaggaaaaaaagatttgccaagtgtcgtggatacatttatgacttcgtttatgaactgctttccctaaagcctccttcacaaggtgtggcagaaatgccacctcctgctgtgggacaacaagggtcaagcagagcccaggggaatcccgcagagcccagctggggggcgagtgttctttcaggatttctactcgctttgcttggaaaatacttcataactatcccacttcctctagggtaaatcagactgtgggagaaatgtctaaaatgctttaggagaaaacctttcccccttggccctgaaatcactttgtagttcttatgcacacatatttaacttccactgtgtgtctctccctgacaaacctgtgaagctgtatcaggaaactgatcaggaagggggcccacgctacatgtgagtgccccgtgccaggcgcttctggcggctcctctaatcctgacaccaacctgggaggaaatggcttgttctttcccttttatagactaaaaggcttgcccaaggtcacgaagctgggaagtgacaaacttcaaattccacactcagagtcatccagctgttttctcttagaaccggggccgagaaccactgttttctttctttcttttttcttttcttttcttttgttttgttttcttttcttttctttctttcttttctttctttttctctctttttctttctctctctctgtctctccctccctccctccttgtctttctctctctctctctttctctctctttttctctttctctttctcttctttcttttcttctttgacagagtctcactctagccgaggctggagtgcagtggagccatgttggctcactgcaacctctgtctcccgggttcaagcgattctcctgcctcagcctcccaagtaactgggattacaggcgcccaccactatgcccagctgatttttgcatctttagtagagatggggtttcactatgtcggccaggctggtctcaaactcctgacctcagtggatcccctgcctcagcctcccaaagtgctgggattacaggtgtgagccactgtgcctggcctagagccactgttttctgatattctcctgtgtcaggttttgtttcattttcagcccctctgtgaccactcttcctcctagctaatttggattcataagtcgaaaagaggacttggaagaataggacacaaaagtgtcactgttttcagagaatatgattgttggtttgttacacctaaagttaaaaaaaaaattattcccagtaagagaattaagaaaactgcctagttaaaaagttaaaataaaaaattagtccttttgatatatatcattagtaacctgtggaaataaaaaaatttaaaaataaccattagagaaaatataatgggataaaacaaagatcccattcataataaaa

SEQ ID NO: 48497 - DNA, 1242 bp, Homo sapiens
aaggtaaccaggctagggctgtacaaggagaaagggcagagccagaatgcctgcccaccagcgttgcacttctaccagcacgccctgcacccagaggcaaagtgcctctgcctgggcttagttggacataaactcttacaccacagacagagtgggtggcacttctcccctgaggaccccgggtgtgttgtcactgctccatggctacatgcccaggatttggaggcagcaggcctggcttctgtcccagctctctgtgtcatagctgctggcccctgcacgttcaagatgtctggcaaagtcccagttttcttgtctattaagtgaggacaaaacctctctgagaaggttgtgaaaaacaaacatctgcccagctctcagggcatctgactgcagggccagtggtgtgacactgcagggaagccatttgtttcaaatgctctgacacatcataagggctcactaagtggcagcgtttctaaaaataatctttcactgcttatttcttagtgtttacattgtatccccaggctctctctgctccttccaagctttgtggtttcccaatagcatggaattctatactttccactggtcaatttgggccctcggaagtagggacccctgggccagtggtacctgtcacatgcacactgattattaagaaaaacccagaggctctctcagggccaaaaaccgctgctcccaggctccagctgttcctggtagagaaactcagtgggaaactcaataaagcttctctggggaccacacacacacagcaccttggatttaccatgagcacaaggacaggaggccactgggtgaattcctgtggggagggacagccaacattccctgggatggtcactgaatttggcaggcccagcctctccaaggagtgtccgcagagcagcctgcatgagcagacacattgtgagtggtgttgtgaggggcttgggaagggtaggtcatgcagtcagggggcaggtcattgtgcttctagaggaatcagccgggagaggattggagacgacttaagagctcgtgcctcggcatgatccaccactgcatcctggagagaaaacccccctgagaggggcagtgtttgccaagggatgctttgttggtgcaggaattgaggtttgagggtgaatgagcaaaggtgttggccatgcagagttgtgaggatgtgtacacaacgacacgtgctcatgtgtgcacaccagataccctagtgta

SEQ ID NO: 48498 - DNA, 1204 bp, Homo sapiens
ccgtactgtaaaatggcctattaataatatcaactcaaaacgttctcactgtttaagaataaaagcatacacacacaaatatacacagtataaataatgaaatatacagatgtgttctttcgcttagcttattttttctgaacattctagaaaattatgaagcttaatcacacacctagcgtgttttgaaataggatttaacaatctttggattgtacctttgtaagaccagcaaccggtctaatattacaatcttttccacgagattccacagcaggtacttactgataataagtgacgaaaggataaggggccgatttctctcttccctccacaggtttttcgcgagcgcctcctgcgcgccccgaaggggtcggggcgcagggtggagtcccgagcggcgcgcccagccggtggctaccattacctgagccccgggcggcgggaccccggtccgccccgcacccccgccgcggccagcccttcccggcactcacccgtcacgcgaatggactccagcatcgtcgccccgaggcccggggcggcgggctccgcgggctcaggggaaagggccgcgcaggggcgggcggcctctagcctctgacccgggcctcggtggcgggggcgcggcgggaggcggctctccgctacctggagcaggataaggagggtaagggcggacgaagacgtaccgacactgactgtgagcagcgcttccaccagcccgtagctactggaaggtacacacggcggccttacggtgcccagcagcgcttagaacctgccaccgtgacgtagccgctccgccggttgctaggaaactgcccccggggtccgcgcgcgctgcgcttcacggagcctgcgcgccgctgggggcgctcgtgcgacgaaggcccgcgggcggcgagagagagtgggaggaactacaactcccggcgtgcacagcgcgggccagtgcctccggggcttgtggctgtgcccgcgagcgcgctggggtctccagccagtgggtaacgcatattgactgatctttcagagacgtttgtacccgttcaaaggtgacttaactccatggtgcgctgtgacactcggccctagctgcaaatagcaaagccagtctacccgtccttccccttacgaggtgcggggaagctaaaacacgtttaggatgagctagtaagagtggaaagtgcaggaggctcaa

SEQ ID NO: 48499 - DNA, 1351 bp, Homo sapiens
ttcttttttgaggcagggtctcactctgccgcccaggctggagtgcagtagtgagatcgcagctcactgcagccatgacctcctgggctcaagcgatcctccagcctcagcctccccaaatgctgggattataagcatgcgccactactcccggccttaatactttatttaggaatgaaggaaggcgggaacacccaaacgcggttggtgtgaagcaatcgccttaaagctgaggggaatgtgtggttgttgggggtggagccaggaacccgacgccgttggagagcaggaagcgccccgctgcccgcctccaccccgcggcgagggctgggagggggccgggaaggaggcggggccgcccctgggaaccacccggcccggcgcggccacgtgaccgagcgcaggggcggggagagggcgccccggctccgcccagcgcgcatgctcgcggctcggcgctgaaattcaaatttgaacggctgcagaggccgagtccgtcactggaagccgagaggagaggacagctggttgtgggagagttcccccgcctcagactcctggttttttccaggagacacactgagctgagactcacttttctcttcctgaatttgaaccaccgtttccatcgtctcgtagtccgacgcctggggcgatggatccgtttacggaggtgagtgagtttgcgggtgcagccagccatgacccaccgctctaggcccccacccaccttcctctgtcaacctctgggcgaacccccaccgggcggagggcgcgtgtgtgcgcgcgtgcgcagtgtgtgcgggccggggtcgccgcggctgcggcctgctgtggttggtgggttcctctgagattttgttgtttcggtcctacagataaaactcagggaggaaggctttgagtctgtcctaaaaggctgttgcgagaggtctttcagcccccgtttttaccatgtccctctgcagtcctggcgcagcaagagtgaggcgcaggcctgcggaacgggtcctgctggaagcagctggaatgccctgcagggcggggtccggggccggtgactcagtgcggctgccgccgggaaaggcagtaggatgtgtgatttgcggagttcacgcagcccgcaggggagatgctaatgaaatgacagcaaaacgttaaaataagcaggtgctagaaaccactgcattcgttcataaaaagccagtagttccttgagatcccattgttcagctaactaacgaagaagttcatacccgggactgaccattttaattgaaacaatgcaagtgtaccgagcaaaactatcagctcacgattttagagcaaagaaataaacttttcggtgttt

SEQ ID NO: 48500 - DNA, 801 bp, Homo sapiens
gcaccaccacacccagctaatttttgtatcttttagtagagacgggttttcactatgttggccaggctggtctcaaactcttgacctcgtgatccacccgtctcagcctcccaaagtgttgggattacaggagtgagcacctgcgcccggcctgcttcttgaagatgttaaagacttgcccctaaaacaacctaaccttggtacatgttttgcagatagtttgtgtattagttatctattcctgggtaacaaattaccctaaaactgcgtggcctaaaatgacaacaacacgcagcatgtcacagtcactatgggtcaggaatctggactctgctctggctcagagtccgtcacagggccacaatctggtgtcagtccaacagtccatctcaaagctcggctagggaagggtatgattccagctactcatctggttgtggaaggattcaattcctcacaccatgttagaatgaggacttcagttccttgctggctcttggttggaggatgccttcagttccttaccacaggggcctccctatagggcatgtggtagcttcaacagagtgagccagcgagaagagccgagggagtacaagcaggatggaagtcgtgttttgcaacctattcttggaagtgacatcccatcacttttgctatattctatttattagaatcaaatcactagattaaaccatgctcaattgcagggaatcactggggggcattttagaagcttcctacctattgtattataatgtttaatttttctgtgtttcttggctcatacaatatttctac

SEQ ID NO: 48501 - DNA, 965 bp, Homo sapiens
tccatctaaaaataaaaagtaatggcaagccaggcaaggtgtcttatgcccgtaatcccagtagtttgggaggctgaggcgggtggatcacttgaggtcaggagtccaagaccagcctgaccaacatagtgaaactgtgtctctaccaaaaatacagaattagctgggcgtgatagtgcatgcctgtagtcccagctagttgtggggctgaggcaggaggatcatctgaacctgggaggtggaggttgcaatgaaacaagattgtgccactgccctccagcctgggagacagagtctcaaaaaaaaaaaaaaagaaaaaaaaagaaaaaaaagaaagaaaaagagaagtaggtgtcctaaaccagggctaggacagggtgcttgacacaggctaagaatctggcactcctcccaatgaacatagtttccatgtttgctcaatatttatttagctaaccattaaggggacaggatggatttttctcttttaaaaattacatgagctgggtgtggtggcacatgcctatagtctcagctacttgggaggctgaggtgggaggatcgcttgagcccaggagttcaagtccagcttggacaaaatagcaagaccctctgtttaaaaaaaaatttcatatgtcttttcttcaaatttaaacctaattattagactaaacttattattaaactaaattataagactaaatgttttaacttatttaggaatatcttttattttataatttttccattgctcatacttctatagcattactcatttgactaatgatgaatgataacaaatacatatagctgtaaaatgttaaaatatgtttaaattttttttctgactatcatagtggcaagtgatttttgtttttttggtagacttaccttgtattccttcagttttatatttttctggatgggacatccttttgggaggtttattaaatggttacaacttt

SEQ ID NO: 48502 - DNA, 610 bp, Homo sapiens
ctcaaagagaactaaatttaaacacacctgtgaaaaaaagatatgtatatttgtgtatgtcttttattttaattcttataaaagagttctttaaaaaatatttacatttatgttttcttttaacaacttgattaatatctcagtctactagtgtgactatcagtctgttagtgtgaatttgccggatttatgatgaaaattttggaaggagatcagcacttgaggaaataacactggcttgtcaaagtttataacttcagctttaagtggtacatgtacacttgcagtttccaatctcacccatcagatggtgccaatacttcactagtagttttgccacaatgctttgatatcctccgatgtggcatttgaaaagcattgaaagattgattacttatgctcttgataaagttaaggattttattattaattcagctttagatgtagttaaaaatgagtacaagtgtatgacacccttcagataaacgtatgctaaagaattaagcagcctgaaatgaatggagagctatttattttttatagttgtatcttactgtatatttaatttatgcaattccccaaaaccagtgcttcttcttcttcctttttt

SEQ ID NO: 48503 - DNA, 1013 bp, Homo sapiens
cttctttaatgtagtttatttgtaaagtcaaagaagctgctaatgaccagcttttcaaagatgtaatagaaacaagggaggaagactcataaaacacttgttcatcaaacactgtttgatgaacagcaacactagcagatattttaaagaaaaggctgctttctggccagccccataaagtcattggctgattttacaaatgtattcatggtgcggggaaccaagagccaggtttatgccaattgagctgtctgggaagttgagggcagctggaggtatatttaaactgtcagtgtaaaaatggctttgtcagccaagtggcattttctttcctctgttggggaggtgtggtgcagacaaagaaaaagaatatcacctgctcaagttggcatttcctgaagggaggaaaagttgctgcctctgtttagttcataaccagttggagaatgagtcagcaagagacagaaagtctttggagatgagtaatcatctttcagtgctggactgaggctgtcagggtggaaaatgaatgggtcttgtgcctaccctcaagtgacagggacccttaactgcaatttgctctgtcacaaggatgtgaaattgtgaattttagtatcatgaaaaatgagaatatttttgacacaattgtcagatcacatacagtaccaaaatgagaggagagattttcatgggactatcaggactgcagacttaataagtgactctgtaggattttaatttctgataaaagattacttttcttcttggtaatggatgcatttctaccataccttcctcgaaggaactcaaagtacttcacaggcgtgaatggagctggggggtgggttggacatcaggagtgaaggagttgcttcatacacacggatgatggtggtggcgggggacggccactaacagttactgagtctttgcaactttacaagttttgttttacttaatctttacgtgggttagttatttctatcctacatacaaggaaacaaaggctgggt

SEQ ID NO: 48504 - DNA, 823 bp, Homo sapiens
gaatattttggggaaaaatactgaaaccatatgtgaccctacacagaaacccccacacaccctactcttctgcacccagggcctgtctggcctgacatacccaggggaaaggcccccgggagatggcgcacaccactgctctggaggtctgccttccagtggggtctggcagaggaagttctgggagaatagagagaggatatatcatctggtttctgcctctgtcatctcaggcttaactagattaggtagcacagttctcataaactaaggctttaatatagacaacttcaagaaagtaatttaactctgtgcatttgatttgtaaaccttataatctcccgtgtgtgagatgagtctcatattgagggaaagtccctgtggccctatgattcattatacacacagaggcacacagaggaaaagagggagggagaggggggaaggggagggagagagagagaaacatcaggcaccagactgtgctgggcactctgttggactccataccaggcagctgtgggctccttcttcatgggactcaccgtctagaggagcacagacaataaacacttcccatctgggtaacctggaagtctttccttaatccttctgtgcttcagtttcattaccaataaaaatagcttaataatagtacctatctcattgggtggttgagagaattaaaaaagataatctatgcatgacgtttagacttgtaagagctcaataaatgttagtagcattaagggcagtccagagtactgtgtcagcacatagaagggacatctgccccacatgtggggctttcaagaaaggagtc

SEQ ID NO: 48505 - DNA, 1283 bp, Homo sapiens
taataatagaacagtgatagttgggcatagggctgcccagccagggactgcacttcttagtctctgttgcagcctggtatggccatatgactaagctctggacaatggggtgtgagaaagaagtgatatttgccaccatcgtgccaacttctcccaagggatatgtgtgccttcacttggtcttttttcttccctccaggtgacaggtggcaggattacgggcagctacctcagaccccaggatggaagctgcatgttgagaatgacctaactttcccccagccctggactgcttccctctggattactacataaaagggaaacacttccatcttaagtcaccaaatttgggactctgtgaccacagctgagcccatatcctgctctgttaagaagagctgatgcatccactcattcttgttggctctgaaatatatgttaccaacatgagaccatgacctctttgctgctttctgctccgctttcctttgagctctttagcggtcaggcttagtgatgctatcctcaatttctgcctctggaatctttggactttgtacttcatgcatgctcttccttatattcctgcaggaattaggtcatcactaatgacctaatttagtggtttagctcatcactgtgccctaactcccaaccatttccttgagtggaaattctgtatgatttccctaggaaatcatatagaagccagtcttgcctcctagacgtttgactagagctgggctggataatctctgcctactcccactcctcctaaggaattgcatggaaggaattagttgaaaaaacaatgaatgaacagtgtatgacaattaattccaaccacctaacattatttttaaatgatggaattttctctttccacatgccaatgaacttgagattctaggcgtttcccctgtgatgagtaatttcatgagctccatttgatggctaaggaatgtgggggagagtgaagcaggtgacagacataattaaccaggggacaagagattgtcctctagttgcagcagcaggctggatagcacaggcattgactgactcacactgcctcctgatacagaagtctttatttcatgttctggcagagcaggtatgtgggctgagtaattataaatgcttttcagaagtatggagtttaaaataatttcctcttgtagttttcataacaactggtgtttggctttttacttctctcagtaggcagcagggccaagatgatggatgttcccatgagcctgggagtgcaccctacatggctg

SEQ ID NO: 48506 - DNA, 702 bp, Homo sapiens
acttatttataaaatgacagaatcatatttgtcctacagacttgggatagttaaaaaaagataacttattagggtacccggctgtggggatggtacatggtaagtgttcaagaaatgtttgttgaggtatgactaagtaagcgaacatgtcagtggtttcattgttactgagaaagttgggatattgtgcaagattcttgaaaattaagctgtttatgatattttatgaaaactaaaactaaagctgcctttaattccctctggctctgagaagtgactattctgaatgtgctccagaatctatgctaaacacaggcagtgctgatgtgaagagctggaggtctaaagtccagggccctgggttgagttcagattccactcactacttatgagctttgagtaaaggctttaagcctcaactgcaaaatatgtttgataattttacctataaaatagagtttgacctgtgatactgggttaaaattagagatatcagtatgagctcacatccacatacacacacacagagacacacatacagacacagtaacaattgtaggtatttgtgtatacatgggttgtatacacatatactttacttagcactccacaaagaagaccaggacctaagaaggccaataagcaatgacatcccagtagcaatgggcatacctagcacccagatcttggtttccaaatacc

SEQ ID NO: 48507 - DNA, 1301 bp, Homo sapiens
aattacaattaaaatagaaacctattgtgttatatccagaaaaactacaattcaagaaagaaggcaaagaattttttttcacgggcagctcctgaaaattaatattctgtggcctaactggattcaatattatcctctcatccagagtgtgcggagggaattgtgtcaacatttgcagcctcctctccgcaatctaattaaaagctacacaaaatgatataatgcacacagggtcctctgaacagctatcactgaataataatgttatcaataatgatcatttagcagtcatttctcttaacactttaaaaactgtatcagttattgtgctaagcattttttacatattagctcaccgacttcccacaataaaccactgtgggaggtagtttatcataacccattttatgagtaagagcaataaggctcagcgtagggtgaccaactgcccaggatttcccaagatgtggggctttcagtgctcatggcaggaaagtcctgggcaaactggcatgagttgctcactctgtgagagtgacttgcttgatttttaagtgatagggatttaaacctctgcgtctctttgatcagatttcctacctactggcaggccagctcaaaattacagtccacaatggctgaacagcaaagacattctttctagcatggtagtatggatctaggccaaaatgcaggaatattatttcttgcggggtaattgaaaatgtcatcttgcctctccctgtccccaaaacactgagcgagtaaaagctaagcctccctttctaacatttccaaaagccttgcatgtccctggaaacagatgttcagagtgattacacactcaccttgggaagagggtagagatgacacaatggttggccagtgttctgtttacaaaactccagagtgtgacataccacatcagcattcatatctgcgctaagcctggagggaaacggtgcaaaacaaaggctattcagatctcttaggcattaggaaacagaagctactgcaaagaaaggtaaatccccagaatggattctaataccctcaactccttgcagagtggcctttgaccccaatcccggggagctgctggatggtaatgatttcctgccactgttgctctctcctgcatttagaatgaggtcctaaaggcgaggatggggcatgcacagcactgagctgccagtcagcctctcacgcgagtgctgggattcttttcaggcaaagccacacataaaattgggaaagaaaaagtgggcagggacgtaacttgatggaaacaatattttgaa

SEQ ID NO: 48508 - DNA, 1003 bp, Homo sapiens
cccattaagtgaataaaaatttgactgtcaaagaagtttattcattacgactgttcaagtaacagtattctataatggaaatatgattaatattttatttctactaatattgaaaaagaaatatgcaacttgcttgaaccaccaatcagtttctacctttggtggatgtataaggtattttattgagatctagtttaaattaatgaaatgttctagattattttcccatttgaaattttgagatcagttgtcctctcaacccaaagttctgtgttggtagggctaggtgtacatcttggtatgtgaatgttggtcaagttaacacaaaattattggaagttattcattattttgacttcttagtacttaaggcaatgatcagtaagtaggcaaattattattaatgtaacacatcaaacaacaattggccattcaacattttattccctaagggtccacagcaatttcattgtgccatgatggaaaatgaatgtcagggagaagttgcccagagcatttttttttggttttaatttctataagccccacaagaatatcaacccacagaaatagcataatcagattcttctctgtaagtgtgggcaggaagtaaaggcagtcatcatgactcatgagtgagaggacaagcagaccctcagcagtatgactcgtcccatatttaccaggcaggtagctgcacagtctctccatcgaggcctggaccgtcgagttgtgaacttgagcaagctgttctattacagacaccaccagcacacaccctgccagggaggagaagaacatgtaatctgtgtcacacagaaaactgaactggagggacaggagaaagaaaggatgcgtgtgtgtgtgtgtgtgtgtgtgtgtccttaagaaggccaacctttccaaaacagagaaagtgatgatgtttaaatgagatagtgcaaggaaaacagcccacatggagcagaagctcaatagatattagcttctctcctcccccact

SEQ ID NO: 48509 - DNA, 1436 bp, Homo sapiens
tagtaattgagagtgatccctaactgatggctgggaagcaaatgggagttcagtccggcaactgcaaggaaccgtattctgccaacaaccagtgaacttgcaagaggaccacagtctcaaatcagactgaagccctggccaacattttgacttcagccttgtaaaactctgagcagggaactcaattatgttatgtccaggcttctgatgtgcagaaactgtgaggtaataaatttgtgttgatttaagctgataagtgtgtggcaatttatcacggagcaatagaaagctaatacactgtgcaatcttcctttataaattaatcttcctttgaaacacccaagatttgagaatttctatttacttaagatacaggttgccatgaaattattcagttactcaggactttttgccttacaataggtttaatttcacaacttctggagcacagtttctatgcatttctttcttgatttccaaaagaatagataatcacaacccttttgtgtccttgctatgtaccaagcacagttctaagtgacaggctgttcgcatcaccctgtgtaattctcattttgcagatgaggggagtgaagtggtgccgagggtgaagctatgcccccaaagtcacatttgtacagagtggcagaaccaggattcaaatctgagagccccacactctgcaggtcttaaccccatgccttactattgcttccacaagcacattatagaaagtgtggaaaattcagaaaattactgagaaggaaatataaatcactagtaatgtcttcatttagagacagccatgtaatcactatgactattttggcattcattctgtctaggaaaatagctctgtcaatagagaggtgggcacattataacttaatggggattttactctgcttaatgctttacaacttcttcttttttcccttttccataacaaattttaaaatattctgtattcttacctccagtattaatatatttacaaaaaaaaattacttcctttgttcctgaagcacagcatgctgtcatcatggattctttcggtattgctcactgtgtgacctttccccaaagtcacaggcccttctcagagtgtccctgtggtctttctcttcaggtttccacctcagagcaatccaggaaagagagaggcagacaggtggtgaaaaattcagatgatcagaaacctaccatttgtgctaaagttggggttaaatgcaatgataatttaaaaataaaggtaggagattatggagaagagagagtgtatgggaactgccacggtaaagggcacgtgcagagggcagtagctgtgtccagagaatgagggtggtccagctagaccgcgaagatctgcctggcccatgagggtggaatgtgtggtgggtcagatgcagggccaatgtccagactgcatggctaag

SEQ ID NO: 48510 - DNA, 524 bp, Homo sapiens
caacttcttactctgaattccacatatgtgaaatttctgtgaaatgaagttttcctctttaattttagccccttagattgagatattgcgtgaaaaccttggggacacctgtttttttattatcatcatgatacaagctcttccccttgagcaaggtcattggagtgaacatcagtccttgcgctgggctgctggcacaagatgatgtgtgggaaaccccagcccaggcctggtttcctctcttcaagccagataccatgtactggctttcatttcttctttccagttgtgggaataaagccaaagttcccttgtacattcactttacatgtttgaatatgcccttttgtataagtttgtgttcctctttttgccttttgcaaaatctgctgactaccacatcttggccattcagagaagaacaggtggatgctcaccagtgtgggctgcctccatttcccctgctgaggagcagtgattctagacagtaaagtggtgacattagttatgaaattctttgtttg

SEQ ID NO: 48511 - DNA, 5807 bp, Homo sapiens
ctgcctcagcctcctgagtagctgggattacacacgcgcgccaccatgcctggctaatttttgtattttcaacagagacggggtttcatcatattggccaggctggtctctaactcctgacctcaggtgatccacctgccttggtctcccaaagtgctgggattacagacatgagccatggcacctggccggtccctactcttaattgttctgcagctttcacgttgattgaaactggattcagcacataattccttccatagaggctttgccttgggcacctaggcctgaagatgcactggcctaggtaaggggaagggaatgacctaagagggtttcaggtcaaacaaaatgggagagggaagcttgtccatttagaggcagcaaagtgggggaagagaagaggatcagagacaggtgaacacacagtcagaaatatatgactccacctttcagccccaaaccaaagctcccaggtgttagaaggattgagagggtagccaggagcagagggatttcctgtttgggatcctgagagtggtgcctgcagcagagtgaaaagtgtggtgtttgggacccagggtggggtgccctaggtgacagagcgagactccatctcaaaaaaaaaaaaaaaactgtggagtttgggaccctgggaggggtgtctgcagcagagtagacagtgtggtacagcagatgtagcagggagcctgggttagcattcccaagccttatacgcagcctgtagaagaagcagaagttattgaggatgtggctgatgaggtctgctattccaggggcaaagagatcccatacctatggggggagggcacagtaccctggtcagggctgcagcaaggacctggttggggccaaaactttggggagggttacggggctgagatggagcccagagatcaactgcaaatgcgccagctacagatttcagctccagaggtcagcatggtataggggccatccacatgtagtcctttccaggacaccaaaggactacggaatcaaatacgtagagttagagtccattcctcctcacttccctggactccccgatttccccacacccagaggtcatcttgaaaaggaaggggtagggagatctggaagatcaagcattgatgcacaagcagcctggccacccccaaaagcagactccaacccacagaaacagaggtattactaactggtgagtttgaagtgtaactgccctgcacatcatgcacaggaagaacagaaaattcctaataaggaagcaacctcttatgaaactgagcaagcaagctggcagcgtgtgcagcccagtacacgtggcaacaatgataaggatggagcggtccggagtgggggtgacccagcccttgcctgccagtgggatctcttagtcaggcttgtgagtgacctcaggctgaagggctaagggccatggcagaagcctgacaggagaggcagggagcacagagccaagagaggctagtttagggagtagggacggcttcccaagggggttggtgcagttagtgggaccagggaacacgctcaccttttatagggagtgaggctctcctgggtcatgaaactgagctacagaagcctggcgcctttctcaggctcttctggttgtaagttacagaaagccatgggagccaacttgagcaaatgcaatggatggggcactgcagaggctcatggaatcagagaacagagactgcaggacctagggaaggcacaggactggaccgggggacacagtaaagagcccaggaagggtgtcatttctactttcctctgagcctctacttcatcctccctttggctttggactgtcttgcctcgttttttgttgggaaggccaacagctcctgagcttacgtgttgcagggccaagtttctctctgtctcagttgaaatttgccatgaagggactggtttgcctcctgtacacccatcaattccaccaggagcaagggaggacaagggaacaaaacagctttcaaaacaacattgtggatgggagagaagcggggaggtacgaataaggggtctaggcttcaccctaggctgccaggaaggatcagtcactctccccagtaaattaaggaaagtccagaaagaagagagagtgatttcgggaagcagtaggggtggacagaagaggtaccctcctcccccttggacttggaaaaacagagccagcactctcctggccatgagtcagaaagtggagctgtagggggtggctgcagaaccacagggtacattttttcactctttcattatgtcaccttaaagaaattaagtaaaactgccagtaaggaaaaaagaaagctaatagtggggatattgctcaaaggcagaaaattagttaaacattacattggggtttcacaacaggttggtgtactgattttctcacagctccttaatgagtcttggaaaaaaagatataattttaatgtggtcttgattgctttattctcaggtcagcctgagaattttctcatgacgttaattattcatttttgtaagaagcctgcataaataaaagtacaagtaccgggtgtccagtgtggcatttcaggagcttggagaaagaggatagagaaggtgagagctgggggaaaattgagaggtggccagaaagagaggctttggtcatttccagagtcatggagttgcagagaactagctttaggcattgcatgtaatttaatgttcttcaatgtcctgtagcctaagaccacctggaacacacctgtagtcaacaaagttaggctgattaacgccacagcaagggaaactgcacgctgtggggaagcttgaggcatctcaaaagggtggattaagacaagggcacccaataaagctttgggggctggagttagtcacaggatggtgttggcaggatttcatcagattctgtaaactggggagtttctggaaaagtaagtggtcttatctttgggattcacaagtctgtgtggagttactgacaggtcaatttctctatggtcttatctgggaacaaatgggcctgaaagagctggtgtttcaaggtttgaacttagatcgtctgtgatgcccaccacggtgtggtcgggagaaattggcctgcttcgaaactgaggcttatgttttgaaaattgtggtttctgttttcattctcggtccctgtcatctctctgccaacatgaaccccagtctgccagtctacctttttcatttactcactatttttctatcccatcgttatggttattctactgacatgctacatgtaacataaagagccctacagctgcataacctcctgagagagggcttctttagtttgcaatggagaactggagatggtgctcattcacagatatctaacactcggtaagtcatcttgtttgaccactccctcctcacaggtctgtgccttaactgtgcatgtgaaatattatatatcttagatttaagaaacaatttggctcaacaaatgacagtatcagggagctattatgagttctaagaactactgtcctcctgctataggtccagacaagactttagcatggcaggctgcctcctagggctgggtagtcaagaagggctgatagtgggtgagctagtcaagaagcgcagcaaaatgatggtgaaataccacttcatacttactaggatggctactattaaaaaagaacacacacacagaaaataacagatgtgggcaagcatgtggagagattggaacccttggacactgttggtgggaatgtaaaatggtgcagctataatggaaaacaatacggtggaacttctaaaaaataaaaatagaattaccatatgatccagtaattccactctgggatataccagaattgaaagaattgaaaggaagatcttgaagagatatttatataacgatgttcattgcagcattatttaccttagccaaaaggtacaagcaaatcaagtgttcattgatgcacgaataaaaaagcaaaatgtggcatatccatacaatggaatataattcagctataagaaggaataaaatgctgacatctgttataacatggctggaccttgatgacattatgccaagtgaaagtagccagacataaaagactacatcgtgtatgattccactaacatgaagtacttacagcattcaaattcataaggacacaaagtagaatggtggtttccaggggcttgggggcaaaggggaacagagagttattgcttaatggttatacagagtttggggaagatgaaaatgttttagagatatgttggttatggttgcacaacaatgtgagtgtacttaatgccactaaactctacatttaaaatggctgaaatgttacattttctgttacatatatttcatcataattggaacaatgtttttaaagctaaaaaaaaaaaaagtctagcaggagaagaacccacaggtagcacaaacccaagtccttggaggaggctagacactgtgactaagcaaatcacattcatataccagatcaaggggcagggaatggggcccaacactgaggtcaggagctggttggtgttagaacagatgattcaagggattcgctaaaggattctctttgttgcctgactttagtgcattgcaggggtgagtcagactccaggatgcaaaatcagagcagataagggttttccttcttctttttctccctctcttcaagaatattcagtggagattttaaacagcctagaattctctagtaaagtggtttggggaatagaattatagacttcatcctctaagcccattgaattcttccccatcataagcagagccagatacaagtgagcacataacttctcatgttagtgagaagctattgattatggctgggacatacggcaaaaccaacatttctctctctaatgctagtgttgggagctttcaaatctagaaggaccagctgtggtatatagacatcagaagaggggtggttaaggtagggagcccctagagcaagtaaaagttataaatctaggcaggcagtcagagtcaggggtgttcccaggagagttattagatctccagcaaggaaacacagatcatgggtccaaggaagagccagagggagtggagttttaaagaagccagactttcggtgctggtgtgtttcatgctctgtatcttttctctcctgtacctcatcttggttctttgaaggctttctgggtttaagggaatgtctccagtttggggaaatgctgggtccactttctgcactctttcttgggagagaagaaagaaaaacaacccaataaagagagaatgacctaagagatatctcaaaagaccagggaccaaaagcggagattcccaaaaaaacattctgagaaagcagaaatagtcaacgctttgcccttccatgggaagttccactctctgaacgtgttggtcactggtttgctttcttctcaggggtgacacaaggcatgcagaaaccctcgaggtcccctggagggcagagtaaaccatcaacaacaggtagtcagagcccagccttatggtctggaattaagcatctagaaggatagggatgacagggggagggcaagaacagttaggacctcgcttctggagtagctagaaaaacatggagagatggaaacaaaccaaggactgggacatgagggaagacaagctagaagcccacttgccgggaccaatttatcacattaatatggactagccaagaggctgacaatgctgtgtccttttggagcaattaaagaaattcctgactgactct

SEQ ID NO: 48512 - DNA, 2519 bp, Homo sapiens
ggggtcttcctgctcaaaaatttccaccacagccagagagaaaatcatttgaagtctcaaattttatcttaggagaaataaattttaattctgcattctactctatgatacttactctaatataaaaaattaatatgttttcctcagaaaagtattctagtaaaatccatgctccgtgaagagctgttcttacttggttcaaatatcaaccactggcacaatgccacttagcctatttctggaagcacaggcctatgtgataaatttgaaaatcctggcacttagcgcccagcaaatccagtcccagcctctctttccagactctcttccaacaatttttcttctgcctatagataccaggccaggtggccaccactcctgaaagcctccatgatcttttaagctgatgtgatttttgttgcccatgggataataatgtttcttttctttcttttctctttctttctttctttctttctttctttttttttttttttttttttttttggacaggttgttactctgtagcccaggctggagtgcagtggcagcagcctcaacctcctgggcttaggtgattctcccacctctgcttcctgagtagctgggactacaggtgcatgccaccacacccagctaatttttgtatttttttttttttttgtagcgattgggttttgccatgttgcccagtattctccatgatatttgactcctgttgtatactccttggtgtaatcccttcacctcaagggtggacaggacttggcacttccttctatcccacagaatatggcaaaggtggcagacgtcacttttaagtttaagactccttcacactgttaaacccatcctagaggtgcttctggctggctcaatgaagtaagcagccacactggggggtccatgtgggaaagactgtgagtggcccctagttgctaagggcagcctgtggctgacagcacaaagcccagaactcagtcccgcatctccttggctatgaactctgtggataacctgagtgaacttagaaggggatctcccccagagcctccaggaagaaacgtagcccagctgacacctccatcccagccttgtgagacctgaggcaggaaatcctgctaagaggtgcttggattccagacttgtggaaactgtgagacaataaatgtatgttgtaaactgctacatttctggtaatttgttatgctgtagtagaaaactaaggccctcccttcccccagtggactgtgccctgacaactgtgctctgtgtgaagggcatgctcgttaaatactcatcccaggaattcttaatgaatgaatgaagcttataacactccacaccacatcacatacaattcatgaaaacgttggaggcagaacttcagcatgagcgaagtatctgttttttagtttgtttcttttcccacttctccatcctcatccccatgttaatataaacaacaaggttacagaaataaaaatagaaaaccaaaacagtagaaaaaaaatggaacacctatttgctaacccccatagctagcctagttgttaatgattaaccaagtcacttaaacctgagcttcctggcagcctggtgaggaaggagaaagtttatgaattccatggttctcgactgtgggattaggaagtccagatcaggtctttaggggggcacaatattttgcactggatccgtttttttcttcttttttttttactactgccctttggagcttagaacatggtctgtaaaagtgagctttctctaggcagggctggcttatgctgtggtatgagaatctctggaagttgattgaaaaagattatgtatatgttgagaactgcagaactctgggcacctaatgactcagtacaaacctctgtactaagagatgacccaactctagcctggcttctagcgtccctgtccataggatgccccagcccctacttaaatgcctgcctgaggaagctaaaacctgccaggagaatttactatttgttcaagccaacaccttatgttaggttcctgactctttccttagagcatttacaaggaagggcttagacttgctcattctacatgtgcaatatgaaaaatatagttaataactgtgtattgtattcagaatttttgctgaatgagtagattataactgctctggggtggggactgatgagcaactgcgtgagatgatcaaacgttattttgtttcactgtagtaaccatgttactatatagtatctcataacatcatgttgtgtaccttaaatatacacaataacatttatttaaaaataaaaacaaaaagggcttacatttgtgaatatgcatctcctgtaactctgaagtatccttctcaaggacccgaaagccattactgtgaaaagtcatcatcaggaaggctagggcccctgtcccccatctcagtaggtgggtagaatcctaacttgtcaactcacaaacacagctggcccaaaggcattaatgctggccaacccttcgcagttctt

SEQ ID NO: 48513 - DNA, 599 bp, Homo sapiens
cacactccctcacagagttcactgtcaagtaagggagacaggcataattaaatatgtatgcaagaaaaggaaggggactttagagataatgggacttcatttgtggaggaagagagacacgagaaagcaaatagccttgaggaagaatggatagaaacaagttcacactacaatatttgccaggatcttagtaataactacatttagattttggtaaatcacttttacaaaagttgctttgtcttgagagagaactgaggctgacagatttcacaacatgggctacattcttttctgcacacttgctctaacctttgtactcttcattttgctgttaattcatccagtgacgtttttatttcagacatcatatttttcagttctagaatttttatttgattcttttgaccgtttctattcctctgcctagattttctatcttgttattcattgttaacatatttttttcactactgagcataattataaatagctgcttcataacatttgtctgctaattacaatatataaataatttcagggttggtctcagttgatattccttctctcctgaaaatgtgttccatctttttgtttgc

SEQ ID NO: 48514 - DNA, 3220 bp, Homo sapiens
ttctcaggggattcctcaggggctgtcattgtggggccaggtccaaagagagtccttgggctcctgcttgccaatgtcaccccagcacctctgcgtttgccttttatggagatcagaatttcacacaggctttggtttgggcattgggggagttgtgggaaaacaaaaaacaaacaaacaaacaaacaaacaaacagctttgaaaaccaccagagagatcatcatttccagcttaaagttgaatgatatttggcccaagcacacaatgaacataggttttatgatgggagaggcaggaagaatcttttgaggggttgattaacactgcctcatgtcagagaacagaaggtctattattaggagaaaacagactttcttttcaactggcttctgtctggaggtcccgccatctggtggagaatcctccctagaatgtggacagctgtgtgtagacccacctgccgtgggagtaacaatggctcaggccagtcctccttccccaccatgtgggagagctggcaggttaccaatgcctggcctcccacatccggcagctccaggcctgtgtcctgcccaggtgtgtttcccatttagaaagtgagatctggagctctgattctcagccctgactgtacatctgatcacccagagagtttaaaaagtttgatgctcaggtcttcaagtttcagacttataaaatcattatctctgggtatgggacaggagggtgggctatccagcaagagactgctgactccccgaggggccaagcctgcagccccggagatgccctggaaccctctctgcaatggcaaaacatgaactatatcaccactccccttctcactccaaattctaaaatgactatggctgtgattttgcagggtgtcatcggctacgcaactcatcatagcagcctgtagctcaacaggtgaaaagtctcccttcatttctcaatgatttttctcctatgatcattttactggagaagttgttcagcttggtcttttgagacagctcaggatcttacatatgatatgtttcatggttgtcataaagatgaatgcccttgaagcctgcctttatttgagtgagaggtgctgagtacgttgaataacaataaaccacattacatattgttattattgctcagcaggaaaagaactatctgtacagggaaataagccaagtttcattagtcagctcacctatcatgcatttgaaataaacctggtgtgtattcttcttaatatgacatctgagattagaagtcggtgtcaaagtcaaacaccaggagaaaacaaagacaaacacagctctctggaaggctccattctcattagagtttgcccaaacatttggatgacttggttattttttagctcgtggctttacagataagctaacttttaaccagacaaaaacacatcatgtgtcaacctttggacgtgactttacagatgggcaggggtgtttaagtccaggtagactctgcagatactccttagctgagtttttagtagactgttcagctcccagtgtcacagtacttttgtcttcttagccatagaaagctttgttaatttggtcttgctgtcttttcccatcttctgtcttggctcatttggaggagttactgagcaatagagtggatgaaaagagcaaggaaaggaggcaatgagggaggtggaggtggaggttgaagagaaagaacaattgacaagcccctgctgtagttcacattcatgctttgcagaagttaatcccatttgaaatctcataatagccctgcaaggtatccccattctcacaagcgggatcttgctgaaccctaagctccaggagcaaatctggttttgctcctcagtgtacaagaggtcctcaaataaaattgttttgttcaatgttattttgttataacattgatgagaacaaaatctgattcttggccagggccactgtatatgtggagttggcacattctccccatgcctgcgtggattttctccagggcctcaggtttcctcccgcatcccaaagatgtgcacgtcaagtactttgacgtgtctcttttgtcccagtctgatggagtgtggatgcgtgtgagtgcaccctgcaatggggatggcgccctgtccggggcgggttcctgtctggtgccctgagctgccaggagaggctccagccacctgagacccggaactggaatatgtgggtaaataattatctacttgtttttatgaacctttcttagatgtacatttcactcacattcatttcagtgtttaatattagaagtgttattaatatcccttaataagaagtttggggatatttttgtgaccagaaatatgccataggaacttcactcctgtttatctaacttaggctgtgctaaaattgattttgttgtatgttgtttcacttaaaatcacagtttccaagaacctattgatgacattaagtgaggacctagcccatcaggggaggttgaatgacttgctgagggcagtagagccagcgatagagccaggctttgacccctggcctgtctgatgctcaaagcactttgcacattggtccacagtgactgtgatccaaacatctgtgcttcccagccaggactttgcactggacagtcatgggcatctgttttgagctgtggagaattaggccacaggtgctccttctgagctgcaaggctttactcagccgagtgtgtctgtgtgcattttcaagagcctgtcttactgtggatgagaatggaaactatggcagtggaatgccctccttctgcttgcctgcccccttcaccaagcacacatctgtactatagtggtatttccgcctctgtaagagcatgtgacatctcagtacaagttgaactgagtcttgactcccagtgttttgaggcattcccagctgctaccaagtggtgcaagatgaaggtggggcaggctcagcagatgggaagatactgccagagaggctaccctattgcttcgcatatgtttgtgtgttttattacctttattatctcacaagtaaccagtgcagattgagagaaagttaggcaatataactgaattcagaaatcatgaacaaatagacaattatgcaatatgtagccaaagaaagattaaaaatatagaaaggaagtcaatgccggctctttgcatggagctctaggctacattgagttaatttttaatgaaaagag

SEQ ID NO: 48515 - DNA, 1205 bp, Homo sapiens
gaaaagatgcccagcatcattaatcattagggaaatgaaaatcaaaattacaatgagttaccacttcacttccactgggatggctataataaagaaaaaaaaggaaaataaatttttgtgaggatgtatacatttgaacctttgtgtattgctggtaggaatgcaaaatgctgcagctgctatggaagtctggcagttcctcaaaagggtaaatgtagagttaccatatgacctagcaattcaattccactcctaggtactatcaagagaactaaaaacagatgtacactaacactacctttatagtagcattactcatcatagccaaaagtagaaacaacccaatccccatcaactgatgaatggataaaaaaaaagttagtgcattcatacaatggaatatgagtcagtcataaaaagaatgaagtaatgataaatgctacaacatgcatgaagcttgaaaatattatgttaaaaaagccagtcataaaggacacatattgtatgattccatttgtatgaaatgtcctaaataggcaaatccatagtaacagaaattagatagtgattgcccaaggctagggaaagagtggaatgtggagtgattgcttaattagtaaggagtttctttttgggagtgatgaaacattctggaattagatagtggtggtattggttgcacaacattgtgaatatactaaaaaccacttgtacagtttacaattgttaaagtggtaagttttatgttttgtgatctttatctcaatttaaaaaatccaaaatgagggtaaaaaccaagaaagcagaagccatgggatccaagaaacaggagatacattggaaagggttaggatgatagtgaaggaagttcctagacgcccactgtgcatggaagatagagcacaaccagttcagtggcttctgggagaatatctgtgagaagaggatattttgctcctgatgtgttcaaaagtattgagaggagatattgaagattgtggaagaatctgagcaaatataaatgaaactaagtgtattcatttgggttttccagaaaaacagaaccaataagagagatgatggatagaaagatactcaaacagacgatagatagatatagatagatgattagatagatagatagatagatagatagatagatagatagatggacgatagatgagagagaagaaggaaagaaggaa

SEQ ID NO: 48516 - DNA, 608 bp, Homo sapiens
ctcctccaggaagccctctttatccctgcagccgaagggcctctccccatcctctgagatgttctacagtcttctttgcaccaccagtttggcttggactggcaatattggagcctaatgttaacaccttagtatttcccattatctgctacagaccctaggtaagtaacttgcccttgagggtgtattgtgaacaattaatattgataggagaagaggactccagccctgacagtgtggaagagtcacagtctctccgatgacagtcactgtcttcataattgcaacatcccaatctcttggcacagtgtctgacacataaaagttgcacagttggcgttggctaagctgataaatgaagacccaaagcgacctgatcaaaatgcctaaggcatgaggtgtcagtcacctacaagcccctttgcaccactgtgcggttggtaccctttgaggccttggccaagttacctcattattgcacctgaaatataatttgttttcaagccactctaactaaaaagctcttcattatattttaagaaaagtggttttctctctaaaattgctgtcactgcaaacccatggtttaattatgattcttttaatag

SEQ ID NO: 48517 - DNA, 1429 bp, Homo sapiens
actgatggactctgttggcaggtagataggcttttcattgaagacatttcatgggaatggaaatagacagataatctggaacaccactgtgtattagctgctttgaacctgggttgcatctgaattggaacgaactgcataagcattgtttcatgcccccagcataatgtcatacaggcaaatttccagttgatctttcaccagatctgctggttttttgtttgttttttttttttaacttaggcaaaatgccaaatttgggatgcttgacaaatttggaaattgtgatcatcttacatcatgtggcataaatgattaaatttggtcaaggttgaactataatgctttgctgtatcatatgacgggcaccataggggtgctgctttgcccacttagagagacttagaattgagccaaggagatcattactgtttcccaatgatatctggctttcttgtgggaggctggacatggtgagagacaaagatatagtgaaaagaataccaaaaatgaagatatgatttttaaatagaatcaggttaaagctaagagttatagagtgacctccactcccctcattttacagatgaagaagatgattccctcatgtcatgtgtttcttaaggggctgtcacagagatgatggtgtttacaccacatctgcctagacacagcactgggcctaagtgggcacgtgacctgaactgaccaatcaaaatccttccccagacttttctgccacgtcttgaggcagacctgaagcatgctctctttccctcaaattgagagctgtgagactatgtcccttcacatataggaaaggggaagataatgagaccaatgtcagtagtaggacaaagaaaacagacgtgtgtgtgtgtgtgtgtgtgtgtgaaagagtgttaatggttaagccttgttcaactgtaaaggtgactcaagccctgcatttcattgtttggttacaagagccttttcttttttttttgtaagatggcttggatgatagtttgttcctgtcacgtgcaaccaaagaatcccaacaaatacatatggtgaagtccaagaggaggaccagctgtggggctgagattgtccagggaaagggaggagtaggagaaggaagctggatggaaatagcaaagttaattcaacaagtgacttttaaaaatcgcctgcatttacaggctcatgggtgcacctctgcaaggaaatcatgatgatcccttatggaatgtggggaactctttaactcctatttatagattaggcttaaaatccactcctagagccccattcctctagcttaagactttgaaccttgctagatgcaagaatacataagtagagcaatcctttgaattttccccaaatcacttatagttcagtttgaagaaagtatagaacttttcctaagactaggttgata

SEQ ID NO: 48518 - DNA, 740 bp, Homo sapiens
gcacctggccccagaggaagggatataagcagtgggtataaagcacaggacagaggttggtggagtcaaagactagcttcacctacttcacttcacagttttgttgccaacagccctgagaagttctatggtcactctgcatgtcaaggaaaataacctctgtgaaaggtatcattaaattttttaagaagacaaaagagttacataagtcaaacattcctctgtgcctttgcaatttagctacaaggtttacaactgatagctttatgtctctgttaatgtttcacatgtgcaagacattcacaaatcaagacattcacaaccaccatccttaactctatcttctttagaaaacatcacaccctttaccatttgtttgaaaaacccacagacggtgttgcggagacatcagaaaatcaatggaattaaacacagacatcaaagaaagcacgctcttagaatctgcatttgttgttggtattgccccatcattcaatcgatgtctggaccatgtcagtggtgtgtttctgaagtcttcttagcccatattttctgtaataatgttacacattacaaaaaaagtgagagtcccacaagacatttgtacttcaaatggagaaatccttttggctccttggaagaccgggttaaaggtacaagcacaggaggttcctaaatggaatcaagcattctggcaaagtccacctatgtcccctgctctcactgttggtcatgtaaat

SEQ ID NO: 48519 - DNA, 481 bp, Homo sapiens
taggtgtcagtggccccccacccccaaccaaatgtgacaaaactatctccagacattgccaactcccctcatccccatggcaaatccttcctgttcactgtagaatgtttagcagcatatctctggcctctgctcactagataccagtgccctcctccaccaccccacccagatgtgacaaacaaaactatctccagacattgcgaaatccctcctcccatttgagaactactgtgtggcctcatgccaatgacacagacaatgcaaacatctttccaaagcaaatccccaaagtcccgtggctaagctggttctgcaaaattagcttctcagatttaggttatggctctttcggttggagttccctcgtgctgtgttcgcccccatgctcctatacatctcatttccattctccccttctcactcaccactttttttcagcatttaaatctagaagatacagctccctgtatatcctaaa

SEQ ID NO: 48520 - DNA, 1681 bp, Homo sapiens
tgccattccagctacctggtacctgacagagctggacatcagaatgacacaccatcctcactgccattgccaaggagatgggcccacccttgggagatgttctccctgcaactgtggaaacccaggtatggaggcctcactggtgaagttgtgtgtatgaatcattacaacttgaagggagcttggaaaggactacctggagaagtcttctttagcaaagaacgaaaggtctagaaacactgagtttcaccaaacattaagaggataattatctacaagtacttaacaggccttaccaccaaggtgaggcatgaactgttcaaggtgctttgtggaggcgagagaaagttttggcaggtggtgataattaaattaaattgagaaaaattatgtttcagctgggcatacagggaagcctccctttgaaagaggtctattaaacaaccatcccaaaggatacacttaagtcatttaaagtcaaactgagcttgttatttgaagacataagaaaagaaatcattttaaatgggggaacaggaggagtcaagggaggaagtagctgacttaattcgttacatttttttctgttggtttgaagggttgtaaacattacacttccatctctccctgggaaggaaagatcatccagattccactgattcagaaaagcagtattaccaagagatctaagcctggcgttatttactcactaaatttactctttgaaatgtgtttggtcagctgtgcttggcctctgtgactagcggtatttgtccagaggctaattagctcaaagggtaaaaagatcagtgagttaatccataatctcgagtgactgatgaaacctaactgccaactggtgtcggagcgggtccttttctaaaaaagggattaataggacatgctagctattctcaaatattaacttttccaagaataagacaggataaaacaagagaaaagacaagcagagattttttttaaacctctctaacatttgtaaggtaatttcacaaataaaacttctagaattccaggggaccatgcgggctttctttcttgctgtgtgattcatgggtctggggtgctctcaggcagtggttgctttctggccccccaacaatggcaatgaacgtttcattgtcgagcacttattatgtgccgagcaccaagagttttacatgttattaattcacttggtcctccaagtaatctaagaagcaggtattattattctattttacaagagacaccattagggccagaggtcacacagctaatgggacttaaacccaagagctctggcttcagtctttgaccttaattgctcttacgggaaggagataacaactcgtatcctgatgacccatgccatgtcgcaatttcaaaacacagctagaagaaacagaagtccctgggctttggaaagtccatgaaaagaatctgtgcttttgagtgcactctatcagtttgctaggactgccatgacgaagtatggcacactgggtggtttaaacaacagaaattcattgtctcacagttctggaggctggaagtctgcatcagcagggtcggttcctcttgaaggctgtaaggggctctgttccaggcctttctccttggcctgtagatgactgtctcctccctgtgtctctttacatcatcttccttctatgcatgt

SEQ ID NO: 48521 - DNA, 988 bp, Homo sapiens
gcagaacatctgctgccagacccataatcaactgcaatctcatctcttcccctctctctacttttatttgattgtgagtttgctttctcctaccttctcttcacacacagtttttgtccagaaatgtcatagaaccacctcgcgataccttgccatgtacacacaaggcatgcacaccaggggtgctcacatactcaggaatgcaagcattccagagcatcccagcaggggtcccactgggaggatttatactctaattcctacccaggatgtaaacaaacataaacagcctctacccctaattaaaattactgcaacttttaacctagagaattagaggggtatctttaaaaatatttgttgcctaacagccctgagagctccgcaaataaaagttaaagtttgcaatggtattcctcagagggcactgcggtggttcctagccaacctttggaatgaagcgattacactggcggcttgtggaagattttgtaagtacggagtgttcaggcccagctcttttctgcattagcacctcatcaaggcgccctgaacactagggatctccctggatttcctcagcccattttcatcccctcagactcctcccctgcttgctccaaattccccgggttgcatgactagaattaatgtcaccaactctgaatgtgctgccatctctctccttagcagcaggggtcgccactgagcagtgaatggctgcacatcctggtcagactcgagggggctcataaggtggcaatctcactcaggggtctgcggaagccctcagttccacagagattgatggaaaatggtaagtgtcacagaaggcaccgatttgggcttatgttagagagaaaagaattactctctgccctatcgtcatctgccttggcatcataacaacctcaaggagaaccttctcttccttaaaggtctctgcaagcctgggaccctcagcccgtaatgacccagatgaggcttc

SEQ ID NO: 48522 - DNA, 964 bp, Homo sapiens
agtgaaccgagatcacaccaccgcactccagcctgggcgacaagagcgaaactccgtctcccaaaaaacagaaaaaaagaaaaaataggaaatgaagtcccctctgccttctcccttggcttcaaagcagatcaaataagccaactgagggcaaagtgctttggacaggatacaagttaacaccgatatggagggaagtggtggtgatgacaataaatattgcacctgcctactgtttccaggaatgtgagtttttctgtgatttttccacactaattcctagtccagcctgttcacatttcaacagttagaagcaaaaacatataagtgatcccaccccagcctgtgttactagcagagagatggcaaatgtgaagttttgacttgcgatacaaagctatttaagaaactcagaagatcaacactggcagactgtgtggtttgctgccctgggcaatgagcggttggtctcccttttataagcaccaaagccaatgaaatttacaaatcttcagctgtaccttaaaacactattgccatctaagaatttgttattaatcacattatcacagtatcatttttggatctagtgtgattatttgtgtactttatgccctaaagtttttatgtgatgagtggagctaagaaagccagaaaaagctgagacttgcaagtcctactcttgcttgggtaaagagggaagtgacatcattaataattaactagataattcgttgggtacatatggcatgccaacagctctacaagcactattcttgtaacaaccctggaaggtaggccttatggacatcctcattttatatatgagaaaggtaaaacttggataaataacaccttccatcatgagctttttttagttggccccaaatgagcgtctgaaacccacagtcagctgacccagcagcaggcttcctcctttagttgacatcaagagctcattgca

SEQ ID NO: 48523 - DNA, 2431 bp, Homo sapiens
tttgaaccaagatagtttcctgagctccagacaactccttattggacacgcccatcttagccacatctcttagccacctcaaagtcaaaattgacaaaacataactcctattctttatggcttatccaaacttactaggttctccatctcagctatttttgctcagttgactcttctctcaatcaccatctcacaaatatattatatttactcctttcctttcccactgccactgaccttggttcaggtgctcatcactgctcttccggattaagacaaaaggctacaatggtctcccagtctcgggacagatccatttccctcactgtcttccatgaggagctcatcaaaacctaactatagccacatgtatagcctctgcttaaaatccttcagataaagtaacgcctcttcacaacacggaccctgactcgccctgaatgagatggtttctgggtcagcttgaaaaaatgtttccagaatgcatttgccaagggaaaagaagaaaattttgcatttgcaaaattttgagaaaataagacaataatgaaaaacataaactgtttggaagacttttagacttaatacatgcttttccctctgccttaatcacccttcctcatctcaattcgctcctcagtggtaactcctgcaggtctttcagaatccagagcagttgttcccacttccaggggattcttttacgcccattctctataggctgagccttctaagtgtctccatctgaccctctgccacttttccaatgctctgtttgcttttttgtctccttgtggaaattctaatacccttgaggcttaggactacgccttctctgtctttatatattcagtacttagggcctcaaaaaatgtttgtggaatgcatgtttacacgtgaagcaggccttacccaatggagccgagttcttgaagtcaccacattcaaaaattattcttctcctcacattgaaatattgcactgaaatattatattcttgatagtgacagttaatcattaaacatccttccccactggcaaaacaaaacatgaccacaggagaaggctccgtggagaccatgcccacacatttcagtgcctgggctaaaataagcatgtaagtgtgtaggactgatcatcatattgcaccaggaagcgcgcccttccagatttaaaaatatacttgtttggcttgattcaggctgctcctcattccaggcctgcgtgagtcattggagaaacatcctattagagtgcacccctactgattggcttcctttgtatgttcacggtgactcagaagagatgactcacagttcacgcttatgacaaaaagaacttgctctcccttccttttcattacccatgttttgcaggctttattggcacctttgaaaaacatctaagggagcaagggaaaggaaaacacagggggcagcctgagaattggcactacttatttttaacaagcaaccctacttaaagcacctttcatcagagcagcacagatatactttggaggcctaatacatccaatgctcacattattcctggaaggtcagtaactggatgctattgctccaccctgccagttgatggaaaggagggatgctcgaaggacataaagatacttcgcaatgtccctctgcagggctggcacccaacgctgggctctcagagccgctgttgataaaatggctggttagatcatcctctcttggttataatacccaaagccttggccaaggagagagacattctccaaaataatcagtggtcaagcagtgagcatgaagcaaagtgagaggacaatccaaccacgacaatcttctggatgcctcaagatgctcatgacctgtcactggcagaaactgttgggttctgtgccagttacaaacaacagaggttagttcctttcattccacttcagaaaacatttctgagtacttatccacagagatggatcaggcatagactctgaccaggagagcaacaagataaagtgcagtgagttatacaccacaaagtaaggacaggtcaagtgtctggagagtccaggggaagagttggctttattttttagagaaactggcatttgaattgcacctaaggatgggtggaatctaaatcatacttctacacttcatcttagccaaaacgccgagaagcgataaaatcatatttctgaatgtgtttttccttcagaataatttactagtcaggctcatctcaaattccatttacattcagactccacattccataatcgctgtctcctggaagccattgaaatgcatgcatatacgtctgcctgcaaaggagacacttctgtgtgcagttctgggtgggtttatggtacccaaataaacggagcaggaggagcgcagacgggctaagtccaaattgttcccccttccaggggatccttgtg

SEQ ID NO: 48524 - DNA, 575 bp, Homo sapiens
gtataatttaaatataatagaaaatatttggaaataaaatctatgctatgtcacttgtctaaacagtggtagaaatcaaaggattactgtgggtaaaacagctttattaatattctgttttgcttctagagaactactctttgctcagtagcttaaaatggtgttagaatataaacaaataagaaataactcatgattcacttttcggttatcttcaccagatcaataaactcccagtgcctggaatgagatctgagacatagctgatgtccagtaggtatttgcctaataactctgtggcctgggttcccaggagggcgaggggatgaagacaagaatccttttgtctttgctgtcctatctgagtatcatgcttgcaacacagtaggtgccccacagaagtgcactgaattatacttagcctggatccagggcccccagagttttgtgtggtggtggcaataacccggctatgaatgtggggttaatattagaccagaagcagctagggagagaacgtaccaaagagcagagtcagaagtgaggaggtttagcttgtttagggagttgcaaat

SEQ ID NO: 48525 - DNA, 1109 bp, Homo sapiens
tatctaacatcctgtggtcatataacatactcaggagaggtatgttatactaatgggtaatgggtaatggctaatccaacctctggacagtcccattccctgtccatggctgggctaggcacagtcacacgccaaagtgtcagccaagaaaacacgagagaaagtgtgctgaaagtcttccaaaaacacttctacacacctaaaagagatccaccggaagagatggcctcttgttcctctgactatgtgaaggtagccatcatcttgctaccagacacagaacagaaagatgaaaataacttgggtccctaatgacatcaccggacaggtatgctaaccagctctaggatctacacaactctggacttatgcaatacatgtccttggcaggacattttgagttgagatttctactacttgtagctgaaattgtcctaactgctgcattattaggccaggactggggtgagcctgtacaccatcatgctcacaagtctgtcacacccagaaaatataatctaattctagcgtgttattcccataactgggacatttcttttcattattaaaatccttctattggtttccactgcctgtaaggtaaagtcaaaactctctgcatggcaaatacttgtgatctgacaactgcttctgctagcacctctgccctttgcttcctccctcaaaccctctgcattaactacatggaactagaatcccttgaacctccaggtcttctagcctaccatttctcactgcctggaattttcaacagccgcctcccaccatccacacagccatgactgcctgatatctctttgtctttgtgaaccccacgtgcaggtatctcttcttctctatcacaccttgcaagactctcctttccccagccctgcccagttcttcacaaacagaaggaatgaagtattgcctcccagagatatgaatgtgactcaaatgtaatgttacaaatggaaaaatgttttataatcatttatttatgtgaaggaccctccagttagtgtgagctgcctgaggatggagaatgggttctaaatccatgtccacagtgaccctgatcctgactcatagaggtgccctacagttat

SEQ ID NO: 48526 - DNA, 508 bp, Homo sapiens
atggtcaaaacccgtctctgctaaaaatacaaaaattagctgggcatggtggcacgaacctgtaatcccagctactcaggaggctgagccaggagaattccatgaacccgggagaaggaggttgcagtgagccaagatcgcaccagtgactaccgcctgggcgaaagaggaagactccatcacacacacacacacaaaatgttatctggcttctgcacgtgatgtttatccaggtgtactgaggacacatggaaatgttaggaaatcaaacatagaggtcagtctccactgtgtaaaggacagagttcacagaagaagaagaaagatgctaacagtagcagtgtttgcctgtggaaggtgggactatgagtgatttctcgtgtgtgtgttttccacaatttcctctcccaagttttcaccatagggatgtgtcacattgattagcagaaataaatactggtaaaaagtgggccagagccagggccaggtgtggttgctcatggctgta

SEQ ID NO: 48527 - DNA, 569 bp, Homo sapiens
aaaactcccaaatgtctaagactactgtgaatcctaaaagcttaaatgaaataactcatgaaagtgcctggcacctagggggtcctccataaatgatggccacatatacctagatgacacaatttctttgactcatcattcaacttttatcaatagtttataatgaaatagttaaggaactacataaagacttactttgaagaatggcccctttagcactgcttgaaaaaaaaaaaagacagagagaggaagataaacaatttaaaagtccaaatacaaagaactgacttcaagaattgagttgaattcttttcagccattaggaaagtttgacaaataaataggaaatatgactcactgaggaatgactatgggccaagtgccttgcaaactgtgttgttggcattaccttgtttaatcctcattatataataaagtaggctgagtatactaactactgtgttatgatggctgctatatattaagtctagagctgtgaaacaatgtgtatattttacacacttgtaaaacacaaatatacttctagacttaaatatgtttgaagtaga

SEQ ID NO: 48528 - DNA, 1128 bp, Homo sapiens
gatcaagcgccactgcagtccagcctggcgacagagcaagactctgtctcaaaagaaaaaaaaaaaaaagtgtcagtcacttagcttgtcagccaaagccatccacaatctggtctctgtaattctactattctgtacacgttccccatgcttctggatctttatggtgagtcaccaaaaacaaacaaacaaaaaaaaatcccatctccacactttcgctcatgccatttgctttgttgaaatggccctctccttctttctgttccaactctaacaagggactcttacttaccatttaatatccatgtcaaagccacctcctctaatcagatgcccccttatctccctaaatagatgtaattactccctctgtgtacttagcacattaaattaataacttctgaggactctacatatctatcttatctctctgtcccttgagaacaaggcatcttagttcatttctgtagccttccccacccctcagtactagttaccacagtatgtaggtgtgaataggatctaataggagactcaatacacctctgctaaatgaaaaaaatctatacattcacgaactttcctttaaaaaacaacaacaacaaaaaaagccaactatttttaatgatagcctggattaaccagcacgtttcccatttcctaccactgctgggtgactgtgagcagccgctggccataagctgttagacactgaaagctgtcactactccctatgcagaatgattcatgtaggaattaggcaattcatggcttggaagagcactgaacaccagctggtaaagaatgtaattcaacagatgataaatcagataccaatcaaacaagtatcaccatcagtaagcatgaccaaagaggtgagccttctactctcataagcagacaagactgaccaagataccccaattatcttgaaaacactagcctggtatccttgtttgttctcatttcctatagaaagccctctgtctgacatgagctcattgcctgaccagtaaattccaagccaaacgccagctctgccttatggactttttagttaacatttgcccaaaaggttacgtaaggtacgtctatctgtccaattctccaagacctgagagtagagtg

SEQ ID NO: 48529 - DNA, 1371 bp, Homo sapiens
ccaatgtcctttccttcccttgggtctgcttcaaaaattcccatctagatttcagtgccaatctcatgcaccagtttctcttaaagatctccctgacctcacggcctcccgtgctagaagtaactgccctgaatctgtcttcttaggcgcttacagtgacctaccagagcacttttccacaccttatcctatttgtttatatgagttctctgagggtaggactcatatcttactcatctctgttgttccagacctgatcagacagcatggtaaagagcaactcaatattttccagacaagtgaatgaataaatgaaccactctttccttaaaaccaaattcaaagattaaaattacaaatgtgaaggattactcaagccagtgatgcatttttaaaatccagaattccttgcacagaaaaccttccggcatttcttcaagcagcagctattcatttgttcccactggacagaaatagaaagggagctgctgagaggtgagaggagggcctattccagattccttttcctcctggaaaaattctttcaaaaacaagatgagacctgagctgagccactcactctcttcccttcactccaagctctcttgcgctttgggaatcagcatttcaactggaaagttcatcattttgcaaactaatgcacacacttcctcccttgttctggttttctggatatttgcttttcaaattccttttcagctgttgtaatgccagtggctgctcccttcctcccagcaagcctgtcactcggtgatgtgtgcagacagtccccagtggaggaggcaaggctcgagcccagttccctatcgcagaaaccagactcgaagccacaggaagtgctggagcatttccaccatcctgtgagccaaacattcaaagtttccaaacctgctgatcaaaaaacaatatgtgaaacttctttcttgggcctctctccagcaacagcagagctctaactaccacccctagaacatttgattgcatcagattaccagcgaaggcccctgcagaactctgggctgtgcctccactgggtttcacctgacaaccctcgtacacagaattagtcattctgatgcataatgcaatgccgcatagccgcctctcacggaataccattaggctctttctcccggcctgacgtccttattcccagaggagcacagacttttatgagggctctggggtcagttgttggcctgggtgttaatcctggttcacccacattgaaaacgctgtgactctggacaaattacacaacatgtgaccctcagtatcctcatctgtgaaactggaatgacagaggtacctttctcatgggattattatgaagataaaatatctataaag

SEQ ID NO: 48530 - DNA, 974 bp, Homo sapiens
gatatctacagaaagtctatagcaatcatcatgctcaactgtgagccatcaaacttttcctttaaaatcaaaaacaaggcaaggaagtcaaatatcactgcctctattcaatattgtactggaaatctcattctaaacattttaagaaggggggtggcaaatttttcattattcagatgatattattgtctatcagaaactattaggattaataaggctttatcaaggtttctgagtataaatcaatatattaaagtgattagcatttctatacaccaggaacaaagcatcagaaagaactatgtcttaaatatacatttcatgataataataaaacaagaagatagtgttggagtgcagaaaatgattcatcacaatacggagctttggcatgctaagtgctttgaaaagtgaaaagcctcagaaataagcctcagaaccaaggtttctctctgacctgcttccacctccctgtctctgatcttctttcccaaagaaccgggagggactctctttggaatttcttaagaccccactccctaggaatctcatcaaatagcccaaaaagatcaaccacccaggaaaagaagatcaccacatctggacaggcttttcatctattctcctaagggcaactctcatagattacctgggaggctttatctgcataagatgacctttgctcacagtgaagttccatccctcaccttcctgacacctccctcagagctcaggggaactttgttacttatttgcacattctctgtctcctctctcccacatatagaagggtatataagcatctggactacattgggctattggtaaatcattctcatgtgattccctgcattgtgcacattaaatacattgtatgcctttctctccttttcattggccttttgtcagtatattttcagcaaaccttcaggagatgaagggagaagctttccctctcggcattttacaagata

SEQ ID NO: 48531 - DNA, 1696 bp, Homo sapiens
tcaaaaaattgtgtcaagtctgtaagtgaattttacattggtaaagaacattgaataccacaataaacatatacagtagcattggattttatatccacactatatttgtaaccttgtgttccccatactaaagaaatagctatcatgcagcaagggttcaataaaataatgcttgtgaaactgctctgaaagcaatagaaagcctggcagaggtttaattctaatcacaaccggttacacaatagatatacataatgaagttgaaacccccaggaagaatctgggcagtctggctacctgattgtgcatcactgtctaagacacattggaaaaaagatgacaaagaactcagataagcccctacgctctgtctttccaatgcatttcaacgagattctgctgttggtaggaagtggaaaaaataaccgcagagcaacattggcactactgtgtacactgcagcgttagtcacaatagccaggagggagaagcagtctaaatattcattaatagatgaagggataaagaaacggtaggaatatacatgcaatggaatattattcagcctaaagcagaaggagatcttgtcatgtgctacaactcagataaactttgaggacatgatgctaagtgaggtaagccggccacaaaaagacccatgctgcatggttatacttctagggattatttaaagtagtcaacctcttagaaacataaaatacagtggtagttgccaggggctggggagaagggaaaggggaagtcgtttttcagtgggtatagatttccagtcactcacaatgaaaaagctctagagatctgctgcgtaagaatgtgcatatagtttatgctattgtgctgtatacttcaaatggtgaagttgtaaattttgtgttgctttttaccacatgcaaaaaaattgttttaataaaataacagccctgagcatgactttcacagaataatctggaagtttaaacattgtttacacatcgggccatggcaccgaaagcctaagtgaaactctgaaacaacggaaagcacagagttcagaacaaactcagcacaatatcagcagaaaggtgatccggaagctgacacacagcagagttttgcaagtgaaaaaaaaaaaaaagtgaacaaaattcctaaaacctactggatgccaaaagttcgtgggtagctttttaggttctgaccttactttgaactaatgctgacatctattaaataacttcccttaactagtgataataatgaagagagctatcattaacgggtcactagttttatgctgatttatatgtatcatttcatcgactcctcttagcaactttatatggcaagtgtcctggctgtgtactgctgtgtaacaaactatctccagacttactggcttcacacaacaacaatcacttcatttttctcatgaaactaccatttgggcagggttgggtaagtatggtttgtctatgctccatgcacagtcagccagggcaactcaactggggcttgctgggggatccacttgtaagatggtcactcatatggctggaaagttgaggctaattgttagatgggaactcagccaggcccgtgggccagaggcctcaattcctcccacttgggactctccacgggctgtttgggcttcttcacagcatggtggctgggttccaagagctacactgcagag

SEQ ID NO: 48532 - DNA, 3375 bp, Homo sapiens
aattttaactgcttcacaacatttaggctcaagattcttaatacttgctctgtctgaaatcctccctcttctcccttccccttgcacacaagactttcctcatctctccaggaatctttccttgcctcctccaagcccaacagccctttttccaagcctagctttcctcttcgtcctttgtattgtggttatttgtgtgtctgtctcatctccctgaccagactgaaagaccaggaaggctaaggaagtcttgttcaactttgaatccacagaaaataccttacacatagtgggcttttggttgatttactgaacaaaagaagaaaataccagttggtacaacctggcaagcaggacaatcaccaaatgaaccaaactgtctgaagatatttttcacttctcagaagaaatccccttggccaaaaatgagcatccaggtaacatgcaaagtatgcccttagctctctttttcttgccatctaaagttccagcatgtcactcaggaaaacacccttcagcactttccttttttgggggcagttgtgggggagacagagtcttgctctgtcactcaggctacagtgcagtggcgtgatctcagctcactgcaacctctgcctcctgggttcaagcaattcttgtgcctccgccgcccaaatagcggggattacaggcgcacaccaccacgtctggctaatttttgtatttttagtagagatggggttttgtcacgttgcctattctggtctggaactcctggtctcaagtgatctgcctgcctcgccctcccagagtgctgggattagggatgttagccaccacaccaggccacttcagcatggcaagaacagagggaaactgtgaagtagcaaagtgaaaaggtatatgacagaagtcaatttacctccactttaatatcaaaataatattttaatataattaatatcatttaatatcaaaataatattgagtgaatgattccataatgaatcatggaattcatttgaatgattcattccattcattttccactaagaaaattagaaaacattatttgatattagcagccaacatccatatcttatcaggtctgtgggattggtaatgggaaattgaaatatgctaaacagtacctcttagtatcctgctggaaaatctttctatgtttagggacaactacagaaatattcaccaaaaatatccgagggggaaaacccctgtacattacatgtagaatattaacacctacaaggtggagaagagagaggacggataaattcattaatctaaattaagcatatccaggtcactggctatggtggatacttgttggggcacacatacaccaagtcactcttcttaaaaattatctaatgtttgttctggcattctctgatcgccaccctgctggtgtgttgggggaatctgccctgtggccaactccaaagtccaatcctgtttggcagagacagaaaaaaagaaaccctaaatgacccagagagtggctgaatcaatctaattctgtaactcaccatacctctaatcttttcaatgatataagcttttattgtttaagccagtcggcattcaattttctgtttcttaccatcaaagtcattctacctgctgcattggaaaaatctaccacacatccctgggtatgttacaatgaacctttccctgtgggaataaaacaagagcaaataaagaagtaaacgctgggcaggaacattgcaaaaacactaataatccttttttttcttcctgcagactgcaatgcacgtagcttgcagtaaaaatcttgagaaatatctaaagccaaaaaagctatttaatggtttaaaccagttatctaagttgatttgaccttggtattaccaattacacaaaaccaagtaatatcctaccttctgacatacatactttggggccttggtactcatcttcatggcaagtaagctgattcttagttatatgcatacaaagcctgttaatttttaaatccacactcatttctcttgcaatctggagccttgttggaatatctctcactgctttcagctactgcctgagcaaattagcatgcatgtactcctgaacaaaatagattgagcaaagcgaatctgtggcttccaaagttatgttacgtgaaaatacagaggtctttggaatcactgaaaagttctgggctgtatgtgcatttctgtcttcaaatgcaaagatgtccctacatcttcaacatcaagagtgtagggtttaagagcatagttccagagtcagagactacgtgagttcaactcttggctctaccacttttaaattgtgtcgacttggcaagtttatttccccagtctcaagtccttattataaaatgtgagttatgatagacagtatgtaaagtctagcgtggatataaaaatttaatgatcgtaataataattcatataaagcaggcagcacagtacctggcacataataaaggtacaacagatgtttcttgctgtgattgtaatatctgcaattgatactggaaaagaaaataattaatgcatgaaaaaatgtatcttcccaaagatatatcagggcttcagggaaaagaaacgtgaattaaagtaataataactctcaatataaagtgagtggatccaacttaaagttaaacattaattcttgattatttgctttgggaagaggaaggaacagagtacattaaaaataaataataccccaacaactcataaacccaataactacagcacagcttcaacatgtcttagaacaaaattcccaaaacaacaagagacccatgtacaaattaagttaaaaacatattccataatgaaatctacagtcctaaaaaccagcatttcagattatcagtaacattaaatgagcatacaaattcaaacctgtgttttcagatttgcggctgacctacaacagaaataaatgaactaactagagataactcctttattgggcttccatctaaagctaagctttacttaggctttcaaattgttgcacttacttcctaaatcagatatgccaccaaaactgcccacttttgtcaactgtcaggaaaactgacaatacgaagttcacaaagacgaagcagggaagaaaatagcaatttgacttgcagtccactctcaggttttaaccgtatggaaaattttatatacacatatattttccaaagttatggaatatggtttagaatctcaggaatcccattctcactgaataattaaactgggagaatgagaggtttcacaccatgacaatgccactatcagaacttactgaaccccagaaaggacctatggccacctcacccagaggagcaggcttgtccatgcacacgcacagacc

SEQ ID NO: 48533 - DNA, 486 bp, Homo sapiens
ttttcattggtcaaaactggcccctctgcttggagtttacaatgcagtgggactgaaccacaagaagctggggccaaaagtgatgggcagtggtgtttctgacctgagtgggaccaggaagccaacctatcctcccaaaatgtagacaaggggtgcctctgtccccatacaaaggatgacctttaaagaatgcagttctcaagccaattgcattgtgcaactcagatatttgtggtctcatctgactggttagctctcatgtttagaacatctggctaacaagattaaagcctatcccaggataagaaaattagctttcctctatttcaacaccacagactcatcctcatcccaatttgaaacagctacaaaaagcgggcaaacaatatttattgactacccattatatgcatagcatcgaggaataaattcaatggggaaatgagcctgcgttattcatcaaagtcttttccagccctggaagag

SEQ ID NO: 48534 - DNA, 2136 bp, Homo sapiens
ttaggtcaaggcaggtcccgacccgcctccaacttcaaatggccccctaggcgggagagggtcactgggcggggagttcctggctgtgcggtcacacacacacacaccgactcacacacacacccacaacaccccccccacacacacacactcacacacacaccgacgacacaccacacacacatacatacgcgcgcgcgcacacaccacacacacacacacacacacacacacacacacacgccgcctcgcgcgcgctcgcggcacagcaccgacttcccaaccccaaacacacgcgcgcacccccgggacagctgagttctgtatttcctcttcctcaaagcgactccggcgatcgcagtcgccactctccgctccgattcccgggccccctggcatgccgccgcccccttctctgaaggcgcgcccggtgcgtcccctctccgaagccgagatttccacgaagctccacaaagctccccgccgcctctctcggtctcggcggagaccccggtgtgtccccgggaggagagtatttactaaccagaacctcaggggctcccggctgcccagaccgccctctccggccctcctggcccccattcctctggcccatcaccgccccctcccacgagcgcgctcgccgggggattccctcccatccccgagtgcaggagaagacgccgagtctgagccgcagccgcttctctagctctataggaatcttgactccaagatcccagccccacatcccccgtccccagtaaccccgcgccagcgtcgcaaccctcccgcgccccccctcccgcagaccctggtcgaaatgtctcggcgggctcccgggccccgggccctgcgcttcatccgcgggcgccgcacctccagcgccccctccctccgctcccactcccactcccgccatccccggagctcagacttccccaactgcagagcgccccgacgcgcccgcagccctcaccctgccgagcgcggcggccacccccgcccgagccgcggcgcccccagggaggaaacaaaagtgtctccgcggcgcccggagtcccccggagcaggacgcctcctcccggccccagtcccggccccctcccctgccgcgccgaggtcagcgagtcggggcgcggcgccagcccaggaaactttacgaacctgcttggggtcgcaggacagcagcggcaagggttcccggcgatcagagctccggcgacccgccaccattgaaggggaactggaggctctgtcgcccagcgtggggccgcggcggcgtgggtggctctgcctctatcctgtgcccatcctcgcccgctcccgctcgccccagcacacgcacttacactctgggtcggccggctgctgcaccgccggctgccgctgctctcacttcctcttccttcctcctgctggccagagacacattttgcatctgcaaggcatccggagatcagccgcgaactctcctcccgagcggacgctgcggagttgcagccgccgcccccggcacctgcgccaggacactcgtggtctgcgcgttcgccttgcgcccgcaccctgcctggtccctgcccactgcactttgcctagggggatgcccacgactttttgaagtccccctacttaaaagacagaaatgtcaaacaccatgcatgcctcagatctgctataaataatatgtgtgcagagcatgacttcgatgagctcacacacggcgtttggaggcactaattaactccgtcaccctcatagcgccatctccgggaggccaaaagcgagtagcatcttttcacatccttttttaatttttggcaaccggttccggatattaaggggaaacttcggtgggctgtttgaacgctactttaagacgtgtttgttttgacgctgtgcctctacccttggacagagtggcaaaaaaaaaaaaaaaaagtttcctccctctccgtcgacatctatgtatttactaaccctgcaattgaaactacaagatgtatttctaaccaattaagccagggacttcctaattttgcataactttgcataaggcaagacgttccacccataatttgatatttagaataaattacttaattcatgcaacctacttaaatcattttcaaagca

SEQ ID NO: 48535 - DNA, 2649 bp, Homo sapiens
cttcttgtaagacacagttctccagatattttgaatactatgttgtatgaatgaaccttaggatgaaggaagagccagctttattaaaagttgtgttcctaggtttgttaaaaaaaaaaaaagtgtggtcaacatttattatcatataagagttaagagcttggatcctgaattcagacaggttaggtttaatctctagccttgtccctgaccagaatgttgaccacaagttactttactgctctaaggctcaattttcttatccataatataaggaaaattatagcacctgagaaactgttagaaacagataatcggtgccacaaagaaatgtcagcatggagacaaaggatctctcagcaaggcaatctttactttctgctgaaagggtgccccccgcagatggaataatggcaagagcatatctgaacaaaggaaaagcagacatatttatcccttacgcattttggtcatccttactgctgtgtcctgcatctattggctggagctggacttcagagtcttaaactgatacctgatttgctaataacctaaaactttcctaaataggtgagtgcaagggagaacaaagaagaaaaggaagttgcttaccaaaggtttaaggaagcaataacatttccaaataaggaagaggcataagctatgagctaagactggcctgggcctgtccaggcatgcctgagtaagccaaagcaactaactgggctaaaatgtaagaactaataattgataggaggctttaaagtaaggagctattattcctagtgtctattattttatttttaaaccaagcagagctttgaagaggaacttttctactttctacagaaataaatgttaattgattaggaactttaatgcatataataagcatctgtaaattttcactgttgttatgcataatcatctctgatcagagtattctgtcaagtaattgttattccattcagtttcttgggtgtattttcaatgctgatgcacatgatttcaaaaacatcttctatccttgtggtatgaaaagtaggtagtgactactcattatatttggagaaccatttctattgttatcacagttattatttttaaataacaattgctcaatatcctatattataaattgtataacttgcagattactaactgtttgctgataagttacttgtatcataaaagagtctaaaattggatcaaaaacaagtgcaagattttaaggtctaaaatgaatataatctaggctcatataactagtctaaagttaatgcacctagatccacagttacctagacattaatttcctcaaaaatataacagaggccattggaattgcttgtaacaatcagtcaaacatatgctacatgtgaaggaacattaattgtttttgaaaaatttttatttgttataaaaggtggatctgttaccagggttgcttatgtcttgtttataattgtaggttttctttttctagcagttgaagagtagtttagtaataagtagcaaaaaaaaaaaaaaaaaaaaaaaaaattccaacatcagccctactttagttaataattaataaatcactgaaaattgcatgtaaataattttaggcttagattttagagtggattgagaaggttttcctaaaacatgttcatgcttctttttaagcagaatattacattcccaattatgatggtgcaaattcgaatttttaaaaagtggtttattgcaaagcttttatagggagaattatcagcaaatagccttgataaaatgaaaagatccctaattgtggcagttggaagttttgttgccagataataagataatgtggagctttgaaaacacagactactctgctgtaatctagcacagaaggcagatatctctgattggcaacatttccttttagggttgaaatttcaaaggtaacacttcatgagtaactcttttggattcttattctgagaaccaacccaatgaatgacagtgctggaaagaaaggacttgtattcgtgacaccaaatcagatgcccaggaccaaaaacccagtcctctggctccaattgccattagcaatgcataactatgcttcctttgttttccctttttgttactagcaatggggaggacaaagttgctgctttgaaatttctatgacttgtgtttttagagtaccagaaatattagaaaatatttgtttccactttgatatcactgccatctaagacaaattgaagaaatccatggctgtcagcaagactttctgggtaaagtagattgatcaacacagggaaagacagtgtttagcagaaaatttaatattgatctgatctctagatatgggatgactttcagaggatgaaaacactcaaagagaaatgtcaatatatttgcatagaaatgaagagatttcacgtgttcaaaacataaatacaattaaatgccaaacaagaacaatatttagctaccaataggcacaaaggatgaaaatttttaatgtttgacaagtttatataataagagttactaaatggcaaatgatggaaacagatgattcacattagaagaaacacaactggctaataactatatcaggaaagcacataaaggagctaatattaatgaacttataaaacaaaaatg

SEQ ID NO: 48536 - DNA, 1886 bp, Homo sapiens
taaggtaaatcgattatcggcttcctttagattgtgcagagaaataagtacagtcaataccttcactttcctcgcttctttcaccttccctgctcccgcaggttgaatagtattatctgatgctttccatggcctgatagtatctggatattcataatatgattgtgctgagtggcacactgctattgcctcaagaatgatccagaccttcgaatgcattggggaggggggaacaagaaaaaaaaaaaaaaactctcttaaaagtgatatcgtatttcaccagcagatggcaagctacactcagttgtgtgtatatgtgactaaagttgtgcaaagatttcatacacaagacatagagaaaggccatttctttctaattgaagtagctagaaatctaataatcaatgtctaaagagatctatccaattaagctttaagttgagttcgtcttggtctcgaggggattgtatttagtgggtggaacacagcagcaagaggtaggcatgtaaggactggggttagcagtacttggaaatatcttcttgcctctgggggagaaagattttaaaaggctagaaagtcaccagggcttctgctaaatgggctggtcttgaatttcggctggactttaggtagtaaaagcatggcctggaccactgtggctgagacaagtaaggcctgaaaaatcagcaggaaaagttggagcttgaggctgagaactgtcagctgatgagatacccaggagggtggggatgtgggtctgaattcagggacaggctcagtaagtaggcaatgggacacctgtgcagaaactgcctctatcccatcagccaaatacatgaggatgacttcgctgggatgaggtcagtgtctacatgaattcccccagacagaacagtccccattctctagtactggctcagtcatgcaccttgaccctaaagccagagtctctctgatggctacacccagtccatccagcccagttccatgacaggacacccaaagcattcttgatttgagcctaatgctctccagtaccttctttggatgccctgtggaagatggacagatttcgtaaaatatgctgtcctctatttgtggccctctagctggactgtcttagtgccccttctggacactgaaagggattcctgacactgatgcctatctgaactgtgtctgaacctgctcaaccattggaagctactttggatgacctccaaagccaaacattttatgcattccaaaaagggagaaagttgactcagcaattgtctgcctaattttcagctgctgaactatttcaatgacataatgaatattttaaatgattataattattcttaaaatgttagtgaattttaaaagtccatcagtttgaatcaacaacattattttagatttattttggtaccatggcgaaattttattcataataccattttttttgcttaacttcagttctttgcaccttgttatattattcaagttcttataatgttatgagatttaggaatagtcctctgattatatgccctccctgttagctgaatataattgttaataaacaatttaattgttttcccttttcataatatgtcatttaagtgagccatactggccattagaaagttgttctcattgagatactgcagctgcatgttttagttataaaatttttctcatacaaatatcacaactaaatatattagacttaggctgtaaaggcaaaattacacaccatggctttgttcttgacattaattacctctttacaaatattttcttacattccagtagacagaaatttctctcaggtagcaaagcaaataaatactgtaagttctgtagtggtgatcaacatattctttctttaataaatt

SEQ ID NO: 48537 - DNA, 1182 bp, Homo sapiens
acagaggaagaagcgcagcacggcgctgcagttcacgtccaccagctcctcgtactgctcgatggccaggatggcgttctcctgcgtgctgtggtgcaggtggttgggcatccgcgtgatgttccagggcatgtgccggcacatagggatgcgcaccgcctcgcagggcgcgccgcgcacgcccagcgccaggtgcagccacaggcacagcgccactaggatggagaggaacatggcactgccctctcgcgctgcgaccccggcagacagaaagcgcccttctcttcctgccaccctcatctttcgctgtcccttcgccgaggaagaaatcctctggggcgcaggagagtttcttcccccaaactccagtcggcagcaaagcggggccgcggggtccggccgcggagctccgccgtctggcacacagggcacgagcagcgccagctctcagccttcggggcgcgaacccgcccgggcagctccagtcccggactccgcagctcggagcgcagccagccacggccattgcgggaccctatttatcccgacacctcccctgacgtgggctcggaacgctcccttggcagctgcagccgcggcgcgggctccccctcggccgccccacccccaggcccgtcggtgcagaagcggtgacatcaccccctctgggccgcagcccagggctggaagcctgctttccccctaaagtccctcctttttagtctggccagtcttttttcttcggaccaagaaaaagaacctctggcagttgttttcgacaccggatacaagagggtgcgggagagaatttcaagagagagaaagacactctttggctgaaaactgaactttgctccctctgccttagagtttttccaagtatagagttgggggaaaataggagcttctgctgccctctaattctgaaatatatttgctttctccggtagggggcatgaggagcgctgaggacagttgggacaatgtcctgcaaggcaggcgagagtgcagtgaatgtcagaacaggagggtcacgttgtataaatcactcccactccgcccttagttgtgtggagtgtggtttgttgttgttgttgctagtagacagtttgggccgaaatttttccagtataacacttggtttgtttctgctccaggaagttaacagaactgggggaaggt

SEQ ID NO: 48538 - DNA, 2050 bp, Homo sapiens
tgtccatgagtcctaggcccaatgcaaggggctgtctactagtctcctagactcttcactgggaatgggagctgaggagcggccatgatgaatagctagtatcatttcttcaggaaaagactcgtctttccacttttaatttggaggaagaagtttgcaattttgtcgaggggcaatgtaggcggggcaaacgtttgcacagcaaacgcagcagctctgcttttcctatcttgaccttgaacttgcccctccctgtgtgattacctgttgaacactgaagttagtggagaaacacacttctcagcacagtctccccccatcccccctcttaaaacacgatgcctcccaggatgctagtggcaccactgccactgcatttcctgttggcagcagtgagcagtgaaaaccgaagcggcagaaggcagtggcagcaggcagtggcagcaggcagtggcccaggcagaaatagctcccgcgcgattcactggagccttccccgggccctggtcccggctaccgggactcgcgcgtccggatctcaaaagcggcagaggccaccgaagggacaggaagcactttggtccagaccacactcccggcacagtgcggaaagagccggcgggagccactctgatcccggacgcctcagcgcccccttgggcttgggcttgccctcgggccggggaaggctgaccgcgatgccaggacgcgctcccctccgcaccgtcccgggcgccctgggtgcctggctgctgggcggcctctgggcctggaccctgtgcggcctgtgcagcctgggggcggtgggagccccgcgcccgtgccaggcgccgcagcagtgggaggggcgccaggttatgtaccagcaaagtagcgggcgcaacagccgcgccctgctctcctacgacgggctcaaccagcgcgtgcgggtgctggacgagaggaaggcgctgatcccctgcaagaggtacaggtcatcggcccgcggggcgggagtagggagccgcgcgggcatggggagggcgaggtcgcagaggcctgcgccctgtaactctttccggccccttgcagctcctcccttctcccagagagatctttcgcgaggagggtctcttggggatagcatggtccgggactgggaggggcgctgcgcccaccgagggcggcctgctggcgggggactcagtaacacccagcgaggcggtggcaggtaaagaagggacccatccagggcgggatcaagctgcagagtgccccatgcccaggttcgcccctgttctcacgctgctgagtcaggctctgggctcatggagccccctgcagtctagggcgtgtcttctgcgctatctcatttctttctagagacatctgctagagaggcacgcagaatatgtattttctaagaaatactttttgtattttaaaagaatatggcaagattacaaacggtatgggaaagtgataaaaagaaaatttcacccacaaacttagcaaattgttacagcattaaaattttggtctactccttttaagttttttgtttattttaaagcaaattttacatactatgatcaaaagccatacgttatctgaatctttttttaacttaacattgtcccttatatgttcttatttgccattttattagcttgcctcctatttttaatggctgcacagtatcgcttacaggggcaaagctgtaagtttcttttaagtattggtctgaccattcaccttttcacatctgttgtgacaaaggaaaccctctttttgagatgtcatctcgcttgtggcccctttaagacctgatttctaatttgggatcaccacctgtctcccttccagagccctgccgttccccctaagtgtgttcctctcactggcctctctttatggcatttgcatcattaggagttgcaaagtgaatttccatggtttgaaacgccaatggactgtaagatctatagcaaaagggcaccattagtttatagaacaaaaccaaacttgataatatcatttattctaaaagcatttgttcaagtattaggcg

SEQ ID NO: 48539 - DNA, 1557 bp, Homo sapiens
acataaagacatatttagaagaatatatgtccagacacatgtacagagttgttatttctgtaaattagagtttcttggcaatttttgcttccctttccatccctagattgcttaatttttttatattgatcatgaatctgttttactaaaaaaaaactattttcaaaagcaagaaaacttccccagattttcggtgtttcagaaaacatggtgattcgagagcctactttttagggaaatggatttgcaggaaacaatggaaattgtcaatgtaacctgagaattttagtaaaagcaacaaaaatcctttgtcccatatggtgagaagcaaaacaggccgctggcccgtcctgtgtgttgtggttgccgtggagagcttggccttctgagcctttggcagggcctagccaacctgaccttgctcacagctgaggctcagcagcagcagggcctttgtgggaactcgcctgcccctcccagtgaactatgctttgcttggtgcctggccagcaaggaggcgaagtttgtctgctgttgttgacctgggctggtctgcctccctgtcctgaacaccaattccagcatctcaccttgcttgactgtgccccagcgggggcgttggtgcctctcatctcacaattgcctctgtgacagagccagtctttgatctcgcctccaggaatccaattcctctcaaagtctgttaatcccttgggtccacgggttattcccgtacagcatccccactctgattactcatctcaaccgtggctgatctttgcattttgacctttggtccctgtcaggccacaggccctgtattctatttgtgatgcagagacttatgtcctaactgttaatatgttcacataaacacacacgccactacagtatcattaaaatgttttctaaaatttgtcatagagcagtactagcatttatatccacatgggattttgaaaacaaattatatagttctattttgttttccattaatttattattttcagtttaacttgaggtacagtcaacataacctcaatatcagatgatgtctacttttaaaaaagcaaatattttgaaaacatagaaaagtacagagaacaccaaaacgaacacttgtgttcagaccacccagatttagcaaatgttaacatttcatagtgattgttccgggtctaaaattctcattttaaaattaaattttacttctgtatgtgggcagagcgggcctcagggaaacagtgaagctgtgagtgttccctccctgctgtcccctgcccttctgttgcaggtgactgaccaggcatctgtggcccttgatgccacacagggccatgctgggcctttcccagcacagctgtgctggcagctgctccccgggtctctccatggagcactggagtcctcaattctaacagaaatgatagaactgagtagcataaaaagctgcaagccaaaaatgaaggaaagtttattagaacaaaggaagcttattgtaactctgtaagcgggggtgctccaagcatctcagaaaaaaagagcccaggaaatgaa

SEQ ID NO: 48540 - DNA, 1296 bp, Homo sapiens
atgaactaggagcgctgagaaaaggtatcctaaataggtctgggggaagtgagagttagaagaggtgactcttgagctgagtaccgacatagaaatggtatgccctgtttttattcctggagggctcagcatgaggtgcccaagaggccctgaaacccatttccatgacattttcccacgagctggagcataaacccccaccgaataactgaagggaagcggaaggcgcagaaacgcggacgaagaggaagcgggcgcttgttaaaccgtgcgatgcacaatgcgggaaagtccaaccagctccgtgtttcaaagctggatgcccagatttcccacccattcctacaggcagaccggctcgccctctccctccttcccgcgtcgtttactggtcagtagaagattgacatgtcatctggccaataggttggctcctctatggaggcactcaggaaccagtcgggtctttggtccctcgagcgagatgcgagctgtgtgcgtcgacgtcagcgtgctgacgtcacgggccggaggtcccggggctgctgggtgcgggcggtgggctgcgcgttgtccgctggactgggtcccggtcacgccccgccaagccccgcccctcaggccggggcgcgaccgcggatccgcagttcccgggccagcctggggcggccggccaggaaccacccgttaaggtaggctgggtttctcgttcccctatttgacaggttggaaaactgagtctcctgggtcagatgacttacatgggggcgtacaggggacccgcggacggaggccatatcctggtcctgttctgtttcctgagtcctgcgcgagcctccaggggaggaggaggggcgaggcaggctgtgctcataatggacacaagagtgaagttgcagaatgctgagccccgctgctcccacggcgtgggccgggattcagggatggatataggtagcgggagtgtcctcattcctccagcctgcggaccctgaggagtccccggtggggtcggccccgggctggcgccatgggcccccaagaaggaccaagaattggtgactgggtgtaatgcgtgggttgtccagacacaggcggttgtgagtctcttctattcattgagaaaagtcgtgttcaaaaaaaaaaaaaagaaagaaagcacgaatcatgaatgttctccctgtggtttcagttaactgcttcacctactcgtagatatctcgccattgtttgaaatcttagttgcttgaatacttttgatttagggttagggatttttccccctctcttttagtt

SEQ ID NO: 48541 - DNA, 832 bp, Homo sapiens
aggctactgggagcaccttcatgttggcctctgtgtccttttgaagtgactccaggtagtctttgacagcctccttgcttcaggggataacaagctattccagatgcatcttatacatttcctacccacacctagaatcagctatttctgcaaggagccctggtagtaggaagttttagtaggatatggtttcgtttagtaagaaatgtggcactgctgcatggctgtcattgctttgaggcctgaatatcattcaagatgtggtcatgttcatgagatgtcgccgcagtgaggttagtcatttactaccacctaacaccgtccttttctgacaatgccgtccatgaggggatgtcccctgaaggcagttattctgccaaaaatcaaagctccctgcagagatatgccattcctgaactggtaggtcactcttggcatatgatcatgaatcacgtcatgtggcagaaaaggaaaagaacctcctagagatttggaaggccagtttctgacgagagaactagggaatcaacattcccaggcatcagccttcctggaaattttccctctgcactctccggggcacacggcctgattccatcactgcctcagcagagacctgagcagatggagctgaaatcttgcaacttctacctaaataaaatggccattatgtaaatatcgggcttgaatccagtgtgcaagggcatatgtgtatttcaaatagccatcaggtctacatttctcccacgtgcttcaagctttaaacaaaaatttcctatcccttctgagtaagaattacaaagttcatctctgaattctccatgacaaccaa

SEQ ID NO: 48542 - DNA, 400 bp, Homo sapiens
ccacaactttatgaagcttgaagccacctaccccagaagaactttcttaaatctttaaaaattataacaacaaatattgagcaataaatatgtaccagtcattgttctaaatgcttcataattttcacaaacaacaggtatatattatcaatgacttcactttactgaagaggaaaatgtggctcataaacgttgtgtaactttggaagagttgcagctaagcaaataatgaaacctggccaggcatggtggctcatgcctgtaatcccagcacttttggaggctaaggcgggcagatcacttgaacttaggagttagagaccatcctgggcaacatggtgaaatcctgtctctacaaaaaaaagcaaaaaacaaaaattagccaggcgtggtggtgtgt

SEQ ID NO: 48543 - DNA, 1609 bp, Homo sapiens
gttttccatgagtttttaatatagtgcatgtaagaaagccttactcagtggagggacaacaactgcctggttgtaggttgtcacccttacccctgtctctgggcttgcaggaactagtaaaggatcttgaatccttccccctgcacacggccattatcaactgataaaagctggcttgtgaatgaaatgatatcccatttgataccccttccacagcattttgtgtttcttacaaatattatttccacagtttatgtctctaaaaatggttagttatttaaaaatgtttacaggattatcaagtttttataaaatcagactatatgtccctaataagtcctctactgcttctaagacaatatgacaaaaatttattccaccaaaatatttcttggggagaacactgtttggaattagtgaattgatgagctacctaaaattgtgattagaaccccaggaacatgctgaagtaacaaaatgcagccccaaaagcacttctcctaagaagggcaggtgctataactggacagttctgggtttgtggctgagcacccatgaatctgcatacacataaaagggaatagaggatttggattatttttcaacagaggcaaagaggccaatgagagtgagtgctgtataagggaaaggcgtaaagcggaaaaaccctactgaggtcagcagggaagtgacaatggagaaacaccaaatatgaatgttatgttatatgctacattatgcaatcctcagtacaacccacattgttgtcatgcacgtggctcattttggaagaatgtgaaaagatgacaagttttgtttcttggtatgcatggtacaaaaattgtgactcatgtggaggtaggagccagaagaccaggaacactgacacctagattatattaaaaagctctcctccttctccaaaactatggtattcaattgcatttcctctagttatttagggtgtgatttctaaaagtgattatttattttctaccaatatgatggtaatataagctgattataattttttagaaaatgaaaaaacttgtcaactcatctacaacttaatctatgttgtgaggtataaactgataaattttgatatgttgattatacattgccaatatgttatttcaacatttatgaaacaactcttccttctttactgtgctgtgaagtctgtttcatatattaaattattgtaaaaataggctcatattctgtgttacgttggtctaaaacctatgtcctttcttacacaatttacttcatgttgtcatcccatttcttagtttatggggaccaaaatgaataaaagctacttactcagaagataaactgtctcttctacaaagtttctctgttgacagatctcaagagccttcaattaaagcagggtaaaaatgttactataggcgaccaaataagaacaaacagtaataaagtcatttaaacttacacttgaaagaatttttccacagcttctttaaaaataaaacaaagcaaacaaataaagaacacatctccctagaatagctgcactcagttacctctcagaggtactggactctacacaattcaatttaaaacatatttgaagctactc

SEQ ID NO: 48544 - DNA, 541 bp, Homo sapiens
cctaatggtctcctaactaggtgactttctcctgccctaactctactagaaatctattctcagcaagcctgcacagtgacactatgttaacaggttgataagagacattcctttgcttaaaaccctccaatggcctcctatctcaagaaataagccaagatttttactacgacctgacagtcctaaattatctggcctttgccctccctccaacttctgacctcatcccctcttcccctggttctctctactccagtcctgatgaccttttgctgcttttccagccttaaggcctttccatttgtccaccctctgcctggaatgcctttctgcctactctgtgctggtaatcatcttctcagtgagatctggccaaccaatctaaaaagtcaacattttacccaaacatttcataactcctcattgcttttgttttgtctccttagcacttgccactatcttagtgtatcttttacttatttgttttcaaactcactcactagaatattaacttcatgagagaatgttcaaagaataaaaa

SEQ ID NO: 48545 - DNA, 2504 bp, Homo sapiens
acctgaaatatgacatgagagttttcttcctttttatttatttcagcattactcaaatagtccaaaattctctgtatttcattgcatgtgagcatgcttcattgcaacccataatgaaacgctcaaatttacaggcactactaagtgtttcagtcaagcagcacaatctttaaaaaataaccttacagaaagtcaagatttaaaaggatttatcaaaatggaattgcttaaaatgaaatttcagttcaggcacttaaaatatgaagctacattaaagaggagtcacaaaaagggaaagaaggagttcattagaaattcatcccctgcaatgcctttcactcctgcaaggttgccttttttcaggaagaaaaaagtccccagggtaaaaaaaatcaatactggttaataaaacatcaggtgtgcagacataactaggtatgacgattccgctgcacaggcctgcctgaatgcaccaggtgccatgacgattagtcatccagggcagacagcaagcctggtgaaaacacaatgcttgggcgctggaagggaaaggggaaacaggtaattctggggggaaattagtctgaatagttaaaccaaacaggaatgtttcctccaaagcaaaagaatgttctaatcagaaacagagaactcaaatgattgtaattttacctctacagtgacactgacaatatttaaatagaaaaacaccacatacgataagaattgaaaacaatactccattctgaggctatctgtggtaaaagaatgggtcttaaaagctcactgctccccaagtatttcacaatattgattctcctcataaataccgtatttagtttgttaggaaactaagggagaagggagcttggatctttaaaacgctttaatgctgccattctctgacacctctgtaaaggccacttttgaacttctaattacattttattttatggaagtcagaagttttatgtaatttacccaagttttaattccttcccttcttttttctaaatttctcatttcattcatttaatctttaaaatagaaagaaaacataaaataattattttgactttacagtctcatcctaaaactaaaactatgttagaacattttggaaaaaaaagattcagtgatttttatgacaagctatcttgtgtttaggaaaacatttcattatcagattagataaattagtgttatccacttttagaaatatatactcttcaaaaaaagtttactaagccaattatagttatttaactaccaatattatggatgagtcatattttcatcatttgctaatactttccactacttaaaatataacaaaaaatgcaaaatggccacaaatgtgacaacataaatacaaattctcaaattttacccaccttccagccattaaaagccttgaacttttgtaattattgagttttgtttctttttttttttcacctgaatgtacttaaaattcaagatgggcaaagaataaatataatttcactagaccctttcatgtttaattacagaaacttgactcattttctatactaccagattgggcatcatccactaagcacaactgcttttaccttaaacttcatgtaagtaacttaagtaactgataaatgtacatccataaagactggactttatgtaaggaaacaagcagaaaaggtgataagcagtcctttggacaatgcaaaggaaacaagagtagtccattttaaatctggtcaactgtctaatatcatctaccttcacatagtgttttatagtattcaaagcattacagcagggagtgccttcaattacacatgaggaaataagctcagaaagttgatgagacttccctggaaacagtcgatgagtagcagaattaggatcagaattaaaagctaaaacactcaactggatcagaatcctcttaaatagaaacatggacttcagataaagagtgcatgttctaaaagttagcattgattacagttcccaaacatcaggctctttggcaaagttggtttacgtacaatgttaatgaagtttgacctctaggcaggcaaactttgttctccatttcattcattcactggttcattcaacaaacacacacaaaaaaaaacactctataatacgcttagacaatgaccaagtgtgacttaaaagggttatggtataatgagggaaacagacataaaaatggattaattacaattaaatttaaagagaatgcttaaaatggaagtatctctaagaccctatggaacatagtagatgacagctgtgctgaactttaaaaaagaaattagaaaatagacaccaaggcagacagggtaggcttgtagtaaaaaccattttaggcagagtggctacaacttgctcaaaggcacagagacacataaaatgcaggacaaagtcaagaaattatggatgacacatctaattcatgcccaggggaagagacaggtgataaggttggaaaggtcagctaataagaggca

SEQ ID NO: 48546 - DNA, 1114 bp, Homo sapiens
caaaaataaatgttttcacaacacagctcagtgaagcatccttacggggtttcaaaaaccataaataaaatgaaaactccaatattaggcatttgatgtatcatttcacgcttttctgacgggtatcttttatgttaagttaaaagtagggtaaaggtgaattttttaaggttttttttttccttcttgctgtaaacaaagaaaatagaaagtgattgaaaaatacgattcatggaggttattctgctgctgctgactctatatcacactttaaataaaaaacatttaaaagtctagtagattatagagtttctctttaactaaaaaaataataataatagaaaaaaggttttcatgcagtttggacttccacggtaaacaacccagtgttaataaaaagcaaatcaataatttttgttaaattttaataatcctacaaacctacaaataaaaccatcaacagtctgagttaagatgacagttaactgcgtttctatgacaacctagtggaatagtacaagtcctgacttgcagctaagcgaagatatgaacagagtgacatttacccatacaagaaaaatttgcggctttcttttaaaaagaatcaattcctcaactcacatagatttttactaagtgtagagcacttttaattaaagacaagtcctttataccatcctacagaattctaaacactatctgaaaataaatgtcacatcatggtcaatcttactgagttttggacttaggaggagggaaattacttttaaggataacaaatcaaagcatttaaagacttctccctgaaaaactgtttagtgatgttgttacagtgttaccatggggtaaattttcatggaggaagtcctgtttacctaacttggtcttgtataccaacaagaatattttacatttcttttcacctaataatttaaaatttgtatacaagaaattgattttttcagtgtttacaaccaaaaataattgtgcagaatgggttctacatttttcatcttgtttaaacatatctttcacatatattggtacattttatatggcatcactgttacaggccaaatgaagacttgaattttactttttaaaaatgtgtgtc

SEQ ID NO: 48547 - DNA, 1107 bp, Homo sapiens
accactactgctatatgaaaataattcatattcccatcaccaatttctaccctaaacttcagtgccacgttgccagttgttgactggatactaccagcaacaaataatcccatttaatttttactaagcccaacagttctaagtactctaactttgtgtataaactcctctctccatcttaaaccaccctctgaggacggccttattattacccccatctcacactggaaagttaaataagtagctcaaagtagcacattgggtaagaaaaggaaccagcacttggaccccaggcatttttgctccagaacggatgcatttaatccctgctgcaccgcaacagtgctccagctctgtacctaactccaatagatacaaaacaaaactcatcgtctactctctcctagttcttattgtcctacttcaagtggaaagcaacttaaatttcagtcacccggcctctcttcctcctcccacaggcagtcagtccctgaggtagccgggcctgccttcatgccaaaatttccctgggcaaaggccacagggatggggcccgaggaaaggcagcccgaacgcgggggtgtgtcagagcgctttccctaggtgccctcccggggctggcatcctctctgctccccgaaaccaactttcgccatcccaccccgccctgccgcggacctgccttgcgctattccagcagctccgcacctccacccactccactccaccctccccaaacagcccaccctagtctctatatccctgtgccctcaactaccacctgcaccctttacctgctcctctgcttccgccatggcgccacgggagagtcacctgacagacccggaaataagaggaaaccacacacttggcccagggccttctgggaaatgtagttttagcttcatctgagcctggaaatctcttctaggggacggacctgctagggttcatttctgctgccaattctccaaactcaatggaattctgctttgaaggatgtgaacataaccattgctaatactatagcttattttattgttgttcttgtttctctagttattctagtgtttattaagcacttactatgtcatgccctgggtttat

SEQ ID NO: 48548 - DNA, 1036 bp, Homo sapiens
ttttaaaaaatttttctttttgttttaaggtccggggtacatgtacaggatgtgcagatttgtgatgtgggtaaatgaagatatacacagttttagtaacatttccgtttctccaaatagtattcacgcaaaaaaaaccttcagaagaatggagttttggccctttctctggaatgatctgtgttaaatatactccttaatgacaacactagtgggaatgagaaaaatgttcttgtaaacctacttatttatttattttgttttttattttcagtttaagctgtcagacctggtggaaagtccaaattcctcttagggtaaaatttttggttttgtatggcaaataaactatttggcactaaaagtcggaagggcatggcctgaaaagttaagatcaaggccaatgaagttaattatgttgcttttcaaagtaactggaattttttcctcttggtaaaaagagttcttgggagaatctaagctgacagtggaagtgggaggcagaaagggagggatggaaaagatgtgtcatggctgagggaggggacccaggaagatggaggcaagtgaagtttggagggaaggacccacaaaaaatgatctgcagtagagatgaccttcggatctcagcacagtgatatctaattctcaattttatgtggttgccaattctaacctctctgtatgtaattcacttctgttagcctaagccttcaataaaatgtctgctacacagaacagctgtggttagcggtcctttgagaaaacgagggaagagaggtggggttgggcatggcgtaaggaagttcagagagaggacagcagcccaggtattgaccaataagtacagtgattgagaatccagaaggagcataaatccagaatgggaggtgtacatgaactggtaacgtccctctggaaatgccctaaaatcttggggaaggcttgaacttcctgctgtgcatatcagatagacgggtgccatcttatttcacatactaaaggaaagagtggccccaggaaactggaagacttg

SEQ ID NO: 48549 - DNA, 696 bp, Homo sapiens
cctctctttccccgatccccatcctgtttactctcctattctgtctggttacctcagggaaagcagatatttcctgagttttatttagtctagagggcttctgcgaaatcatttctccaccccagaaggtcctaacagcccacctcacccctgaagttcaggctcgttccctcctgggctagccctaaacccagactccaccaagctccccaacattttccttccagcctcgtttccatcatccccctaccccagagcttccgggggaatgttcgccacgcccctccggtgggttccaggccctttgcatgagcgaattgaggcgagaactacctccccagagtcaatgttgtgtccgtgtgctgtgcctgtgcctctcggtggttttcacggtgatcttttctctctttgcagctggttaataatccactagcaagtcaggctgcagcggctgcagcagccatgagctccatagcaagctcacaggcctttggcaatgccctctccagtcttcagggggtcacaggtcaactagttactaatgcacaaggacaggtgagtgggagatgggaacaagagtgcatttttatggcagattgaactcggaaaggaattgaatttcttttgcatgacagtgatatgtaaccgcatctattcgaggcaaataaataatgtttactagcaatgtcaagaata

SEQ ID NO: 48550 - DNA, 949 bp, Homo sapiens
ccctaaatgtgcgcttcgggaaaataacgagcccctcaagatgccccacaaacgacggtcccctggtccgaggagccgggcagcgccgcgcagccgtctcgcgtgggacccacccgcgggcggagccaggcggcagggctgccccaccgagcttcaccccagcaacccctttaactttcttaaccctgtattccccaaccgaacacttcccagagttcacgctggcagagcccacttcaaaaaatgctgcaggaagccattcacactcattcctatccacgtttttaaaaatgcgaaatagtgatttaaatcagaacagaacctcttccaatgggggtttcctttgcaaccggggcttcgcggtgatttctgtgctgttttgagggcacacacctacataacacgtttgcagagataagggatctcaaactgttcccaaaagtcccagggactcgtaatatgcaaaccgagggcaaatgaacgtgggaggatccgaggcgctcgctgaaggggctctcctgcagtgcccaggcagagggagagtggagggggcggctgtggagtgaagggcggaagtgccctcgccgtcctgaggcctgggaccctcttgatggtaaatggcgctgttgagccccgatgcgcagggactccgcgggcggcggacttgacaggaagctttgctgcggggcggcccagctgcggacgcgcgggacgtcagggccccagcagaagcgccgggctgtgcgtccttaagactgcgggtgcggccccgcccaaggtcgccccgccctccatccttctaccccgcccccccaccacatttctgaaatgaaagagttatcaatcgctttagggttaacttaaagaactgaaaggaaagccctctctgaactctttctttctaccctccttccccagcaaaactcagcagtgcaggctgccatgtacc

SEQ ID NO: 48551 - DNA, 1030 bp, Homo sapiens
aaaatttaatttaatttaaaaatagccccagtcgtcatcacccttgtaagtaaatgactaagaaaactaccaagtggacagaatggtttctacatgtccgttggttttccaaaaaggaaagaagaaaatttttagaaaatttttaaacaaggaatacaccacactgaaggtgtgtgtggtaggatagttcccttcccccacctgtctcccccaaagccagttttttaatggacttaaagcaaaccaaataaccacgtacttttttctgtatattatgaaaatgtgaacacattttaaggaaaaagaaaaaaaaaaactaaaccaaaaaccaacaacgaaggaacaaaaactttgatctgttcaaagcgaatacaagcctgccacctggaggaaggactgcaccccttcaggtactaagtgctgattcactatgaaacctattaaccaaagtcagaaacatggcattgcaacgcgatcgttcgtctacgcttctccgcacgtaaagttgtgttacgaatttttacatttgtactaacagaacaataggaagcctgatttctcccatctttcccatctactgtctccacccatggggtgggtaccattgttgaagccattctgtgaggctcactattgggtttttttgtgggggtggtagggagggtggtcttttttctttgtctttctttttgacgggagggcatcctggatcgtgtgccaaagcatttgttgcttttttctcactatgacttgtgggtttgagaaaagaaaatggagctcgcatttctctcttttcctccatttctccatctccctcgcgcgtggctcctggggtctgctggaaggccacagaagtggggagaagcagtgtcttttccactcagatcctagtgaaatgcaggagagactccaaaataactagggctttgctcgatgaactgtcaacactggcataagctgtaattgtgctcactgtccacaccagagcttgggatttttctcagtctgttggccacgtacatggagagct

SEQ ID NO: 48552 - DNA, 1591 bp, Homo sapiens
tttttcatagcatttatttatgatcttctaacaaaccttatgctacttatatattgcttattgtttatcctgtcaattttacatgactataaagtcgacaagggttgggaacttccgtctgttcattgatgtatcccaaagcctggaatggtacctgacacaaggtaggtgttcaataaattgttagataaataaatcataatcacatgactcattttacccaggcaaagggcaaaacaggaatactacaggtattcattcattcaccaaaatagagttcagcatttactatgtgtcagaactgtcctggtgttgacacaagtccccacccttaccaaaccaactgtttactttagggcatatgaacaggaatgggaggcagaaggatatcgtgaatcaatgaaaaaatatattggctttacaaatgtactctatatttcttactaatctcaaattggctacagtacctcgcttttcgatcctattttcctttactccacaatcctaacagtttaaaatgtcggcttgtcaaatcctttaaatgcagaggagattccaaaagagacaaagtatttgggtggtaatcgcccatcgactttactacctttaatagtttaccaaagcgcgcgaatgtaaaacccagaccatggtaagactacggtggaaatggaaggtgtctcactgagggtcccggttgccttctgcaaaggtgaaggtcgtgccggccacgcgaggaaatctgcctcgctcacaactcacaggcacacatcaacactgccaaccgagggagcccaaaatcaccgcaagcgaaaggctccggcggcggccacgggccacagcccgcctccgcgcacacgcagcccctcccgagcctccactcgccgtcttcgccccgccttcggaccggaaggagttgttggcgcttccggtggcctgcgaccccgtaattgcctcggtgatgtcgtgggttcaagcagcctccttgatccagggccctggagacaaaggggacgtgtttgacgaagaagcagacgagtcgctcctggcgcagcgggaatggcagagtaacatgcaaagacgagtcaaagtaaacgtggtgtggacggcgcggggtgctgggttgtgggaagaggcgcggagttgtgaagaagctgggtccagagtggccccagcctggcccggcgctgctctctttatccctagggacccggtccgacccgcgtcttgctaggatttctcgatggttacttgaaagcgtgtaaaacaacaagacgcattctttgagcgcctacgggatgcgttagaaactgaggaccgaccaaaattaactatgtgtagactttgaacagtttgcagtttgttgaggatcacagggaaaggagctggagagaaacatacactatacttattatggctgtcaaaggacgtgtacgcagtttatatgggtggcttgaatgggtagggagcctaaagttaaggagtagtgttaatcaagacatattgaaaagatgaactaaagcatgctgtcagaggacaataagggaaagctaatgtggaatactggtgtctaggtaagggaatattaaagttg

SEQ ID NO: 48553 - DNA, 2678 bp, Homo sapiens
agacctgtaattattactcattcttctcaacaaattatttgtccccgtgctgcatctcctttctgttcggatccggatttgccatcccacccctatttttgtagtagaaaatgcctatttatctttaaaactctaacctacgttagtaaagctatccattcttcacgctgtacatcttgataaaccatacttccaatagcaatgatttgctttcatgtatgtctgcccactagactggacattccttgaatggctcataccaggaatatagttggtactcaatttgtggggagcaaagagagataagcgaataaatgtcaagacataagaatctgtagctgctaacttaaatttacggatttagtgaaactacttctcacaagctaccaaatcacagtgccatggggccgcaagatgatctcagtgccacaccgacacctgcagagtcgcaggggggtccgacacccctcagaaagaactcgcagaccgtccgagaaagcgaattctccaggggatcagcagttagatgaggcccagggcagccacgagaccctccagccagggtaggcggctgacccgcctcctgggatttggcccgtgacaagccacgtcgccagctccgctctgaatacccccggccacgccacacgagcggcctcaaccctgagacgcccagggaacatgagctgaccctctagaagcaagatggcggcctccgctctcccctccttcccccaagaaccccctcctggtccccaaaagaaagacaaggacaccgcggcaacgacgccgagatccgggaacctccgcgaggcccgcggccactcccgagcccccgggagatgacttcacctcgcggagctcagagagccgggggtggggccgtcggaaagacagcgcggacagccctcagcttgcagggggcggaggccgggcagcctgcgccctccgagccactgttctgcggcccaggcccatgatcaccctcctctcagcccacggacaggaagtcgctccccagctgccccgccccgctccccagcgccccggaagtgatctgtggcggctgctgcagagccgccaggaggagggtggatctccccagagcaaagcgtcggagtcctcctcctccttctcctcctcctcctcctcctcctccagccgcccaggctcccccgccacccgtcagactcctccttcgaccgctcccggcgcggggccttccaggcgacaaggaccgagtaccctccggccggagccacgcagccgcggcttccggagccctcggggcggcggactggctcgcggtgcaggtgagcgatgcccgctcgggccgcccggggagggactggggccacccgggcggcggcgggggtgtgtccgggcggcggcgggccgaggccctgacgcgggttcgggctgccgagattgcacatcccacgttctgcccggggacgagctgcgagatgagcccggctggaatccggggcaccgcgttcgccgctgtggggcgagtgagcccccgagagtgagcggctgcggagaggtcccctgcgcccggcagccggtctcagttggcctcgtccgaaggtcaccccgcacctttcgtccacggcgcccaagttcccgcccgggcggtgcccgcgacctggggcaacccgctgccgccgcagtccccgcgcctcactccacccctctcccctccttccctttctttccactccttgcctgtgctagagccgctgctttttaagcatctccgccagggttttttgtttgtttgttttgtttgtttgtgtttttttttttttttgccagttaaaggaatggtttttcagacttaaagtcattagactctccgcactgaactgaatacctggccttgggcgcttgcacagctttagcccattttcaggtaatctagcttctaatatgaggaagagaatacattttgggagagaggtgtttcctctgtggttcgtttctgaaagatttccagaagtggaagatgtgattggcatgctttagcctggatatatgtgtttaagtagacgggggtgacggcacacaggggtggcagtgttgtttcaggatttagggagaattagggagttaactggcctgtgctcggaaacctgaatgtccagacttgtaagagctcatccaagtgtggctgaggtagtgtgagaagtcccgtgccacgccctacgtgtcaagctgaaaagcacctaatttacaaattgtgtggtgtggggggggaacaacctttataaaacatgtatcataagttaattcttttccagaaagtaaattgcaactttaatcatattccagaaattggataacagatttcattggtaaactcttacagtatgtttattaatgtatttcagtgtgtcttattagctcatgtttttctgtctctggtaatacaatattattctaaaccgactcctgtattaaaataatacactattattgtgaagtattatctgacaacaccgttttttgaccttggatttctttagggcaggagccatgtcctacttatgactgtttctatgcagtatgccttgaacatagaagctgttcacacatttctgcactgaatgaatgagtgtataggttatctcacagtcaccatccaggagttgcttatttttgttgggctaggctgt

SEQ ID NO: 48554 - DNA, 448 bp, Homo sapiens
ccattaataaaattcaaactccatttatccttaatctcatatacaaaaccttcaagatgtgctccttacctaactctcttttttcccctttatctttcatatttttcattttttttcttacctaaccctttagccttatctctcttcttggatgatcttttgttctaccaatacccagcttctggaatgctagtgtttgtttactcagtcctccatttcctcttcctggaattctagcctctcttccttcccctaatctagtatactcctactggtccttcagaactcagtttaggttataattctccaaaaaattacaattaggttctctctctggatcccatccctcaaaaaacaaaaaacaaaaaacctttaagactgggctgattgcttctcttatgtgctgtcataatatctgttacagctcttaactacactggagagagta

SEQ ID NO: 48555 - DNA, 1281 bp, Homo sapiens
gtggagcagttttccagggtggcacttccctttcccaccctcccccgttaggaaaagcccttcttctcctgagctcccatcgctgcctgaaccccactcggcctggccctgcagaagcgaaagccagggaccggatttctcctgaagtcttctctgccaacgacagttcctcttccactctcccccacccaagggccgctcctcttacagtagacagcggtgcctgcatcgaaatggaattcaggaggagcacgtgagggggaggggagaggtgcattttggaggaacttgataggaggtgccttgggacaccctggaggcgacgaagctgcgtctctcagactgccactcttactcctcgccctgtagcagaaccccaacccccggcctgagactccagggatcggctgagctcgcgggctaacgctgtgaagcctgcccagctaccgtgacgtcacgagacccccgctatctcgttggtggctatttcctctcccgctgtggtccctggagacgccggaggagatttccgtgacaacggcaagctggctgcaacgaagccgcccacgtaggcctccccggcctgctggaggagaggggatcccccggggcagaggcggctacacccggagaacccggaaaccggaagcgcagatcctgccggctctggactagccgctcagcaccagggcggaaggaagacgaggcgaggcaagcgccaagcttccatccggacttcaaggccagtggctgggtctggttttctcaacacggcctcctagtctccttcccgcttgggcatctgtttttcttatatagaccctgaagccgcccgtgatgttctgtaagcaggttccgcttcagaatcagaggtacttaagagggaacctggatgctagacctgcccttgctgctggcctcagtttctttacctgtaaaacagggattttggaactgttaaattaaatcaaacttaaaagaattacaacttaaagctgctggaactttacatgatcccgagccttgagaggaatgtggctatgcagcctgagtcatgtggcatgcagatgcaacctctgcctttttccgctgtaaataattaagaagaccaagtagcatccaaggtaagacccctttagatcattgtccctcctcacagtcataatcttccttggaatgtagcaatctgaaaccaaccacatcgttgtaggtatgcaacttgcatgcacatttgtaatcctgctggaatgtccctgcctccgtctatataattgaaacctt

SEQ ID NO: 48556 - DNA, 665 bp, Homo sapiens
aatttctcagtaactgacattttcttgtctcttcatacctgtccccctcatatgtctccaatgattatcattgagctaggaagcacaagcaaatgcattaggaaaaaagtattatgatagaaatacagcaagtgtcagctcttttacaaaatattattctaatggaaaaactagctttatggcaaagtttcagtttaatttcctaattgtccagtgggtggcagcaccacacgggaatttcgcagaagcgtattgaattcccattcccaatcttcggcaccaggctggctcttttgcaatttaaactccatttcctgggtctcagatgctttcctgtctttgtttacttttttttgagagagagtcttgctctgtcgcccaggctggagtgcagtggcgcgatctcggctcactgcaacctacacctcccaggttcaagcgattctcctgcctcagcctccctagtagctgggattacaggcacctgccaccacgcccggctaattttttgtatttttagtagagacagggtttcaccatgttggccagtctgatatcgaactcctgacctcaggtgatccgcctgcctcagcctcccaaagtgttgggattataggcgtgagccactgcgcctggccgagttaaatctttatacacatgttaaa

SEQ ID NO: 48557 - DNA, 842 bp, Homo sapiens
gattgcttgaacccaggaggtggaggttgtagtaagccaagatcgtaccactgcattccaggctgggcaacatagcaagactctgtctcaaaacaaacaaacaaacaacaaatacatttaaatagccacacatggctagtggctactgaattggagagcacaggactagagtatgagcatgtcagctgctttattgggaggtgtaatcccagggaagcaaagagtaatggaaaaaaggaagaaagagaaacaaacccagtgctgccatgggcatcagggaggtcaggccaaagccaggcactcaccccaggggagtgtgagtcaactgtgggtcagctgtggtgttaggagaccagacgagctccaccgagcaagaggccaaggtccaagggtagggcagagtggggccaagtgagtctggatggggcacaaactcagtcaggtatattgtgagtgatgttgagcaagtcacttaagcccttcaacctttagttacctcttctgtaaaatgggtaatattagtacctacttcatatactggctcagattattcatttatgttatccagtatttttacaagaactttgtaaaaataagcgaggcagctatcattcttgccatttcacagctgtggaaaccgaaccaaagagagattaaatgaatatgacttacaaatggcagagccagagcttcatctgactcttagccttttactccttccaccataccacacttccccttgagctttcatcagtggactgaatttcagaacttaagagacacatagtgaggcataaaagagagttaaaaattatacttgggggccgggcacagtggttcat

SEQ ID NO: 48558 - DNA, 863 bp, Homo sapiens
ctaatttatttttatttatttatttatttatttatttattttattttggtagagacagaatctcactttgttgcccaggctggtgtcaaattcctgaacttaagcgatcctcctgcctccgcctcccaaagtgctgggattacaggtgtgagccaccacccccagccctaaaccatttatttttagccactgaaagaaaggaaatcaataaggtgtgtcttttgattgttgcggcttccttcctaaaggcaattcctggctatggcacagagaaaagaagcacaaacatcactgagagatctcactgagttaatgaagtagagataaaaacatggtatattttacctgctctagacatttaaaaaaaaacaacttggggaagctgaggtggctggaatttgtggggcagagttccaaagagggagatatgcagagaaagagatccaaaagtttgcatcaccttcattatttggcagaatctaatgtgtactatgtgaggtgaaatgacacaaggctgagcggagaacaaagtctgggagctctaagctaaacaagtcctagaggtcacacagggctaagagacgtttgatctccttgccagagtgaaaagaacttcagaaaaacctgggctttcaggccgggcacagtggcacgcctgtaatcctagcactttaggaggcccaggcgggcggatcacctgaggtcaggagttcgaagaccagcctggccaacatggtgaaaccccatctttactaaaaatacaaaaattagccgggcatggtggcgcatgcctgtaatcccagctactcaggaggctgaggcagaagaatcccttaaacccaggaggtggaggttgcaatgag

SEQ ID NO: 48559 - DNA, 4523 bp, Homo sapiens
ctttaagattacctattcctttgcctcctcctttatccttcagcaaaccaacatcctttgtactcggtcagtgaagtctgatcttagcttaaatcaggccagtctgtgatactgtgatgtcaaactgattaaaataatttacactaaggtattaacgatggatagataccaagtgtttaagaactaaaccaactgatgatctgaacaaatgaattttcaaaggggttactacatttagtcattgaacagacggcttagctttttcttttattagaggcagggcctcgccctgctgattggccaggctggggtgctgtggcacggtcatggctcactccagcctcgaactcttgagctccagagatcctcctgcctcagcctccggagtagctgggactacaggcgtgtgccactgcacagggttagcttgcgtttccaaccattctaaaagccaataagccatttacattttaatctaattatcccgagtgcttagtctgtaactgaagggcaattctaaggcaagaaatgagatgtgaggtcactatatggctatgtttggcaaccccaaaggtttagatatgaaggtgaaagtgggtgaagtactaagagggcagtcctcattcgcacaagatgtttttatttcaagcctcctgagaatttggaattttcagtagttccttttaacattccacttatttcctgtattgatttaaagctttaaaaatttttattttaaagtaaatagtgttaccgaagcttgagctgtgattcccaagtgtgttttttaggataagaaggggcctcgcggaagttgcggtgagccgagatcgcaccattgcactccagcctgggcaacgagagcgaaactcagtctcaaaaaaaaaaaaaaaaaaaatggggcctcgaactttggcgtacgtgagacaagttaaaccaacgccatctccaccctgttttgcggggtgttttctctcctttcgcagctgttccactcccagggcttgactgaaggtacacggggggtaactgcctactccagaaggccaccaacagcattatttccctcgcagtctccagaaacacttgttctcactgtgacctttcgctcaacaggcaggcagtgcggcgtctgcagagccggaaccggcactgcgcgctggacgcaagcaacaagcacgacaggcgcgccaccacgggcagagtctcaagcaacagcagtgggcggcacacgaatcctctcctttctttaacccttcttcacacggagtcccaccctcgccggaagccgagcggtttctacatcatgccacttccggtgcggcctgccggcccctggcgggagcgagcacgccagtgcgcggtaactttgttcccgcctctcttgccccggccacctctcatcttcggctttctctgagcgtgaattgcgggcgcgctcccggtcgtacgtcagggctgaggggaaaagccgaaagagcgaggcgagaaggaggggttgtggaggttagggcccaaccagcaagtcccgttgctctccctcctcctgacgaggagcggagagggaaggggaggagcgagccggggcaggccgcgcacaccaggagcctcctcgtggagggggggagcggaggaaaggggtagctccgccacctctgctggcggcggcggcggcggcgaaagaagaagaaagtcagggcccgtacctaccgccacagactcagaaacgcccctgcccccatctccccggaaatagccccccgcccagccccgcacagtcgctgccccaaccgagagccgcagcccggtcgcccccgcctcgccccgccccgctgcccagccccgcgggccgcagagtgcgcgaggccctaggccgggagttgttgtcaggcccaggccacttccgaggcgcctgcggtgtgtcgccgccaccacaggaggacgacgtcgacgccgaggaggaggcggtggaggcgtgttgttgtctcgcccactcccctcccctgaacttgcacccaacgtcagggcgcgatggagtgaagcggcgacgaaggtggtacttccgcgttgcgctgcccgagccgagagcgcggccaaggccgctcccccacccccgggggcacttggaggactcgggactcccccgcaggtcagcgcccggcgcatctggtgttttcgctgccgaggataggacgacgagcgcaatcgggagctccgccgcccggattcctgcttccctggggcccggaggctgctgcgtaccccactgtgacctggaacccagggacccgagtcccgacccggattatcgtggcgcttttcccggccggctctggtgctcggtgtccctccgccgccgctcccgtttccggcgggggagatggccaggatctgacccgggaggaggccgcacccgcgccgcgctctgcggctggctctaggcgatgccgagcagctcggacacggcgctggggggaggcgggggcctgagctgggcggagaagaagttggaggaacgccgcaagcggaggcgattcctgtcccctcagcagccgccgctgctgttgccgctcctgcagccgcagctcctgcaaccgccgccgcccccgccgcctctgctcttcctggctgctcccggcacggccgccgccgcagccgccgccgccgcggcctcctcctcttgcttcagcccgggcccccctctggaggtcaagcggctggcgagaggcaagaggcgcgcaggagggcggcagaagcggcgtcgcgggccccgcgccgggcaggaggcggagaagcgtcgggtcttctcgctgccccagccgcagcaggacggcggtggcggtgctagtagcggcgggggtgtgaccccgctggtggaatacgaggatgtgagctcccagtccgagcaggggctgctgctggggggggccagcgcggcaacggcggcgacggctgccgggggaacggggggcagcggcgggagtccggcctcctcctccggcacccagcggcgcggggaggggtcggagcgcaggccccgccgggaccgccgcagcagcagtggccgcagcaaggagcgccaccgcgagcaccggcggcgggatgggcagcgcggtggcagcgaggcctccaagtcccgcagccgccacagccacagcggcgaggaacgggccgaggtcgccaagagcggcagcagcagcagcagcggcggccgccggaaaagcgcttcggccacatccagcagcagtagcagccgcaaggaccgggactcgaaggcccaccgcagccggactaagtcgtccaaggagccgccttcggcctacaaggaaccgcccaaggcctaccgggaggacaagaccgagcctaaggcctacaggcggcggcggtccctcagcccactgggaggccgggacgacagcccggtgtcccacagggcctctcagagcctgaggagccgcaagtcccccagcccggcaggaggtggcagcagcccctattctcggcggctgccgcgctccccgagcccctacagtcgccgccgctcccccagctacagccgccacagctcctacgagcggggcggcgacgtgtcccctagtccctacagcagcagcagctggcgccgctctcgcagtccctacagccctgtgctcaggtgagttctgccgttctgcctgtgtgtgccttggctgcgctggccagatccccaggaggaagggaaagtggtgcccgggtcctcagaacgactcaggtccaccaccgagacgagacaacaccgcctgagcctcccaggaaggataggcgttttcgcgcgcgtgacacttttttagggggtcgaagggacaaagcaactgggcgaagggaacttttctcctagctgtggcagggaagatttctaaggaagaattaaaagtttcagacttgttgcattaatgtgttaacaggtttctctcagttgctctttgcttttctggtacaatttgggtaaacctagaggtggtttaagtcttaattttgaaagttctgtgaagaggtttcattgttgggaatttaggaatggactgcaacttaagatctagtattgtacaggggaataagaatcaggtactgatgtcagagttagatgtggattgcagatgtttcttatgattattacagaaatgggagaagcagcctttctgtaaagtttattcttttagtatgttaaaaaagcttaggtggaagccgatagttctgaatactgaagttaaaaaaggtatctatttagtgatattcttgtgtgggatagtttttacctgatctttcaaagtcataattatagaaggtagaaaaaatgacaagactgtggtttctttgttggtttgtgatgacacccagttgctaataacattataaatctgggtggtgtaacctagtgtaaccaagtgaatggctgagtacattcttatactattataagcctgtaactgcttactttaaaagctaagtagactttttcttagatatatacccgaaggataaaa

SEQ ID NO: 48560 - DNA, 424 bp, Homo sapiens
tcaccaaaaaaaaaaaaaaaaatttttttttttttaaagagaagccatatacagtaaaatttaccagttaccatagtacttgtaaactttttgcttttttcatttaacattttgccagagatggaacttctaatcatctttagaactacctacaggaaacactgagtattttgaatatttagttttccatggtaacttttgaccttgtttttgctctgtttcacttaggacaagatgacctcatccagcatcaagatatgaggatcttggagctaacgccagaaccagaccggcctcgaattctgcctcctgaccaacgacctcccgagcctcctgaaccaccaccagtcactgaggaagatctagattatcggacagaaaaccagcatgtacccaccaccagttcttcattaactgaccctca

SEQ ID NO: 48561 - DNA, 928 bp, Homo sapiens
gctttatttttatgtggagaagggtcttgcatacaatagtttaaaaaagacaaaaaaaacctttgcttaaattcatgctgttctaaaaactagatcgattgtacatcttcacaaattctagttaacaattttattttgtattcttgcagttttaagtggatgctaattttaggggcataagccttttatggccctcttgcagatcttctgaactatgcacatttgtgctttttttgtaagtttggaccaacttttatgtaacaaacagcccctccccacctccagttttacaacaatcagaaagggcactgatttatttggtatttttctttttacaaagctacctttagtcaaaggtcactgtcagtctttgcacctgctttcagtgttattgtgaaaggtgtactttgtgctcatttcagaaaataaaacacaacctttctcttgatgcaacagttttataaaaaaaaaaatggtcaacgttatttttgttttgttttgcagattatcaaagcctagcaaaatgcatttaaatgaaatagtgggttttatatgaaaactatgggtggggtggggagggaaagtaagtgccttaacaggtaagcttaaggtctgaaaaaaatagttaacttttacccccatttgtcttttaaagggaatcaatgcattaaaaaggcaagaaactctgaagtttcaggggctgcctgttcagttcctgttaggtccattccctctgcttgtcacactttctccttttctgcctgtctttgggctgtgttgcctttcactaccaccttctcttgataggggagtgagagcaaagaaagggagtagaactgcaatcagtacatattgtttgagaagttctacaaagttttgtcatttaaatggttgaaagtaatagctccaggagaattttagagtacca

SEQ ID NO: 48562 - DNA, 736 bp, Homo sapiens
tggccaggctggtctcaagttcctgacctcaagtgatcctccccgccttggcctcccaaagtgctgggattacaggtgtgagccaccgtgcccggtgaaatttttttttttctaaaggatgatatatcaggatcacatgggatttatttcaggaatgcaaggttgggtaaacattcataaatcaatgtaatttaccactttcactgaataagggagaaaaatcatgtgataatctcaaattcagaaactgtaaaattaaacgcccacttgtgataaaaactctcagcagactagaaatgcaaggaacatagatgatctgataaaaggtatctataaaaaacctatagttaacatacctgaagaggaaatactgaacactctctcccttaagtccagaacaagataaggatgtttactatcactgtttcttgtcaatattttactaaagtttgggccataaggtaaggagaataaaaaaatatatatatataaagattgtaggctgagcacagtggcttacacccataatctcagcactttgggaggccgaggtgtgatgattgcttgagcccaggaattcgacagaggctgcagtgaactatcattgcatcaccgcagcctgggtgacagagtgagatcctgtttctaaaaaaaaattagaagaagtaattggaaaggaagaaataaagctgtgtttatgtgtagatgacatgattgtattcatagaaaatcaaaa

SEQ ID NO: 48563 - DNA, 1215 bp, Homo sapiens
taatataatatggagtctgctcacatattccatgggctcatgtagtgatgttaattatgtttcagaaaaaaagcatcatggtcatccattctcaatagacactgttgaattacaaaactagccctaatatgtagaatgtcagtcaacaatgagaattcctttatatctacacattatgagaatatttaggtaagttacttaataaatcctggtcccaacttaaaaagtgacttttgctgaggcggatggatcgattgagttcaggagtttgacaccagcctggacaacatagggaaaccctgtctctatgaaaaaaaaaaaaaaagcaaaaacctaaaaaccaccaccaactaaaacctagtcaggcatgatggtgcaggactgtggtcccagctactctggagagtgaggtaggaggatttcttggaccggggaggtcaaggctatactgatctatgtgattgtgccactgcactccagcctgggtgacagagcaagaccatctcaaaaaatatatagaataataacttttccaccccagaaagatactggttccacaagtttattaaaaaaataaaataaaatggccgggtgcggtagctcacgcctgtaatctcagcactttgggaggccaaggcgggtggatcacgaggtcaggagattgagatcaccctggccaacatggtgaaaccctgtctgtactaaaaatacaaaaaaaaaaaaaattagctgggcatggtggcccgtgcctgtaatcccagctactccggaggctgaggcaggagaatcgctggaaccccaagaagcagaggttgcagtgagccgagatcacgccattgcactccagactggacaacaagagtgaaactctgtctcaaaataaaattaaaaaaaacaaaaaataaaaaacaatgtgtgcacaattctgttaatcatttataacaaaggtcataaactggtgacctggggttgggattcagctgatatgtggttttgacgtacattgtttaaacagtaacaaaaaattagtttcaaattgggagattttgagtaaaaaagcccaagttttggggagtcttttgaaaaactgaaaaatctggtgacactacatttttacattgggttttaattttatttttgtgagacagagtctcactctgtcacccaagtaggagtacagtggcttgatcatggcttactgcagcttcaacctcc

SEQ ID NO: 48564 - DNA, 2671 bp, Homo sapiens
aaggcttgaaataattttccaactcattagacattcttttttctctaacacgccctgatccaaatggtgtagatgtccttggagaaccctttagaaaaaaaatcagttaaaaaaacacttagtaaagataattggtacttcttcctttagctaaaggttagcgggaatcacattgctgcttaaaagttgtgacttgaacctaaataatgttcaattacaaagtccatgcttcctttaatcaagtgttcctattttttaaaaaaagtacttaaagcaattcgttattctcatttatttataattccatgaccactgtcatctcaaatacttttgtgtctaatgtagtaactttgcagtaattaaatacaagcagtgatgaaatcaagtaattatattcaattttccctcgaaattttcacttttttcaggagaaaacaatactatagttttaaagtttctagaacctttctagctcatgaacattttctttactccttagctccaggctcaaaaggggtagggggttggtgtagaatacagcaagttggaaaaccacgtagttgcaagttgtaaaccacagaaatcccagacatgctagagatactctctctgtcttttgtatttactctcactaaaggaatggaaaacttccactaccaccgattttcttttcagggaagttggagcagaagccagtgtagctcgaaagaaagataaaaaaaaaaaaaaaaaaaagaaaaagaactatttcttgaaacaaactggcaaggcctttggcaaacaggaggaaatggagaattaggaaaatctgtgtacgggtggcagtgtattggttaaaagcacgagggctcgaaaacagaacgtacggctctgccactctttcggataatcttccggaagtcactcaacttctctaagcctcagttcgctcatctgcaaaattgggctaacaatagtacctcagagaggattagacaaaataatccacgtaaagggaatattagtaccgtgcctgccataaagtaagagctcggcaaacgctggctattattattacctgggggtgggtctgctgctgccctggggagtagccgaattgctgctgggaccccgcgggggacctggagtaggagccagggtagccgccaggggacggagacccgaaccggccccccgggaagctgccgccgtgtcgcggagagtgactgctcccgtacggcctagaccggggcccgtacggcggcgtgtggtgcggactcccgtacccgtctcgaggggagggcggccgtggtccgcccccgcccggggttccccggaagctgcttccgctaccccaacctcctccacccggaccagggtaaggaggagttgggggccgaaaattctgtcgctgcatatcaggagccaaagccgaaaacctcgcagccgcgttctcccaccggaactgtatcaaccggccctccgcagagaactgctagtcctttaccaaaacagtcctccgaccgcagccaccctacggcacatcagttccggcgtcacaaaggttccgccaggggcggcgggattacctaaatcactgacttggcgagagactcagtggatttaagtgaaaagaggaagaaaaggagacaggaaaggacggacacccaagcccagcaacaacctttccagtctgagtgcccttggtctgaccgacagactagaagctggcccagcaggcgactagtgctcagccccgcccggcgggggcggggtctgcggcgtccgtgggcgccccccagtggcggcgggtggcgccgcacggagttcgccgcttgcaccgggaccgatgccatctgagacgcacgcgatgctggcgacgctggcgagggtggcagctctgcgcagaacctgcctcttctccggccggggcggcgggagggggctgtggactggccgcccgcagtcaggtaccctccgagattcggtctgggtggctaaagggatccctgccccagcttgcctcctcgggcgccctgaggagagcaattagggtctgaagtctctgctgaccccttagcggtggctttgctcgcctccctgcaaccccgttccgtgggcctgcggccggcctgccccgctctggccgcccagggtcgcctctgtcccgtgcgttgttgtgaccgagggctccgtgcgccgtggggtcccgctcctgcgcgtcccgcggctcgcgtttggggcctctttactcctgtcctttcgtccgccaagtttaagtaacttcgaaaatgcacaccaagccacatttcagaaaggactttagcccgctgctttgaataacttgacacttcatgtacaataaaagatgcccttgtacagttacctgttgcagaattttatttagaggatgaaatttagctttactacagtgttatagaactttctttactccctctgaatttgggaatggtaatccactatgaatcttttttttccttttttctttttttctcttttttttgagacggagtctcgctgtctcgcccaggctggactgcagtggcgcgatctcggctcactgcaacctcctcctcccgtgttcaggagattttcctgcttcagccttccgagtagctgggattataggcatgcgccaccacgcccaactaatttttgtatttttagtaga

SEQ ID NO: 48565 - DNA, 1432 bp, Homo sapiens
tattctattctgcttctgacttcccacacccatgattgcaggagcttgatgtataacgcttaaaacatatacatttgtgtctggccccttatggaatattataatgggctgttgcaagaaggaaggaagttgagtaaaacaatgattctgctccagctctggcccctaagaagggggagggtgcagacatcagtcccaattataccatttaagaggcatgtaaaggttgaatccaatctggattaggattaatgtcagagattccagttgacatgggtgggaaatggcagtagaattactggatggaagccacagagaataaagtgggcctgtggattaggagtccaagcaaagtttattcagttgcaataaatcctaggctcctgctgattgtgtgagtgctttgataggtcatggaaaggaggaaagaaactgctagcatctagcagcatttcagggctctggcaagattagtgaggtttatggtcaggccctagtgctcgtggggaatggtggtatgatactgaagagatttccagttcgaggactcatggttcatgcaatacatgatattgcagctactttgtattagagaaaaatgagacactctgggtatgttggatccttggtttagggcagtatgtaaatatccaagtttacccactagtgggaatgtgtattttgatctactgccagggtcagttctcactggcaatccatgaccgaagcataactttctactaaagttgtctcatcacatctgcgtccctttcctctcagcttaattagtaaagaacgcctagaaaagataggcaaaaaagaaggaagacaacaaaaataagttttgcaagagccagggaaggatcagttttgagggagaatgagtcttcaggggagatctgtagggccctgcactgtagctgctcctctctacacatgtattctcttaactctgccgaacctggatgatcaggagtgatttccctcaaaaggtgtaattgctgatccccccatatgaagttggttgctttgtatgtaattgaggctatggaaggaaaaaacatacctagagatcctcacttgcagagattcttttcatgatgcttaggatggatttggagggcaaaggagagagagagagaagagagagagagatgggggagagagagagaggagagagagagatgggggagagagagagtgggggacagagagagagatggagacagagagacatttaaatgttaaatgtggtatctcttggttttaagatttgggaggatttcctttttctttttttttgcttttcagggctttctaaatatttctataatttttacatattacttcttagtaagaaaaaagtatttttataaagtgctgtaactgctatttgcatttgtgggaaaatataagtgctatttgctttaaa

SEQ ID NO: 48566 - DNA, 1315 bp, Homo sapiens
tcttctgattttcttccatctaatttaaaaatcatgttcactggaatttctttctaatccttttaagtaaacaaaaagtataattattgctttggatgtatgtatatacatctcgaacacacacacacacacacacacacacatctgtataaaaatagtctaggttgaggaggacagtgtgttttttaaacaaaatcaggattatgaaacacatactgcaaatgagagccagggttgtctgtgtgtttttgacatggttttactggtttgaggttttttttttaggtttgtttttggattatatttttttgacgctcttcctgtattcttccaagtccagtaatggaataagagttgaagagctgaaagattcacatggagatgacctctgtgacttcatctgtcaggtgtctgtgtctttattagtcatctggaattttgaagactgattgaggccattacaaaatgtactgcagatcttagaccctacatctttaattaattaatgttagcaaagcactttgcaatcgacgaatgaaactaattgtaaaaatgtactgaatggtttgctctcttttatttttctatttccacatcaaataccttaatttgatttttaaaaattgtgctgtggatactcctaaacacttttttcttttgagctgtttatgttatttacataaagttggcagagaaatatcttctgtagttttgcctttgattttactgggaaatagatactcctgtaggctatagatttatttttcaactgaaaaacaccatcccaatgttgtgttaattattaataggattaatcttttatgtcagtggaaaaatgtctaaaattatgcaggcaagtaaatcatacatttgtagaaactttgaaaagaggaacataaagatcacagagaatgttctctaacagaatggaatattccaggataatgctttctaacaagcaaaggtaatttttatctaaaacaaatatgactgaggagcaggtgcattcttgctcaaataacggaaaagattcaatgcaagtaaccacgcattttgtcctccaataatttataattcaaatccatattgatttgtcatgaaaaggaaattgtaagacaaatatatacagacagaggattattaggttgcaagagccaactctaagaattaagatttgtgctgtatgtaaaaattatatcatatggcttaattgtgtatcatagtagtaattattactaaacaattttggggaattcataggtgaaaattgttgctagtgaagtcagaagaagtaacactatcgtactacaaattc

SEQ ID NO: 48567 - DNA, 1730 bp, Homo sapiens
tcgggtaggattcatcctttttagggtgagaggaagttcaatctccaaaaagcttaagtttctggactctccagagcaagcactgccaactttctgatttatgtgtggttttagtgatgaggactactgtcttccatgtatttaggtgagaacacaagagactttttactggaaacctcgtgttgcacttcacttaatttccaataggttagaggcagcccacggcatgattatgtgcacaggggcattgtctggtctcaatatctgtgttacttacttcgttttaaactgtacccttattcctcatgtcctatctttattcttatatttatttttccattttccttgttttgcctttggggagtagatgactgtaaactatatgttaaacacatttttgctgtcattttccatgattttattaggttttgtacaaaaatgcaagtgcttttgttgcttacatggcacaaaaataaagaagtaggtaagcttagcaacattacaatctgtcaataaatagagagttccatgcaagctttattcacagatacataacataagacttgtcatgaagaatgaaagctgagtagtattttatccaaaacacatttgattagggtacaatttatctcactgtattaaaaacagtggtaacacttgcagggacactgaatttgctagagggactgtaagcctaaaggggcaggggaggaacatttgtaaaacgggaataacgggaataagaactatctttttaactctcagtatgttgggtaaaaagagaaaagttacaacagacataaaatgggaggggccatttgaaaattcaggagaatgttcacataacccaaacctgtcaatgtgacttgaacacaggacagagtaattaaaactttgagtttctgaggctgccatatctctgctttccatgtgattagatgattcacaacttctgtctactcaatttcttcatagtagaatggaactaatttcatgcagtttgatggcaagcatgttttcatgttttctttgtctatatggcaaacaggttgagtttacagtgcaaacatgcccttttaatctctttgaggattagttttggaagcagcatctgcttctgggattctttttgactggcttgctggctgatgcaatgtaatcaatctagatgaaattgtgcattacattcttgggcatttgtattctttggtgggtttccttttccacgctgtagccatataggaaaaggagataaggaagggatcaggaaaaggaacacactggctacactaaggcactgaatgtgaagatgactggtacaggtcacttaggaatggaaggagatggatgagcactgcaatgtgcaggaaaagggcctctgccaggacctcaggaaactccacttctgggtgactttgagcaagttgcccagttttgctgggcttcagtttcctcatcagagagaaaaaaaattagagccgatgaagtttcttacagttgctattgcacaattctaagcaaaagatggaagatgatattggttttacttgttaggcaaggctcctgacatcttgtaggtgttggtaccgagacaatgacattctctagtctttatttgtcttccttggtctgaggaagacatactttcagagaaggatccacttgacttttttttttttttgaggtggagtctcactctgtcacccaggctggagtgcagtggcacgatc

SEQ ID NO: 48568 - DNA, 1283 bp, Homo sapiens
ttgccatagccatctaggttttcaggtcaaataaacatagtatatatagggctcagtgctgtttgcggtttcaggcattcgctgggggtcttggaacatgtcctaagcagatgaggggggactactctgattgctagacttatttccaaaaatagcagtcattcacatttttaacaacaatgtatcaaagtgcccctgccctacatctaattttctataataatgggtattgtcacattaaaaaaaaattcggccatgttggctgggcgtggtggttcatgcctgtaatcccagcactttgggaggccagggcgggcagaccacttgagatcaggagttcgagaccagccttgtcaacatgttgaaacctcatctctaccaaaaagtataaaaattggctgggcgcggtggctcatgcctgtaattccagcactttgggaagctgaggtgggtgaatcacctgaggtcaagagttggacaccagcctggccaacatggtgaaatcccgtctctactacaaatacaaaaagtttagccaggagtgttggcaggcgcccataatccaagctactcgggaggctgaggtaggagaattgctagaactctgggggcggatgttgcactgagccgaggtcacgccactgcactccaacctgggtgacagagccacactctgtcacaaaaaaaaaaaaaaaaaatctatctatctatctatctatctatctatctatctatctatctatctatctatataaaattagcggggcgtggtggcaggcccctgtaatcccagctactcagaggctgaggcaggagaatcacttgagcccgggaggcagaggttgcaatgagcctcaatggtgccactgcactccaacgtggagacagaatgagactccatctcaaaaaaaaaaaaaaaaaaatttggccacataatgtgtaaaaaaaatgcatagcaatgctattttagtattgtcttctctgattcagattgagtttgactctgtttatgtttattggacatttgcatttcctgttcttttttggttgcttatactttttttttttactaatatgtagaaactctttttaaaatgttaatattttttttcccaatcctctattcatctttgactctgtttttattttttatctaatcaaatatttctgatttttcttctagaatttttgggttttctacctttggttataaaaaccttgagtaaaaagtctcccccaaaatttattctcctaaattttattctatttttacttattttcac

SEQ ID NO: 48569 - DNA, 2983 bp, Homo sapiens
aggctggtctcaaactcctgacctcaggtgatcctcccacctctgcctcccaaagtgctgggattacaggcttgagccaccatacctggccatgactgcttcctagtactgcacttactcaaattttccatactctgggatgaaactctgctgtcacctgggcctgtactctaatgccactttaggtctagtgggcaggcctaatttcagggcctcccccaatctctgtctcactatgtatactctgtgttttctcattgataaatccagagatatgatgaacagatatgcttgggaaacattattggcaatacactatataagccaatttagaatatttttattgtaactatagttactatttttttctagcttgattctttgcttgtaggtagtgaaatgtggtgacagcttgactaaagctctgttctataaatgcctttagtctgaggtaaatgtaggctttgtcagaaatgatattttcatatatggtacatagatggtacagaactgtgattattgtaacatgtttgagatacaacaaagagtacttaaaaatatttcatacgctcaaggaatttttaccttgggttgttcctgaaaaatcaatatggtcccttgtctagcattttttgtgtagtttctataaagtagtagctgcttttggtaggctattcaaaataatctggcttagcattcttttggaatttttaccttggggtgttgctgaaaaatcaatatggtctcttgtctagaattttttttgcatagtttctgtgaagcagtagctgcttttggcaggctattcaaaataatctggcttagcattctttataatacagttagttcaggtttcttaaaaccagtttttggcctatattcctcaggaagaaaaactctgtgtcattttaccttgtgcccaagatacatgataactgccttcttgaataacagcaggctttctaggctttcttcacacaaagttttctttatgagaaaaataatatccattgacaacacgtaaagaatagaaaatatatgaggcagttgcccatttccctccttgtcattacctccacacccagtatcagaaatggagtgattgaaaatcctacatatgttggattggaagtaaaatttaatttatttgaggaacctcaaggatatatgtgagcattccaatttcctattatggaattagcaaaacctagcctggatctggggcaggaaatcagtatataatgttgctttcaaggttactctagaattacctaattcaaagcaagggcttatatttagcaatgagctctcaacatggtttgttccatgtaaaaaatgtcctgccaatgccaaattggtagtaggtgaagttggagactccagggctcatctaccatttgtggcattgttccatccatagatgacactgttcttaatttgtaagcagagcagtctgtgcctcattgccatctggctcagcccagttccagtgccataaggtgaactgaactgtcagtggtaggaaatagtgctctatgtttgtcatgatgtactagcacagacccagaagtcaataactgcttggcattccagaaaacattctcatggcggtaagttaaacttcatggaatgtctttttccagtgggtgatgaagtcatttagcaatggttaccttttgtggaagaaaatcttgttaaaaagtaagtagccctgggaagccttgaagtttatgctcttgttttgaagtagacatactacaaattttttgtattttatttaagccagggaaaatactagatgcactgatgaagtaacttaagaagataacataggaacttcgagttgtacatttttttcttttcccacttgattatatgatatattgtgttgacatggacttctgaaacccctatgttttcatctttagtcagctttataattaggatgtcatcaaatgaggctaacatgcctggaagcccagaaagcaaagtccctgggaaggagtagaaacttccaggagcagcagaaattctcaattgaccttctcaattccccgccttcacatctgctccacagtctgcacttctgtatcttatatctcaggggtggtcacatcttctgtgtggagctgctctaaatagagaaactaaacactgaacctccattccctctccttttgtgtctcctagtttgatcatgaagttctttagttttgtcgtgtcatcaaattccttgacccatcattattttctcagtcttgtaaaagatctccctctccaggagaggaggtttctcacgatgagcgtatgatgaaaatgtgcatttgtgtttggtttccctatcagtgaattttgttgtgccagaatttgcacagcttctagtgagaaggatgtctttcttcgggagtaatacaatctggtctcctgtgaggcaatgcttggttttgaccttgtcctttaaaaattctagacacttgcccttgctgctgtctccccacatcatttcattcagaagcaattgtttcttgaatttcttacaggagacagtcctgactgtttacagcccaattcgctgcgtatgatttgagctctccctgtgataaagaatctggtagtggtgtgtgtgcacggcatgttatcacctggtttgctttctgttagagtgaggcaaccaacagaatgaggagaagagaaggaggagtgatttgcagggccagtgaaggcctgggagtcaagacctaagggcttagaattcactgaggagttcctttcttgtgggaccaagtacagtagtaattatataataattataatatactataatatactactgtatatatagaaagtatatatgtagaaattgtgtgtgtgtatatataatatggtatatatatatatggtatatatatggtgtatatatatatatatatatatatatatatatatatatatatatatatggatagagagagagagagagagt

SEQ ID NO: 48570 - DNA, 2315 bp, Homo sapiens
tcacattttaaaatctcttctgccaacttttttttctgacttctattaatgtcttatgaggctgcatttcataagctttatatgtatcctcaacctacatatttagtttattgtaacctcctcccaacccctcataattctttgaatcatatcatggcattcactgtagaggggctaatttggataaatggatctgatgtttggtgagggtcacatttgttttcttatgcattccttggcagtgctgccattatcagctaatagatggtcccttgtaaaatgtctatattttatgtggtacattttctgaatgttggttatttggagatagatttaagtggctgtgttttgttactataaaatcagcccggagggtaaaagaaagaaagaaacacagctctggaaagcatccctttggcttagagaatgcaaagggaaccactgcaactccaggcaatctcctcgtgaccagggctttttccaccctgttaggagaattctttgtgactgagaatcaaatgatgtctaaagacttaaaagtgagtcagtatggaatggaatgtcatctcagttttttttttccaagagggctataaaccattccacactaccttttaggaggaagaattaggtggtggttgtgggatatttatatgtttgtatacggaggggatgatggtgatgggagggagtccagtaaactctatttccctggataaaacatttaataccctcgtttctcctttggaacttaatgtgtatttttagatttatagaatgttagagtcctaaacacttggggagctggatagaagtttggatatcatcaaatttaaccccttcctaaatgtgagaacttagaattaatagtatcacgggccaaagatcccttgaaacgtggtggaagactccacaagtcaatgctaaaggccttcttttttgggagggggaaggtacagctctccagacttttctggctgaccttatttcgctcttgactttggaaatggatggagaatctggagtttgactcagtcaaatctggtttgctcctcggactccctgactcatccctgtcctgcccaatttcctgcttgcctttgggtcagactgagttctgctctgtactttgcccacttgggttctattcttatctcctcttagctttggctctccagcatggactttgcttgagtctttgatcttgcatcaactgatgtttctagtaagggccgacaccacctctctcccagtgctgacagatgacatccctgctgagtcccgatttccaccagctgtttagcgttctggatcattccctgttgaccagctgcttctggccatcctcacctggacaatctgcagtagttttggcatgttgctcactgcttccattggctgacggtacctaccttagttctagtttgtcatgttttccccagttcacacagctcattgatgaggctcagattgctatcttctgattatcaatgtcttttccatagcactcacggaataattgcttattctccttttctctaactacacattttatgtttacaatattcctggctaggaaaagaaactaagtgaacagtctctctctctctctctctctctctctctctctgtctttctctctctgtcacacatacacagaatcatatgtacacaacttaaatctctaaatttataaatttacattttcctttttaaatgatttttctttcctctattgtgaattgtttttcttttctcatttgctaactttggaaagagaaaaaatccagacattggaatgtctgagtttatttaagtctcagtactctgttcaatttaatgaacggaaacaaaaaaggaacatcaaaatgctggcctggatctttgtggctccaggattggccctttttggtggccattgatagataatgtatttgaaaaataggagtaattgttggtttcaacttactttttaaacacatcaaaatatacaaatatattctaaaacacagaaatttggaattatgagaaagtgagagaaattgtgaaaaacataattgtatataatttaacattctgttatctaaaatagaggataaaatgggtctctgaatgcacactaacaagcacaggttgtttacttaaatggttacatttcttagactaaaaaaagtactaaaatactaaatataaaattaaaataataatatttaaaataaaaattttaaactgtatataagttatagagttaagcatctgaccaaatatgaaatcaatgtacttgcctatataattcaaaatgtaatgaagaagag

SEQ ID NO: 48571 - DNA, 690 bp, Homo sapiens
aaagatatctatgctggggtccctgagattcctactgtctgaggagtgaaggtaggacttgcgagtggagcttggatagaaaccaccggtttagcagatgttctcatggattgattttaggggtaatttctatctctgttgaagacttttgtaaaacttacagtgtcctaaattttaaactgtgaaattgatagaaatttgtatttgttaattacagaaatttaaaaagcacattaaagtttacatcacagcatttctgcgacaggagatgggccattatgtaaatttcaccttatttgtgactttagtgggaagatcttgcataagttatcacattccaaaggttggccaatttccaccaagccattcactatttgcatcttcttgcaatcacaccggtctttggcctttgagccagagtggagcatgctgtccttgcatgtactgtggaggtgccaagttagcattggtgctgagtgccaaacttcaaaggatgtcattggaatagagtttgatgtgtagctctgcagtttctcaccataacctttttcagatacttcctgtgaatgtgcattgcagtcatttgattctagttgcacttctgggaagtgtttcagtggtgagtgtgtctgtgctgtgaaggggaagcagtcttctatacatgcaaaaggattcgaaattgaattgctt

SEQ ID NO: 48572 - DNA, 1644 bp, Homo sapiens
gaataaaggagatatgtttgggatatatatgcagatttcaatcatcaaaagacccaagatattaagctgcctcctggaatcacccagaatttttgtctttccagtgatctctgtggccatggtgctgtgtgggcaaatttcctcttgctgacctggggctggttttatttcaaagttacagcctgattcctcagagcagcattaattaaactgcaaacaatgttgtgttggtataatagagttaagatgatttttcttccccaagcatgtggttgatactatggccagaaaagtttaaaagtaaattagtgacaaatactgcgtgattccatataaggtacttagagtagtcaaggtcatagacacagaaagtagaatagtgattgtcaggggctggagggagaggggtatggccagttagtgtttacagaatacagagtttcactttgggaagatgacaaagttctggagatggatggcataatagttgcacaacaatgtgaatgtacttagtgccactaaagtgtacgcttaaaaatggtcaaaatggtaaatttcatgctatatacattttcagctacaacaaaaatatgattcataaaaatattaattaacttctatgatgttttcatgtgtacatgtagaatgcatgtgtggtgtgcatacaaaataggctagaatggagagcatgtaggcttagtcaccgagacctgagctcaaagcctggttttgcaatttatgtttggagatcattgacaggctgtctcacgtatttcagtggcagctttcttatctgtgacaggaagaccaaatactcactgcaacttataataattaaataataataaatgtccagtgctcagcacatagaaggattaagtggaaacacagtatagatagttaataaactcgtagcttcatctacagtaacaagtagtcttggggaaaaataaaactagccacatcattaatttttcaaccattaaaccttgaaacaatcacgcatgtttctctaagaaataacataaaacaaatcatcctttcgtttaacaaatgtttatccagtgtttactctgtgccaagtcctggctgacaagaagcactgtgtaatggggcatgtgacagtgaccagtcaaataagacacagtgaggactgggagatcctgaggctgccactgccagatggacgtgaggctaaactggcccctttgtttgttttccaagtaggagctcttggataaatattttgtgtataaagtcaatggagaccacgcagtgtgaaagcctcctccaaaatcattattttcagacagttcatgcaggtgaaaataatgcagaggtcatagataacactgtaacagcttaattatgggaaattagagaggggcccatgatagagcacagcatttcctaaatgttccttgcctagaggaccctagttttctgaaatagtaatagttgtcccaccacaaaatgacccttttgtcaaacaactttgggaaacctgcattaggcaaaggtcagtgaattttctttactttgacatttctcagaagcattgatagtctgaaatgtgtttgcctaagagggagatatcgaagaccatctttcctgcagttatttgacagcagagccctttttccc

SEQ ID NO: 48573 - DNA, 2082 bp, Homo sapiens
aagataaggagaagtgtgtttgaaggctgaagggtaaaagcctgcaagttttgggacatatgaagttcaggacaattgtgaattacacagaaagggaattttaaaagggccaaaaatagaccaccatagtatgaatagtgctgtatatcatccaaaagtatttggattatgttaacagggaactgttgaaggttttcactagaaagtgatacaatcagatctgtatcttagaaagatcactctgtggacagaaggattagggcaaatagggaaaagcagcccttctggatagtaaaattagggttttggtaaaaattcatacaagagtgggaagacccatggtttttcagtctctttaaacaaaaaatgaaagccatgaggcttagatatgaaaatgtgtggaaatttcattaggaataattacagtgtttattttcttttactaggctgaaatgtttttaaaaacacagtaggccagtactatatactttgactttttgaggcataaattttacacaacatgagccgaattttgtcctctagcccataaaatgattaccaacagaatcctcagttatggtgagttaataagttattaagaatactatttcttatttgaaagttttcacactgttcctcttgccagtgaaaatgcttatttaatgttcaatgatttatttaagaacccctttcaaacatgtatcatgtgtcattgagctaaatcagaatatgtgaatgtggacttctttaagacatgtcaaaatgaataagagttttagtgagctgttctatttcttgtacaagccagtgaaataacaatgagcaagtcttcagtgttgagatggggaaatacgaaaaccatcccagcttactccactcatcaccatggtttcatcatctattacacagtaaaacaaacagagccactgactataacccttaatgagcatatgtgactccgataatatttatcgggtttatttgtttgaggccaactgaaatgaaaagaaaacagtgcgggattgggtcattactctcttctgacgtgtgctgtaattctaaggaaaacattagtagcctatttttagcaagtaccttcatccactgaagagataatggcccaaggagtaatcgctgagatggaaagcagaaattcccagaattaaactgtcttgctcatctgttctatggtcataggaaatctatcagcactgtcatttctcatcaacaacgaggaatgttttaaatcaggccattatgcaattctccctaactgaactacctttcaccttcatctctgctaagtcaggatcctccagccaaaagaaataaaaaaacctcacctcctccagaaagtctctccacatcatcctgtttatccacaaatgttatcacttacaccttatttgcacttacataatctgtatattctatgtttttcctttattcaaaaaaatctattgaaaaactcatacaaaaatgataaggcaagacattgctctagttcccataatgatggtgtctgggggaggtagagctggatgaagaagctacagtttcttccctagaggagtacataacccagtaggacggacaaggaccacaacagggtaaaaacgtggtcctcaatattgttttgcctcagggtctgagggcgatgccactccctgccatcagtcccagggactcatcagagatggacaaaggtatgtggacatgacgaggggactgcaatccaggctggtggggtggaggagaggaggatgtagaaagtggtttgagaatgatcaggagacaccagtagtttaaagcagggtttttggaatgaagatatggattacaatgtggtaccttccactatctgtgtgactcttggtaatttatgtaattttttagaacttaataaggtttgtgttacatatactcccaccctttcttctggtggagaatcattgtgttaaattataaaatgtctcccatgaaaaatactatatatgctggaggttcagaagaaaaggaattctatgactttggaggaagggatcagagacagctttgtgaaaaacatctgggttttaaggt

SEQ ID NO: 48574 - DNA, 5729 bp, Homo sapiens
ttgtttcttacaactgctttatgatgtatgtgctattattataggtgaggaaaatgaaatagggacagcttgaaagggctggggcctgttgcagatcctggcaattagactcaaaagaccacataattcacgccttatgggctgttactaggacagatgagtcaatggtatataaagcatctagcacagtgccctgcccataggaggcattcaatgaaaatgcctcctatgggcattcataaatactgctatttatgaatagcaataattaggaaatgatattatctaccacatagagtttttataaagtttaagaaagatgaaatccgtgaaattctgagcttagcacctggaacttaataaatgtcggtgcgtttcttttctgtacttctcccaccaacctacgtaatattctgacatctaagtccttagtcatttatgattgctgagaactgtgttgccatgggagaccactaggtggcgccaccaaagagcaagcttgttccatttaccttcagatttaactcagatacaggtgggcgagcagaagctggaccttgacaaccaaaagaagaattgtcataaataaataaacagatggatagagagagggatagggttgcatttaaagcatatatttgggtaagcaaataaaacaaagagcatgtatatccaaagagactctgttaattagataggcaggcgacaagggccaatgcaaatttcctgtgcttgcaagctaaataaaacagaaatcttgcctactttctcaaaaccaagctatactcccaaactgttaaatccatgcatcagacaaaatttctaacggtggcatgggcatatgtctctctatttccttttcctgcctccagcacaggtaatggagacttcagcccagcccaccctataatttgatagctatctctctctagctgccaaccccatccaagatcaacaaatgaaaacacctagtgttccaagcaatgctgcctcatccggagacaatcccaggtatccttctttgtgcaacacttacattccaggaggttctctctgaatgacaaaggtcagaaacagaaaagcatgcttttcttatctctcttttcctaggagcagtgatataatgcgattgaaatctcttgcctgtttattgtatcatcatccatagctgtatggctctacgatattctggaaaaggtatagatacagttaaaataaaaatccatcccaccacattatcatggccttggggtacattttccaagatccaccctccccatccctaggcatctttctattgcttcctggatcgccccactaaggacatatgtatctgcttgtagccagtgcaactgagctccccaaacacagattcccatgaaaactgaacaaaagaggagggagaggcagagcatgttaaatgtctcattaggccttctgtctgattctcattagattcgctgactgcttctcattaggcccattgcctcaacttctttcaggccctgaatatgtaggccagtgcttattgtcatggttggtcgagaagatccatttcatttattcataaattgaatgtggcttctgaaaagtcccaggcatttcttttggcaaagtgaaggcaggcgtattgttgttatttgctattttttgagcaatcctaagcagggtgggcagaagaaataatttaaaagacccagcacgaaaatttcaaacactgctgcagaactggagcactgggagacacattgttgcagccaagaggccagcatcatatgcagacatctgcaatgggacatcatgggcacaatcacaaataccaccaggttcagagaggaactgctatggctctaacaagatgcccactgggcaggctatggaagacaagagctatcagggacatcagtaagttgcaactcctgtcctccctgctgtttgaaaacatgtacccagtgttttgaattaagaaccaaataatcacatagaaaagttactgtacagtaaaatattctacaaattatgggtataatacattacccttgtggaaaaaaaaaaataactggcatctcaatattcttctcattgaaacaagtaactgatcccttcccctgggaagaaagctcccaagatatggcaggaagttaatggaacttagagacaatatgtttattgtgacatcggtggacttggccctgaagaatcacacaaaatacatatctgcaatggaaaaagtaaacattgatgagcatttgcccaaaaaatggcaagcaactgcgtacttcctatgctgtctctttgccattgtttgctgtctttgcttgagtttctctcctgggtgcatgtgatgtgcgcctaacatgactttcagagtcatctggtgcctagaatcagagagatgattttcataaggaattatttttttaattttcccggacagtaaagtttgagtgaggagatttagtaccctttagaaagccagtgtttccccctcagctgaaggtatgctctgtgtttgatacagacctatcgaagcaagtcaggctgcccaagaaacacttttctgaaattgaatgttaatattagattggaaactttcttcctgccccatccccccacccatgagggataaaagaggtgtctccatataaagtcttctccatcaggaagaaatgcgggtattccccaaggaaggagaagggccatgactcactgaggaggtccagggtgtggtttctttcagacaagctccagctgttccaaaagctggaaagacatggcaacttctcctttgtgggttttgttcaagtttgcaatgtcccattttgaggtagcactggaatcctctttttactctgtgctgtgggaagaatttccatgtgggtacatgactgttatcaatgaggttacctatgtttaggtttgttgcctttatatcaggctatgtggtcagccttataaggacctatgtgaagatcagggcatagaacttgctgttaggaaagggcatggtcattccaaagatgcttctatgctgatttccctcacccccaatactgacttctaagccagtttccccatccttggtgactagccctcaaccttgtgtaagtactcccattttggggaacttgacctccgagcattccaggaaatgtgtatcccagactgcaacgttcattcacaacattcccaaacaaaacttgtttttctcccagttggcttgcagaatatactgttttgtgaagccctcctaagatgtattgataaatatctgaaagagacatgcttattgatgtctgtgagacatgactgtggagatgacataaaaattttggctccaaagcttttcagtaaaaagcccagttcagagacaggctgtaacaatgggctgaaaatgatcttggcctttcaagcgctttatcctatccaaagtttcagcaagagaacctgatctcccagaaagtattgcttttattgccaaccatagagaatcactgacaaaactaattaaagaatttgaacctcatttcctctttcattagctgaccctcaaccaggggctggactccaaacaaaggcactctgagccaacaagatatagaatgtgagcctctcaccagagtaaagagggctgcatgctctcattctcctctttgaaagagctacttgagtgcaaaataccttgcccttttttttataatggaaaaagctttgggttgccatcagaaataatgaagtttgaagttcctgaaagttattcatttattggacttgactttccacccttcccttgaattccaggagccaggtcaagacagtgagttctcatggaaaattaagtacttttgcaaaggtgcttaaagaaatatgcttgtttcaggtttcaggctctcaaggggatggtggtcattgatttccaggcttaagacaacgataaagacttccagatatgaatgagcttatatggaattcagccagtctacctgaaaggcctgttgtaaaatacttggttctgtcttggatactcacccttctccttcttgactttttttcttccgcattttaagattgcatcatttggcagtcattgcaatgattacatagaatggcatttattgattgaataccttggcagattgaagaataactatctgaagattgtgaaatgatttctgtaagttacatgattatccactgaagtgatgggctctatcacaacatatatctttgttagttggttatgaagctgacataaatttaaagaagaagggcctcagagaggtttctggaaaaaattttcattttattaatatggaaaaatcttaagcttagagattcagttttttttttaaattgagtggaaacaaatcctattttattttaaaaatatattttatttccattttaactttgatgacaataaaacacagattttgatagaagagtcatcattcaaaaacaaaggatgggtctcctttctcaagtggcaccctgactacttaatattacactactgattggtctgcatgatcctgtttgatcaagtgagatggccctcactgaacaggcttttccaaaagcattttacaacaagtcgaggcctccttaatccagagtaaagctagggatatacaagagtggcaaaatgtaaacaaggggagacccaagaatatactcagcacgggagctcatgacttcctctctgactctggccaagagtattgttcctgctgtgtgcacgccttagaatatcacccagggaaccggatgcaatgctttggcacttcatctaatttctctgctctggagacctagtcaccaatgccagatagattcccttgcaagtgatcaaatacttacttgactttgaacttttggtgaaagatttaatgtgggataatcaatgagtgaaactacactatgcaatcccacaaatatgcaaaaaacaagaaaaagaaaggggaaattaacattcttggattatttgaccatgaaagcatggaatttgctttaagtaaaagcttctatgacaatggaatcttgaaggaattacaactgaaatccaaaaaaaaaaaaaaaaaaaagaattaaatggtcttatgtattttttttaaatcgttgtgttcaattgtgctatgtagaatccacagttttctcttcccttaacaaaatcttgggtgtattccataacttcctggtcacatttggtaattaaaacttagtgtggcttaatttaaacccttaattgcatatccaatttaaagctagagctgtgactctggctgcttagaaagagggtggggggcaaaatctggctgtggagcaatgctatcctccccctcccgtagacccagcttttctggggagcctgaaggagggctgggggatgcacagaaatcctttcttaaatggccacttgcctgtgggagggaggcgcccctgggcactgttctgattcttcctggttccattttcctctaggagtttccatgcaagtgctgtatgtgtttttaagctttcttccaccccacgctcctgaacgcagccttgtctgccatcagccctgggagggcatctcaggtctccactcggtggagcctggaggaacctcctggctccagcacctcctctcacatccgggtttcttttagtggggccaatgaaaggtcacagtctgatttcatgtcctctcagcacagaagaaaactaggtgggttggggatcaccct

SEQ ID NO: 48575 - DNA, 653 bp, Homo sapiens
ccgatcattccaattcctgccgcttcaggatggtagagaaaaaaacagagagggagacatgctgtccacaatgacttgtgtctgacatttaccttaaatcaaagaatgctgatggaaggagttatgaggactctctatcaaaacctatctaagagtcagcctgaccttaaatggagtgtctccaagcctcattgctcaatttcagtgtggacttcactctcaaagcctagcaggaattaagttttttgtcagctttcccacacacatgaggctcactttggcatttccaggtggcctgggtcatagcatagcctccaagcttcaccgacctgggacttcttgggaggttttagcctgggctgtgctgcataggtgtgcattgtgtgaggctgaggtggtggtgggcgtggaagagagctcatcagtcttcatttcatggcatagaaataatcaagcctggatattaattttgtggtaattgctccccgcttcgtgtttacagagagagagaaacagctggggcggttgacatctgaaacaggagccgctgatcattacttgcgcagcagatgggcttgagttatgaataagcagcaaatgtgaaaaagagattcgcaggggtgagccaggcttgcttcgtgcaaaaccggtta

SEQ ID NO: 48576 - DNA, 1031 bp, Homo sapiens
acaaaaaatcctctagagagaaaaaagaaagtctatacagaggatcaagaatcagaatggaatctgactttttggattatactagaagcaaaaaaaaaaaaaaaaaaaaaaaaaaaaagacagaacaatgcctttaaaactttgaaggaaaaaagaattccctgctataattctatacctagccaagctattaatcaattgtaagggtaaaaatgaagacattttcaaacatgcaatgtctcaaatactttgccttccttctactccatttcaaaaaggcattaacagatgttttctagcagaggaggtagtaatctagaaagaggaagagacagaattcagaaagcaagagagtcaagttaaactagaggcaacaatgaggaagggagattccagaatgacaatagtgccccaggggctgcaaaaaagccagtccatattagaacatcatgactcaaaaggcaggcatgttgagggctgttatctccatgatttctgctctaatactatatttttaatctggcagaatagctaaaggaattgcttcttcaaaacaaagaagtatgtcattaaagaggtagtcatgacacacaggagctagagaacccaaacaaggagaaaagcaagggaattccaaggatgatggacaaagggaagtcccaggatgacagctatgaaacaagcctagagatgtctcagaacaaaacaaaattaaactaataagttgttgaaggattactgatgtcatttatctcatgaaaaattaacctgacaagctttgggaagatgttgaaataattagcaatacatataaagaaaactaagtcaataaaaagacaaggcgtgtattaacttcaggaaaagcaaaagtaaaaaaggaaacagaatcatagtacaccataatgctcagttgtgaagaatattttcatatgtataataatactaacactgactattggctcgacctcaaaatacagtattattgtgagtatatgagagaacacacagagggaatggtggtattagagagc

SEQ ID NO: 48577 - DNA, 2805 bp, Homo sapiens
catttcttgagctaacactgactgtctttgtcccacgcatcctatcctaaacctcttgcagtcctgcagtggtctttgggacacagtcaccttccatgtagcagactgccatactctttcctgattttctggattgtgctggatgctaatccagggtcatgtccttgcgctgatccctgcacttcttcattgttttttgcccacttgcatggtgcctcactttgaagccagagttctgtggatgcctttctgttctcaagtcccttctgtgagattttggcatcctttctaacaagctgaggagtttctcagctctgactttggactaagaagaccacagccttgctgtcaccttgccctttcccctactccaagcgttggcactatccatcaagaacttgggctaagaatgtcattcctactcttaccagcagtaggagtatcctactaccagagaagagttggatttggtgagagtatttggctaaaactttggcccttgaactcaggtctggatttatcacttactagatggtgacctgaatatcagcttcctcacctcagagatggagataataataaggcctcttccagaggattgttgtgaggattaaatgtaatcatgcctagccgactttttgcacagtatagtaggtgctgaataaatgttgggtattttatttccttgtatcctttaaaagagcctcggtaacactatctgaaaccaaggttcaggaaggttgagtaacttgtccacaatcacagttacaagggatggaaatgagaccagaagcccatgttccaaccacttccatatcctgcctctttgaaaatcaagcccctggccagtctgaatttctgagcaatgctctgcccacctgttgggcagctccagcttggatcccccctggtgtcaggcgtctgtctgaatcgtgacgagaacatgttgatccctgttggacctgtgcctagcccacccagcagaaacttccccgccagcctctgcagcaagtacagctctctcagctcccgttccaacctacagagcagagctggtgccaatgctgctctctgccccaggcctgtctggctgcaggtaggctgctctgactcaccggagaatcctgagctctgactcactttttgtctaatatcttttgcagggtcaacatgatagccacatatggaaggggcgtggagaagaaaggataggggaaaaagaagaaaggttgtttttaccatcagccccgtgttgaagtcaacaggaaatggcccagtgtggatcaaccaccatactgtcccgagtaaaagggaatgatgatctcttctgagtgacttaagagttaatcaggaccaggtcgagagtttatcacccagagttccatgtttgaattttggagaattccctttgtttcatttcagcacattcacttcagtgcccgtgtctattttaatagcctggaatgcaattccctttgcccattattctctttcactatgggtttttccgaccctcggggtagatttatgcttctagttgaatgattactcagtgaatgtttgccaagggatgttctgttccaagaatgacacatctctttggggatgactctttacctaaccagggtgggtgggaggtcaggggaagcccctacccagaagaaaatagtttctttgtgtgcttgaagaaaaacactcagatgatgaacagcctgatttgggggctgtgtgtgggtgagccactccagtgaagtcgtcctcaacgctccctcagaaggagattatgaatttaatgagcagaagaattctgacaagccttaaagccaaaggcaattagcaaaggatgaataacttgaattctttgcagttatgaaataatttcatcctaatgaaattacacatgcatatatctttaaaatatgttttatctatatatctacatggcacaaaagactataatgtaatcttctatgtgcatatacaagcatttcttactgtgcattcagtgacacactagtactaggagatgggacatgaaagtagagtgccatggtcaaatctaattggaaatgctacatgctagagctccaacatgtatgcacaaaggccattgggatattgtccttggataatggggacatccccattgggatataaatattctgagaaatcttacagtaaggatcttgtttattgactctcacatttcaaatatatttgaacacacaataatttccctgccctaatacctactaatgtcctcaaagaatcaatgctctacaatgcactttgaggaatgctgtgatactgtaatatgacagtttttgcagggcagaccaaaatgttctcttctttgatgatgtcaatgctgaaaatatttttgccattcatgttttgccattgctttaaaatactatgtgaggctctttagaatgttgtaaatgatggtcaaactttgttctttgaggtgatttggtttttagaaactacctttacccaaatgtatgtctattgaaattaggcaagtgactgattaagccaagccatacaagtcaacagcaaaatatatctgtctgactgaaaaaaataagcttttgaggtctttctcacttcataactggataattacaccaacttttggtctggattccccatctctgccttttccctgccttatgctataacactggaccaacctttctaaattcaacgataccgggtcactttccttaatcagagccttgggggtccctgggatgagtctttcctgcattgccccattttaaagatttccaagaatcccca

SEQ ID NO: 48578 - DNA, 1226 bp, Homo sapiens
ttttcttatagcattattaagtatgcacatattcatcaacgtgattgttctctagatgtcttcaagatttctaggctatatttcagtctgaagaaagaggacctatagaaaaatgacataaaatataagaaatcattataattctggaatatatgatatactctggaatacctgagatggtctcagatatgtgtcacattttctcatgtaacataatttagcaaagaattatttactcccataacataggacaattacttcatattgctgactctcaacagcattttaaggtattcgatgccaaagagtcacatctttcagtttttctgacttcttcttgcatgtgacacatgtgcaatcttctcaaatcttttctagtatgaggaagagtaaaaaataaattttaactactttataaaaatgtattgattattttatatgtcagagtttcagtggaaacaagatagttaggcagtttctgcttaggttaatgttttgtcaatttctccattcctccattctatcctacaatcaaaccattccttctggtctaggtgccattcatttgggagagacaaagagtgtcttgtgtaattcaggaatccactaatatggtactttccaaaaaaaaaaatgatacatgaggatgacctaaagaagtaagaatgcatagccccaatccctgtctgtttccacacctggccatagcccttctatatattcaccatattgctctgagggtgtgagccatgactcctctctggaaaactcagcattacgtaatgtgtggttaagcccctgagaaacactgtagatatagtattagaccaataatgtgaggaagatgaggtatgagtgctttatgataaactgcaacactgaggatcattaaatgccatttctgacccctactctgtctacatttcattgttaccttggtagcaaattggctttaattattattacaaaattctggtagactggcatatcatcataatggcaaactctaggttctgcccaattgccttaccatttaaaaacatttcaaatttgcagtacactggtctgataatttatttccatgaataccccatttcccgctgaagagcggaagttatagaatttgagtaacttcactgggacaaaagaaactctggagcccatggcacaccaaaacctgcaggtgtgctaatgctagaaatgagcaaaacatttatgaataaatt

SEQ ID NO: 48579 - DNA, 588 bp, Homo sapiens
aggattggtgtgaggtttaaacaaaatattgcatatgaagccctttcatcacagcctgacatacagtatgcattcaataaacattgactatttttataaatatttaaaggcaatttcacaaaagcattcagcagagctcctggctcacagtaagcattgtaagtgttttgtttctctgtttggtgttaggattatttttcctgccctcactatcctcctccctcgttatatgagagggtggagtagcataaacagcgtggtctttgaagtcagaccaacctgagttcaaattccagcccggacactcactacccgtgtgaactggggaagttacataatcctggcagcttcaggattctgatctgtgccatgcagcgattacctcctacttcagagcattaaaggaaagagacccacacagcctggtgcctcgagagtactcaagaaacactagtccccattcagtatctgtatctccatcttcacctgtgctgcttctccctcaggacacattgggtcagcagtcacatggcctggagaatatatgggacatcctctttctgctatacttgtgtttttcatcctcac

SEQ ID NO: 48580 - DNA, 1914 bp, Homo sapiens
tctttttttttttcagtacagcaaatatttctttaggataaatttgatctttaccctctgttgactctgaaaatatgttttcctattttcatgtaattttcactcttctgattatcttccccagtgagatatattttacaatgaaaaccttttctaggaccgtgaaaggaaaactgatctcctgaatgatacctgaatattatgattaccatcaaaaggtgtgaaaactttttttggtggggaacaaagcaatcagcaacttctgttgttgattgggtagggagtgttacaggatttttaagttcaagagagacaggaactctggaattaaagtggtgatcattccgtaccttgcacatcacagcagtgctactagctggtgattagagcaaatatacctggaattgcttctgagtattagaaacaacttggctccttgggaccagtgactccatcctgggttgtgaccaagcagttcaggagagctaactggcccacaataaattggacctccgaccttggcttcattagccagcaaaggcttcgagcacttgagctaaccatcctgggacagactgaagggtgatgagatagctgcaattcagcctttaaggttatagaggcacagagtaattaatcgtgtcattcactgacagtaacatttatgagccacttctgtctgcaactgtttcttttacttgtactgcgcctggtgcaatcagaaatgcagtatttttatagagtcagcctatccaaattggtagcaatgaaaagatacaattaagatagctctttttcttttttaattttctaaagcattgcaagaggtctgggaagaatttgattagcctgcttctggcacatagccgcagttctgtgggtctagactggtctcatattttcctgtgtgcagctttccgaagagctacgcctttacactgagtctttcttgtgaaacagtaggatttgggctacattccaggtatatgcaagtatttattattagttctcgtaatcataatcactataaacattaatgcattttaacaatctgacagccagtatcttaaatccccaggaatcttagttaaatcccaaggaaaactttgtaacagttgtttggggacatttggggcagcatttacaagcagggaaagaccagttttccaattttcacaataggcctgatcgatggttcagttttagttcctttagcctttggactgtttcatcatgtgagcacacaaagaagatgtaattgggcacatataatccaaatacctctgggcaggaattctgatgaaggcccatatcctggaaaagaggcatgtgattgcaccagtgtcaacatgtttgaatttgttgcagagtctgccaagctcacaggccatttgaatttcatggattcatattttcatagtattgggccttcactaacttctttgctatcaggggtcattctctcttggttcaatcaacttcctgttgacaaaaaaaaaaagaaagaaaaaaacaactctcaaaggcttcttggaccttaacagctcttacaaaacaaattatgatgatttaagtatgaatgattcagaaacatatggattgaatttcctttcacatacatgtggattcatctattaaaggggaaaatgccttggaaacctgcgtttggggttttatccagtctcgtgtattcacattatagttttaaacatactgggatagaaagagtgtacttgcaaccacaaggcatgcacaggcaggccctccttctcagcttccattacacgtggacatgcttcactataggctatcacttataattgactatttttcaaacaagggctctgacttgccatctttgaatctccatcacacaatacagtgtttgctatgtattaggagagtgaaaaactt

SEQ ID NO: 48581 - DNA, 1650 bp, Homo sapiens
acacacatacatatatgcatatacacatacatacataaaaaacatatatgtatttatatgtattccattgataagcagtgggttataatgataagagtttggactccagagccagattacttgggtttatagctcagccttcccacttcctgtctgtgttaccttgggcaaattaattaacctctctgttcctcatcagaaggttattgtgaacttggaagcgagttactatacgtaaaatgcacttggaatagtgactgacacataatacacacttcaatttcagctattagaattactggttcctttgtcatgcccttccattatattggaccagcagatctctgtgcctccacttttccctgtgcctctcagcctctctctgcccttgctctcaacagtcaactcttcagatcaaattcctatcgagttaatcaccaccatctctgctgggcagagctttggcaccaaacctcacctcaacgaggcagctgcttagttcatagattgggcatactttttgcccaatcagcactgttaataataattgaaacttataaagcatgctagcaagagtagcagagtcaggagttaccagatgggtggcctcaagttttctacaatgaacccgtatggcattacatttggaattaaggaaaaggttattttaaaaatagactattttaaaaatagtgtgggtagaccatgaccctgcctattatgaaagcccatggccccagagactgcacgaatcatttattctggccaatgtcctggtgcagaagtgaccgcccattgattgaggacaacctcctggttttcagttagctaagagctaacctagggctcctggatcttgctgtctcccctggtgactgttggtagctcccacccactcttccactgtggcctccagtatccggcattataaccatttacaggcttctcatcttcaagagggaattagcttctcaaatacaaaagccagttcatcttcctattcatggtgcacagaacagcacctggcatgacggaggcacgtgatacctatgtgctcagcaaatagccacacccagggaggccaggaggaatttttcattgcggggtttctgaaacctcccattcactcattcattcattgttattcattcaaaagttatactttatgtccactcgtgaccatacaaaagagtcttagactttgtttgcaaggattttattgtctatatgcctggaaatgtaactcaaaaagaaaaaaattaaaactcaactaattaccctccttatcccctacccctgagaacccatatctaactacagatttgatagcaaatctacaaagttgagacttcaaagtaaaagcagcaaaatgagtctgcttatatcttcactgagactcagaaaaattacccactgcaattcagaggcggctacggaaaggagctgtagtggttgggggtgggtgagaaggggcagagatgctgaaactcaagaggagttttggcttggtaatacagacccatgggccactcaaaacccactaggagtttaactggcactaaaatctggttggcaaaggccaacttttagctctgccatttaattagagcagaattcccctagtaagtgagggaaatcgatactttttca

SEQ ID NO: 48582 - DNA, 3052 bp, Homo sapiens
tcataacaaagctaccacactgtttaaattgcccgctgagaaccatcatttggtaatgactaacagagaaaggggactaagggcctctttctcaatgttctgaaaaccacttggaatcccattctctcctgatcctccccagcagttatgaggatggtgtgagaaggcacagaaggatcccagggtcacagacaggcttacagcagatacttgggagcccaaggccgtggaacccttccacatggctgctctggagactgtggtcaagataagtgggtctccgtgtccgtgtctttgtgcccctggtccacctccctgtctcacagcgatgtccgtatttcacagcctgggcggaatgagcgcctctcgggggccttcattccagccagagcatagcaggttggtcagcatagaggccttgagtggcaggagagtgcttggctgtagcaagaatagtcagggtcccccctgcagccatccaactctgggcagagctgatcagacatctcctgaaatttccattacatcaatatcatagttgttagaacaaagcatggaacactcatctgttttacagaatttatttgcactactcattctgcctttatgaagcaggctgcatggaacgggtgaacatattcccaggaaacagttccctgataacttaggagcctccaagtctgccgagtgttgctctagttttctgtaacaaagaagtgagtgttggtgcttcaaataaaagctattttttgccctcctataattgaggttgggtgaatttcctatataatttttttccttttcctttttctttttttttaagaaggtgttttactgctcattatcttttctctattgtgactgtagatattttttgtgggattccccttgttcacttttctctctaccttcccatgctgaggattaaaaaatcccacagatttgttttactactgtgagcataaaaagcagcaagtttgcattttgaacagagcagagattaaggcattggcagccttgaaatagctctttctcaacttccattcccatgaggttatccacataaagttgctcttagtacagggtcagtgtgatgaaatgtatttgttgaatctctttggtgccaaagcttttgccaacaatctgatctacctgatagtggtactatttcagaaatgtccagtcagtggagcaaatatggtgcctgtggattttcaagcacagcaatgatagctgaatctacagcaagcaaacactctatattttgtcttttacccttagaaacaggtatgcaggaataaagaaataatcagagtttataaagtaggaatttttattttagtagtaaaccttagttggacctaaattccaaatagaataccactagggtggcgatagtattacacagtcctttaggcgtctctcaggtccataaccagggatccccatgaggactctctaacaagaatataatatgcaaatgtgtaaaaagggaagtattatattaaaagttgtaaaaacaaggcatcaagaaatatgcatcatgttagcagaaaaacgacaacaaaaattatgaagtgaccaaaatacaaatgttatgagggcaatcataatttacttaaaaaaagtttgctgcgtcaggacaggcaaaagtgacatttttcttacctttccattctccaacttgaaatttcctgattcacagattcacgtatacatccaaaatataccagaataaaaccagcatttattcatattgctgggcccacagcacttgcaaccttgtcagatctcatgccagctttgttaggttgaaacgtcctattgcagaaggtcttggattgagatgataggtgtgggagacaggttgaaaagctgaggatagctcaatattggggctgagagagaacagtcaactattcctatggaagataggtgtgtgtatgggttggggggctggcaggaggagtggatgggaataggaggcaggtgacaatggaccagtcttactatgtggctacctctccttgcccagctagaaactttgaattcaacaataaaatcttcaaagaattcacagatgccaataaaaatgatgcccctctacagcttttcctcctgcttccaatataaaagcagtcttaaaataattcacagaagcctctgggatctggaatggggaaaagcatcagccttcataacgataccagcatatgaatgtgatttctcgtgccaacagcttccagagcttggaatttcacccagcttcatgaacgttgggggagtcccctagtgccctggcctgtcagctcatcccccaccccactggaagtaggggaaagatcagggggtaaaaggaaatgattgttaaggagggtaatagagagaaataggtatggaaaatggaaaaaaccatgcagatcatgtaggaagtgtgggctctgctactaagcagttctgaagagggaaataatcctaagaataccaacaatatccatggggcatgtttatttgcctggcactgttgagagttttatatggagtattaactccatttttaagactggaaagtgaggctcagagagaaagttgctgaaattcacacacgtgtacattgaaaatctggaacttgaaacttgaactaggtctgcacactgtaaccacccgcaatgttacctcccacagtgggagggaccctgggttgctggcactagttgatgtggtccgctggctggtgccaaagagtacaagaacgctcatgtattgaacagcaatgttttcttgggcactttacaggtgatctcattttattttcatcacagctttaggaattaggattaccatccttaatctagagatgtattatttgggactttaaaacgcttcattaaaatagccctgcatggtggtgtgtgcctgtggtcccagttactcaggaggctgaggtgggaggatcacttgagttggatggggcagaggttgcagtgtgctgagattgcaccactgcactccagtctgggtgacagtgagaccctatctgaaaaaacaaaca

SEQ ID NO: 48583 - DNA, 1221 bp, Homo sapiens
agaactgttctgtcacccttcccgaagcctcatgacccacactatgacttcctggtgtggttgggggaagcgattgaagcagcaacttggctctccttcctcctggagagctaccttctttttctgtctcttgagagtttataattcagggaaagagttgactttttttctgtttttttgtttttgtttttccgtatttttgattcagaagtcctaagcaaccttaaggtttttctcttctgaaaagccacaagaagaaaaacaaatctctgagatcagagcatctctgtttctggctctctcttggctctgcctccagtttctgcagaactagatcatctccatagcttcaggaagggcagtggctatgcccagggtaggtctctgcccctggccaaagagtaaccagatgcagttgcgggagcccttgggagaggtcaggacccggcagacactcagacctcacagctgctcagcagagttggggagccaccaccctgcgaggggatccagcttggccagaagcagccttcacagtgtgtggtttcctagagaccaggtgccctgcccagccaacagaggggaacgcgtggttgagagaactggctttaaaaagaataaaggacaaaatgatgaggctccagaatcatgtcacaaccgtgtttactgtctggctccttttctgaagagcattgtcctgtgagcctgctcttcggcatgggaatgcaggctcagtgtgatgatgaaacaggaaatgcggcttggggcaaaaaaaggaaactctacttgccacatgtgtctactactccccactcaactttcttcccagacttgtacatgctcatgtgtgggcactcctccagggcaggggtcttaccttccttatcctggaaacctcaagggtgaccagcagaaattatggagaagaaggctctgggttgaataaatgtaaactaagtggattcattctaagcagatgttcctggatgtacaggggtcaaggtcatctagaagagtgatgtgctgtaactttaggaaaatgggactggtattcctctacagtcagtggaaaattgatctctataggtgaattagaactaaggataacagcaaagaagtaaatgaaaatataaacttaacatcacttatcatcagggaaatgcaaatcaaaccacactgagatatcacttcacacctattaggagggctattatattttaa

SEQ ID NO: 48584 - DNA, 757 bp, Homo sapiens
ctttgggcacagtttaactctctgctttcagagcttgagaggtcagctgatggttttctgagagaactctagcagggaggcacttgctttgggaaattttccatggttctgagtctagtccaaacatataggcagagacgcttgattctgtaaacacactgatgatgtttccactctcgtgggcagattgaggcatatacaagaatgccaacatatcaattgtatggaagtaagtgtcacataaagagggattcttgtcatctgtatgattccgtatatgtattgcttgtctcactgtaataacatagcaatatgcaaagtgccaatctattgatttatgatgcaaatgactctgcaagcatttccatgttcaaagtctgtaaggtcagggcatagtcactccactccctaggcttagtttcccagggacaaagggcataattagagggtattttgggtgaacatggaaccaaataaagaagagtaatttgaatggaacctttgaaaggatcaggtaaaaatcaatttcaccacagggttggatttgccaaaagctcagcaatctttgaactccattggttacaataccctgtgtctatccccacatagagggtagtctgtagtcttgccagggggcctggaatcttcaaaatcctttggttactattccatctccccacatattcctccagtgacaatgactatgtgtcctagtaactcatttgttcttggctggtcaatctctctcaccatcccc

SEQ ID NO: 48585 - DNA, 2518 bp, Homo sapiens
gaactgacttatcttataacttgttcgtgtcctttggccgccatttccccatttcccctacttcaacccctgacccctggtgaccatcctcctcctatttctatgagttcaactttttctagatcccacatacaagtaacttgttttctctttagtcatgttaatttcatgaatcaggtaaagagttaatgaggatgaggatgaggtaacatctttctctgtagggtatttatataatctctgaaccattcagtgttcctttctctgatggcagtttaattctagttatttccaagttattacaagaaaatctgcagatatcttcaagtactaaaaataaaaacgaatctttctggagcctttctacatttttttttttctgctttcattctcttctcatattctcttaacattcttcttattctttttccaaatctcttgttacactaggtcacagttatctgcaggacgttttatgggatacaggtggaaaaaaaatctatcccccccattaagccctttctcacccacatatgtgcagcagtaacccccaaggagatctggcatgaagaagagcaagtcatgttcctcaaaccagtacttgtcatttagagttttgttttagacaagaatggtaattcaggactttgactctggccttatacaatcaagcttcatgttttatcaagttaataaatgacttaatcatgcaagagtggaggagcgcaacaaagacatccgtacatgacagtaagggttctgctgatcccaaagagaatgaggttcatgtcagaggacacgcaaagtcatcacaaataaaattcatgtttgtgtttccagcttaattgctcagggttaaaaggaaaataatagaaatgaggctgtgtttgcataaagcgtgaaactttgtcctgggaacttttgtcctcctaataattcccagcaatgtggacattagaaggttacggactgtgtggcattttcacagaaagagcaaagggaaccaatttagaaggtaagaaaattttgctatgccagtggatagtactgatttcctttttgtagtatcaaaagtggaggagttgtaactgcttggggggtgctgcttacatggcatcagcatctttccatttgaaatcagccacaatttgctctccaggtaatgacaaccaagcatccctttactcgactaccacagtgccaggaaacactgtgccaccgaaaatcagagtcttctgaaaaactctatttcacagcaccgcactgtgcctttggttttggaaaacaatataacaaatctactgaaataacaccctctgtcaatgccactgtgtctatgaaatcagctagtccttctgtccttattaagtgagcatgaattttgggctattctccttcaggctaaggttagcagatggctattcagacgcatcctcaactcaaacccatggctccttgttcttattttcttctgtaacagttttgattactttctctttcaccttactccgacctatttggctttttggggggttctgcttccaacttgcttaaaactgcttcaagcattttgtgttttctcattttctcttgtagatttcttggtaaacgattcctaaatcccctatctccactttgcttctctcttttaaccctttgcccactttcctcttccatcaataactgcaaccccagatcaacatctgctaatcattggtgcacaaaagtgctttcatcctgctgttgccagagaattaattctttcttccattcttggttttacatgtaatctaccatcccctacctaaagttctcaagaaggtttcctagaaaacaggtgcagtagagtatcggggatcagtcagaggtacgtttggatagccttgtttcttcattcagaacaaaacaaatgcaaacaaacacaagcaatgagtttggccaaaatgacctcattattattgtgagggttacatgtgacatataggaactcgcccagtacatgtctggcacagagcaagtgctcagcaaatatttgtcccctaccccacttaatgtcagtcactgaactttgtagcatgcctttgtcacctgtcatttcttaccacttttcctcctcctcccactgcatttccactctccttataccaagttgtctttttctcttcacaagagctctgtacctcacatttcctgctcctgccagccctcaagtattcacccattgtgtgatcaacacataccttacatctttaaagtacgtggtatacaagtcactggtcctattctgtggtttgtggtacatgcaaaaaataaaacataatgacctaaagaaagttgaaacttcacgggaggaagtagaaaggagcactaggcccatgctggatacgaatactccctttgctctcatctccttccccagatcccactgcatttgctttactggggagaggggggattaggagtttcccactgaataatttaaacctcatccacagataggcttgagacagttgatgaa

SEQ ID NO: 48586 - DNA, 887 bp, Homo sapiens
tctgccctgttgttccctcactgtatctgtagttccatatctaaaatactgtgagctgtgcctaatttacatccccacatcctaactgcaagatggaatgagaaagggccatgctgcttctccagcttctatagtgggaggtgggttcataaaacaagaaatctctcaaaaatcagatggagagctgaaatgatgacaaatatcccctacatgtcccaagcctgtcttcacatggtaatggctgcataaaggaagcagggttgtttcctgtttacatttttgaatgccacctcacaacctgaaaataaaaacaacagaccattaacaaatcaggaatattttatcaagcatgcatttctatggagtaccatgatgactttgacgtactcttgtctactaaaatctcgtaatctaaaagtggaaattaaatgtttacgcaagtaggaaaaaagttgtcagtgccctttgagctgtacagctcagagcagtgaacctcttcctggcctggcatgctcagggaacacatcgtaaacagcagttacattattgagctggatttccagtcttgctccactgttatcttacattttctcttcttgttttgtgactttcaaatctttgctaatgtcagtcactctgctgggagtactcttccctgtcttctctatttgtgtgcattgcaatacattttttaaagctcaactctagaaagaaaaaagtacatgtgtgtgtgtttgttaaacaacagacacacagagagcattatgcaaaataaagtgacccccaactgcaaaggaagaattctgtttttctatatttgtttgcaggtaatgacaaacctggaccactttgaactgttaccccaaatataattctgtatctccagt

SEQ ID NO: 48587 - DNA, 1790 bp, Homo sapiens
agcatggttatgctcatttctgtacatgctgcctatggctgtttttgcactataataaccaaggactgcgtagctgcaacagactgcctggctcacaaagcctaaattatttactctctggccctttatagaaaaaaggttttggacccttgctttagaatgaagagggcctgcgagtctgtgtctgttgactaattgctcaacctcagtttcatcttctataaaaatgggaatgacataaggacatttgacctgttatctcacaggtttaggaaggtcaaatgagataacataaacaaaaagacactgtaagctctagaaagctaaggaaatactattctcagacaaaaatgcagcccctggccccacctcgctgtgtaagtctgtgcagtcgagacacacttgagccagcctcttcttcccttgtcacagcctgattcctccgccatcacctctttgctgggtcactgcagcagcattttctttactttgcctctgcaacactaaggaaggcctcctctccagtcatttctccatgaagcagctaaaggcatctttcccacaggtggatctgatcacatcacttcttcttgaaagtcctttactgaattcctattgctcagtatccaacagaaagtggctgggactttgggctctgtacatgctgttcctcccttgaatgtcagctcttgcccagtcctgttctctggggtctaaggccttgagaattccaccccctttctcaactgcaggcagtgacacctgctgttccttctgccttaagtgctcctgccccaactccaacataccacccttagtgctgcctttaataatgtttcaattttcagattgtttggatgacagttcctctaggaggcttacctcacatcacctccaccaccaccctcctgccagcctggtttagaatgcccggggtctaaggtcactatcatagtctagtgtttagcagaaagtagccaatgacttgattacttattaacaaatagaggcgtccttagcattgagttctattaaattaagagagccacctagtacctctgaatcccccatttttgcctctgacccattacagggcagattaatgggcaccagaaacatatgtcaaatagcaatcgctgctaatggacaggaaatccccacattgtcagggcagttgaatttagcaaccactcagttccagcctaactctaaaattagaaagtcacctatttccttctcttttcctaagcaactgtatgtttaatgacacagcaacaattactatgaaagcaggtatccaaactaaaattttttgattaatcaaatattttccctcacttccatttttcccacttggtggcatatagaaacatatcctcttttccatgaccgtggacctccttacaactgtctgctgtacatgtatcccatgcacaaatctgggaacaatcttcaagaagttcatcttagaacttgcaactccctgggaggatctccctgcctggatttctatagttaacggaaatccagccatacttatcactcgaggccctgagatgtttacggtactataaattttaggcacagtttcaagttctctgcagcagaaggcaggcttttctgtgcattgcgtactgtggattctgttcttaatttaacacactctgcacactgtgattatgatagtggtaaattcactgaggcaagggccaagcagggctgcagatggataggaaaggttctctggcatctttctataaacttacgaggatgctggccatgatgatggt

SEQ ID NO: 48588 - DNA, 1398 bp, Homo sapiens
agagcagagagagcagttagagggagaagctgtcttattttaggaagcatgatgacttattttttcaaaatctgaattcgatattcccctttgctaagaattggtgtgggttttgttgttgttgtttgtttcttaacaaaataaaagagaagaagattcccataagcagagcttaatcatttaaatctaaaaaggcaatcagcagttgattttagggtggcagggtcctgccaaggccttaggagaaggccgagggaaacctcccaagccttggataactagcctggagggtgtgcaggtttcctccagcttgggcacatctgccttgccccatagagaatgttaacaagatacctgctgttttcccttctgcctctatgcaggacagcttctgaaatcctaaactgcacagggtgtcactccaaaaacagacagatagtagctgctaaattagagaacccagagggcacaaggttgggttttgtttttctaggaaagagtgtaaaactggagtgtctgactagtgccccggatagggaggcttaataggtttggggtaactcatccccatgagctctgctctactctcatccacacctgccagaaggggtcagggtgaagccgatggacagcagtgctgacccgcatgcagtggactttccatgaataacacccaaggctgactacagatgtttaggtgggggtgccgagggagggttacttggctgactagaattagggacagccgtgtgcaaattgcttttttagggccagagaggctgaggctgctggcttccagtcacacagcctacaggacagcccctgatttcacaagagcaggtttctgatgcatgatctagccccaccccttcttcacaggcagctgtacttggaagcaaatgatttagtgttcctgagagaggattgtacaaagagagtactcattagagggggctcaatctgtcaggtgctgttatattaggatcagagagtcatcataaaatgactttcatgctggtcttggctgataattaactgcatggcatcgcctgcgtattgtagagaggcaagggtgctgatttatgcatccgtttaattatctgaattgaaagactctgttccctgtatttgcatccactgcctgcgtgctttctctctcccccatatttctgacatttggattttccccctactaattgacatgcctgtcgcctccttctcctggtgtccatttctggaactgctatttgtatattgcatgatattttatcaggaaaaaatataaaacagatctaatttcatgaaaatgctgttgccataatgctcaggagaacagggggaagagagagattcaagtcttcctaatgtctaccttatatgcaggtacattttacaagt

SEQ ID NO: 48589 - DNA, 2542 bp, Homo sapiens
tcagaattttaaaaatgttttgaataagtcaatcatgaaggcatggcaagggttaagcaactaagccccttgttgttccctccccctacactaagatgcaaaatgctggactcatccaaaagtccagcatctcagatttgtgggtctatgaacattttcagttaaataagcaacacacacatgcagtgtttcgatttggttttgttttcctcaccagggtcctgcttaaaatatgttgctcttttacatatgggcaatagttatgtctctaatgtgaatgtggaaagcctcgttgtttatagaacacatttaaacttaccatgggatgggggctgggggaagcctccctgtaaaaagcgtctgttcctttaattttccattcttcatcaagatttcactgtgcctagatatggtatagtcaatggtaagggtatacacaactaccatttacagggtgcattctctgaagccctaactttgcatttggactgcttccaggggtttctgcagaaagcagcaagtgaggtcttaaggttattcctcctttgacctacagtagaggatctttcctgcagtagaactataggtttggccataaattatcttgattaattttttagctttaatttccctccttagggtccattattgatttataaatgccctggcacaaacgtccatcatccatgcctcttccattaaagtggtgatgaaaaaggttaaatattttgggagaaaggggttttaggttcctacaagtagcaaaaattcttaaggtttaacccacaaaatttcagagacttcttccaaagttcctgagaactttggcacttctcattttggacttaggaaccagtcgagtacgaagaattcagaactacagctaggagatcacgtgcaagtattttttagcagaagaggggccaagacaaatatgtgttttcaagaaaagtgcctgggaaggtattactgcagttctttaaatattacaacggactttccaccctggcatctccaccacccccagcccagtccatccactgcacaggccgcagaccactattaatctcttttcccatctttcccaccatttctctccacaccctcagttcggaaacaaacgcatcctcagaagccgaacaccatgttcccacaaggcattacagaaagaacctttttcctccctgtttgaagtcacttgtcatttgtcgctggtggaaactgttgataaggcaggaaaactaggcaacaaaatcaggggagatggaagatgtttttgttacgacccgggagaccgtattagggagagacttgtgagcaaatcagtatcgctgatgattcatagtcacatttctccctgctccgctttgtttgcttttgaaatttatcactcgtctgccttccatagagctccggaatgttcacatgtatcactagaatttccatttcctttccttctgtctcatttaatgtattacaggtagtcatgcttctcccatctcataaattcctaactttttctgcaggatgagagggagcaggcggtaactgataatcaccaagattagggcgctacagacaggggcttccagtacgcgcaactgcctttccctggatacactgacaaggagcaaaagtctttggaacgcgccctcttgtggccgctcttccccattattcacggaagagagcgtgtaacccctaaaggcatccctaaaggaggggtgattcacagaaaagttcggaaggtgggattggaatggtgggagtcagcttcattttgagatggctttcttggggtggggaaaatggtcatccaagcaaagcttcttggatccctgtctgggcagtgcaaacttctaactcaaatcttccatacatagtatcctccaaggggtagacttatgtgttgcgcttaacaacacctaggctacgtgagcacatccatttcttggtgtgtcatttgtctttctttccctattctttctacaacaagtgctatcaattgctaagctaattaccagaacccacatccaggtttgacagcatatggagacttagaggtacattattattatgcattgattgaccacctactgtcatgagtcaaaataaaataaaaataagctgcatcagctgaaaaggccactgaatttagcttcatgacatttatagtgatagcttggctttacccatcccttctatctttccttgtgaagaactctgtaggccttaaggtaaaacattgagggttttgtgccagccatgcaaagaacacactaaccttggtgagaaatcttgggtgatgtgacatatataaaaataaaataatttttgtttgttgggatacatttcagagagccttagagtgattccctgctgtttagtcaataacaactcgcatcaactttacaaaaattgagcactttctacctaaacaggatgggacaaactcagttaaaagagtcctcagcacttcagcttttggaggctctctacttctgtagccaggccttggctttatccaacaatcaaggagaga

SEQ ID NO: 48590 - DNA, 658 bp, Homo sapiens
tctctttggcatatgtacttgtatatatgtgctgagtggcttgtataaacatataatctatttgcatgctctaggactattaaaagctgtattaacctgcctgaataatataaaaaggtacacatcacaatgcacattggaaatgccaattagttgtaaaattcctcctagctttcctatctttgaatgtgtaaagagctcagaagtaagagttaaaaagcattacctttctggtccccactcttccaccagccggctcttgtatcatgtggtaagagctgtctgagctcctcttcatggtattggcactgtgaagttttatactgtactacttatttgtacaccacacattggtaccactgaaacagaggagggctggggctttgtttgggattggttggaatcagcatgacatcagcggatgactggtttttccagtgtgagacatttcataattcattatctaatggaaagcccttcctggcttctgagacactactgggtgatgcactgagccagtgaaacctctggctaggattactctaccttttagaaaaacattggaatcaaatagatatgtctcaatgagtgtgtccaactttcaacttttactactcgcacacacgtctcgttatattcaggttcagttttatgtctt

SEQ ID NO: 48591 - DNA, 6800 bp, Homo sapiens
gggtgttggcaagtctggtaaataacacaggaggaaggggtcctctgacaagaacggtgaagggttgtttgaaggactacagttgaagcataagcccagttctcatgacaagttggataaaatgtgcaaaattgggagctaatgagagccatatgaccagatatgttgttttgtatgcaggatttaacatgcataaaataaacttttcactgtgcccacaagcaaaatatagaggctctggcctcctgatgtgtggcttaagcaggttccattaggacaccagaagttttctgtgtaaaagggtctctcttggctagatacagagaaagtgtgggtgctgagctgcatgggggtggggggaaggagtattctaagaactgcatatgcagaaatgaagtaggaaaaaaatcattaggttgtagaggaagagagtgaatctgagtggcgaagacagaaataggattaatgatggtgaactccaaacctgcccctcagcttagcactgggtgaactcaaaccctttataagaaagaaacttctccaccctttttgctgagaattagtggagtcaatgaccttcagggcatctaaactcacccctgacccacacatgaaccctagtgtcctgaaaacatcccctccgcctccacacaaagtagtgtgtgtgtgtgtgtgtgtgtgtgtgtgtgtgtgtgtgtgtgtgtaggtgacgtggggtgggggtggggggcacaaaacaaacccagatcagatcccagttcctctgctcactcaccgtgtaaactcaggcctcagtgttcccatctataaaatgggatccatgatatgaacctgtgggggtcaagtgcagctgtcagataataataagtgatactatttctgagaagcctggtggctgttcttaaacatgggtgtcacaggaatctgcagctctctgaccagaggagccacaacacaagtgtgactctgaaactccgctggccatctgatgccaccgagtgcccacctgccaggccagcctaccagccgtgctgcaacccctctgcaaccacctgcaccacagtggcaatgcctcctccctcggtgcaaatcaaggtgggggtggtggaggaagcaggcaggttaaaatagcttctgtggaatattctagactgggaatcagcttttccctgcggaactcaagggcccggggcacaagctggtcagcccagtcctgaccagaatctccttctccttccttggtttggtttctctttcacttccccctcccccggagcttccccgcaccccaggcccttcgggtcccggcttctcggccctgctactgtaccttgagcagcacctgctggcagcttccagggatcacgccggaacgcggccgctgctcgagcccagctcgcaggatgcctggagccagggccaagccggtctaagcggcagcctctatttttaccctgagcaccagcaagggcaacttcttttaagagcagctcttgattttttccccccttttggcagctaaagaattcagggaggggaaaaaaatcactgttcagtgagtgcagctgggaatctctgaacccagccctcagtgccagggagtgaaaccacagcaaatgtcagggagcgggacctgcggaggggccggctggctccccgcggacagaggcgagccgggagcgctcgcgcaccagccaactgcccccttctgagtgcggagcgcggtcctccagcgactgcactagcaaagtggcccgctgccaccgcgttattcacctagtggaggcggcctgatttactggcgacttcacaaacccaactccacgctggagcatttgcatggctctgttctcgcctcgaggagcagccactagcgaacccggtggagcagcttgctgcgagaaggagccgggagggaaactgtggtaccttattttactgtaattgcaaaaggaacgatgtgccagagatttatatttagaagttgtatgtttctacttttatgtaaatggagcaattagggcctgtcttgctgctgctaactccaatgcgtgtgcattgctggggagctggtgttttcaatcacaattagtgagctggtcaaaaaacaaagttcgtttaaggataagagctcaattgtgcgaatgggggagaggccagcgttcgtgtgctggcccgtggcttacggtgacacctagcttagggccacggccaaccctatagtggtgtttacctgtggcagcagctgtccctgttcaaagttggcatagatgaggaagcaagaatgttcacttttcttctcaaaccgtctgtccttcagctttcatccacgctattaactggtctctttcctcactactcctggagcaaggagacaggaccagaaaagggagtgggggttggggcatttttcagggctctattattttagctgctgctcacggattgctgttattcagtcaaaaatacaagccaggagacgcgaacgccccaagcaggtgactgggatgttgttctctgattcagctgaaatgacacaaggctgggggttcagaggcacggacaagagtgctgacgagtcacggtgttttctttccttcctatgaaaaaatctgtttccaaaaaagcatgatttctggttcatcccgtctgggaaaccgaacataaaacgtgactatggagagaaatcaaaaggactcgaggtgttcccagcagctgatgtgttattctggggctcaggccggaaaacctggccttgttggtgaggggtgactccctccagaggcagctcagaatccagagaacgtgggcaggatccagagtactatttgctgcagggagactgcgagagtctgtgatgaagggtctcatcaaatggtttaaatcgaacatgggattggcaaaccctgcctgtttcctggacagccgcagcctgtacatagcttgggctgaatgttaggtagaaagatttgggacaaaggagaatcagcgtttcacgttcaaaattgaactgggaagctgttttgcttttaagttaaatcaatgaatgaatagatcgaaacagagagagagaggaaagcattaaaaagtcccctgaaattcattgagaacaacagggtcagaaatggttaatctgaaacttgactcgtaagcttcacatttctttcagaaccaccagaatatcccacaaggccttctgctatgtaagagcactctgtttttagattatttggaaatgctgctttctgaaccaagggaacccagatactagaactaaaacaattagggaaaagagaaggaggaagaaaacccagtaagtaacctattactcttcattctacagcagtggttctcaaccggggcgattttgctccccggggaacatctggccatgtttgaagacattttggttgttacagctgggagggaggttctactgatcattagtgggtagggcccagggatgctgctgaatatcctaccatgcacaggacagcccccaacaacaagaaattacctggcctacagtgttcattgttctgcagttgagataccctgatttcatattataattgtaaagtttcactcaaccttctccctatccatctccaagaggccttggaaaccaaaaaaaaaaaaaaattgcagctctacaaaatactaataattcaagtgattctgcttccttttgcatcttatgttttctgattactggagactacagatacaatgttcctcttgggcaacctcgttgttccaaccaactttcacgtatggtctcaatacattttcctgctggctttttgttctgacctaaagcagaatcttggtgaccagcaacaaaatgagatgggctggcccacacccaagttgttaggagacaagagactcatgcaaaagagtaaatgaataaaggattgagttgttcattttagcaattcagtatcagataaatccatgcaatagagaattccctgaagtaaaattcacaaacgtaggataaccatgcctttctcctagagcaaacaaatatgatgtagcttgattttatttgtttaataccttaggggaatgacatacaatcaatatccaaagagataaaacagtgttttgctaaatcctaatggctgttgcaagcaacattatattctccaaacttcctttgtaaaaggaagtggtgtgtctattaaaggaaggccatgcccttccaggtgttgctctcctgtgaggactggggaaactattgtgaaggattccatctcatggaaaatcgtaagagtaatcaacaagtattggtgaaatgcacaagagggaagttgcctggataaaactagcttagaactgaaatcctgttgtccatacagtgagtgcttacttccctggttcatcacttagctcctgagtaaaatgggtcatccagaaaggaaagggtaggtcagagatcattttaagatgaagggagccatgaggggaatgtcttagacactctgacgccgtatcatctcttccaacgtgtgaatcactgtctcctcaggtaaatggtcattttggaaccaaaggcctcaatcaactttcaaatgattcagaaatgcctggacttcttcccaagaagtaaccatgtagtacatgtaaaaaaaattcaatattgaaagaaatactcatttacaaccactatataaaaacatatattgaaaaaaacccagactaactcaacctgaagaaatatgccctcaacattcttcctgaccaatatatatttcaaaattgtttatcatgactcagttctaacccaatcaggaaacatctgcttcaacaatttatcttcctattgcctcagaagattattgaaaaataccccccaaggaatgcggaacagattgttgtaatcatttttctcacctggatccccttgggtaataagttccattggtgacttgaagacatggtggtttagcacgtagattccattggactgataagagagcagcaatcttgatttgcatccacttttgcctgtccacaaagatccccccacaacctgttcccaaatcgctgcttggagggaaaaagcccgacagaaaagcctgggggcagttctgtgtgtattttttttaaatcagtgaattgctgcctccctcgtgtcctaatagagtccaaaggttctgccctctgtgggagcagctccaaggcatgggctgagtgctgctgttcacgagtcctgtggactcgcgtggacactggcagcagctcagctaggtgagtaaatatttccaggtggcccactctaattttaggaaggtcaagtttgcaaaggtgaaatagcaagtaggacttctgtcactttagattggaaaagcaaactgtaattaagcacaatattcttacaaagtttaaaatggaatcactgaattctacaaccagctttaaactttcaaaaaataacttatggctacaatccctcttctactcattgagttcctcttaaaagatggaagagtataatgaatgagggaggagcctctatagtagaaggaaaaaaacactccagaaaacctctctccaaaaggccaggggttcatttgtgatcccttaatgaaacaggggcagaaagccaacaaggtaattttggccaactccaacatcacttaactatgagctgagaataattaaaatggtgctccctgtagaaaagagttcacccaataagtttcccaaatttcaaggagcttttgttttattagatgctgttatcttcatgttagtcacaggaaaaaaaaatgcccacatacacacgcacaactaaatgtagtcagtttgctcagctgctgctgacgtcactgctgcccactaggagtgagttactgtcataacccctcttttattaatcataggctggaggaagcacaaagtgagtgacatcattaggcaaaggaccggctaactcatgctccaatttactcagctttattataacatttctcgagtgtcatatgaaagtgattaccatttcacactttccccatctgagcaatcatccctaaccttcaattcaaattcccagagaaaagcttagcttttcagatggaggtgcataaaggccaaatctcactaagggtccttgtcccaagaaggaatgtcctcctcagaaagccttcttcctgggcttgaaacagaggcagtttctagaaccactggatactaaataattctccattgtctctggccctggcggtggcctctgactggagaagatcctgacagtccaaatgggtgcagccaagtatggcctcccagtgaccaagggcacagccacctcagtgctctgaagtatgcaaaacaccatttgaagatgaggcaaaaggtagtggttgaatgtgtgggtcctgcagtcagactgactgggttcaaatttaggattcaccactttcaaactcctgggcaaatgacttggttccacaattagtataataaatatggataataatattcatagataggattgttgtcagggatagctgagttagtcgtgtgagccgcatagaatgtgctggtacacagtcaatgttgcttactggtattatttctcttccttttttaaaaaagctttattggctgacctgaattccctgcatcctattttgtagagccttggaaagatgggcaaatgctctgtgacaagccaccagggtagactggtactgaaaagaccctactacacacaggggctctgtccctggctggaaagttacaagtcagcctacctctctgtgatctggtttccacacctactactctttatc

SEQ ID NO: 48592 - DNA, 999 bp, Homo sapiens
gatactttattatttgggttcacctttgctcagtagtgaattataagcactctactaggtgagaggtttggcttccaaaatgaacagctggcgcaggatggaactgtcagaccatgtcacatgataaataaaataatacatagaaactttaggatctcctaattggaagcttcctttagacaacaaaagatgccaggctatctgctgccccctaactggtaccatgaagaacagcacataactttttaagaaacaaagtctgattcaggtacaattagttagtggctgagtcaacctcctaagttatagttgtgaatttggccatttccatgaacctgtttgttgcgattaaggcaaagtcatcgggtagagtctgttttgtttctgtcttttcctgatggagaggcactcctgatttgcagcagctgcccaggtagaagagtgttgaccaaaggacacatcaccagcacagactgttaatcatgtgactagagaaaactctcatggtggcattcaaatttccatatccttcttctatggaaatttctgagagacccagaaaagaagcgtaacgacgagggaaagtgattcctgcagacctgaacattccagacttaccaggtgatccagctgtctgtcagcgggaagaggctgaggcgcccccttctggtgcatctgaatagtaagaaaccctgtgtagaaagaaaccctgtagcaattgggcaccttctccgtgatctgtctgcttccaataccaaaaattgttgctttttaaatgacatccatcctaagcttaaaaaagacgcatattatttgtataaaatgttgaagacgcagaacaaaaaatgtaaatcacatgtaatcatcccttccagaaataatcgttattaaaatttctgtgtatgtgtaaaaaaaaaaattgcaatcctactgtaatataatcctgtatactgatatttttcacctatcactgtatgttgagcattttcaatagtcaaa

SEQ ID NO: 48593 - DNA, 1815 bp, Homo sapiens
actacatagactaggacacattccacagatgaggaaacagaggctcatagaaagttcaacaactggccgggcgtggtggctcacgccggtaatcctagcactttgggagcctgaagcaggcgaatcacttgaggtcagaagtttgagaccagcctggccaacatggtgaaaccccatctctactaaaactacaaaaaagtagctgggcttggtggggggcgcctgtaatcccagctactctggaggctgaggcaggagaattgcttgagccggggagacggaggttgcagcgagcggagatcgtgccattgcacaccagcctgggggacataagtgagactctgtcaaaaaaaaaaaattcaaaagttcaacaacttgtgcagagccacttgctacccgaggacccgtgactcaagcacatcggtgtggtttaaagtccaccctgtggctcctctcacgctcctcctacctccgggtcaaggggcgctgatgtaaggcattccgcttgtgcctttcaaaataaacaactgctttcaaaagacaaacggaattatacatagactaggacagttgaaaaaatgctagattctgtccccgcagggaagtggccgacccgatgtgtggaggggctgggagctgccatgccccgcacaacccggcgcaccctgcgggcttcacgcgtgggcttcacgcgtgggactcgcaggctcagtctgcaggggcgctgctgtcaccgcacccgcctccccagctcaggcagcccaggactccctctggcttatatgtagtaaaaaacaaaggcagtgtctggttcagatccaagaaagccacagcagtggccacagagatgtttctccaagtctcatattgatgaatcccaagcatatttgaactgtttaatacccccatctccaaagatgctcttttttagctagtgtccaatccctatattacagttcctaaacaagaaacattccccgtgctgaatccgcgtggttctttcctcttcagcgcagagaacggaggtggagatgggctccggtgctcccgctgaacagggacggtgcgcagtcattccccgcctgcaccacgcggtggcagcagcagcatgggctgaaggggctgttggacgcgtttgcagctccgcccgctgagaagccactattaaatgccctgcaaactgggcattaatccccaggccctccacaagtgtggtgaggggagtgtggagggagggaaggagggcagtggacagtcaagtcttggagattgtgcctgatggctgagtgttctggaataggcctgtcctttctctcattgacagggggagctagagctggcaggagagggccaggaatttttctcttgctgacactttgcaacaggtctggcctttggacccagaaccccataagaccaggcctgttcttttgcctatgagacttcctcgttcacagaagctatgacttctagaccaggcatcgttgacttctggcctcctccctcttcttctaaaattttctccaaaaagcacacccactggcccccctggtgtgtcccctccagctctggtcctccagggcaaagcccagactccttcatggggtgtttggggcctatgcaccttcaccccgagttttcactcctgccagtgccttatgtacatcctgtcaacctccttcctgaccctcatctacagaggtccactctcccacctcatactgtctcttgtaccttcctctccacctcttcctcttctgaaagggcccctccttagtcagtgtttaactcatgttcttggaacccttccctgat

SEQ ID NO: 48594 - DNA, 397 bp, Homo sapiens
tggaaaaaactgggagagaggaggaggaggtggcgcttggagcagcaaagactctgcggtgtgtgcgcgtgcgcgcgagaaagaatggggaaagtaatagatactcgaaaggctgactgggttgatgaatggaattcccctccgtaatttttggagtcataatttttgccccttggactgtgcttcttgaagtgcagcgtgcctggagcccgggccgtggggccactcggctacggatgctatgtgatctaaccaggacccaggaaggggccctctggctgcagtgagagaggggtacacggggcgacacgcagtgttctcaggagggcggcacagctgctgcaggtgagaagtgctggggacggtcgagatcactggacgccctcagaaatggtac

SEQ ID NO: 48595 - DNA, 2127 bp, Homo sapiens
aaatgaagcattttttaatgccagaactgggtataaacatgtggtgagagcttataattttatgttgccttggcatccatcttaaaatatgttttaactttctcataccagaagcagggctcagtcagccttgacaccgtttctaatactattccccactggaatggctccagttggtggccagagatactgcttcatttcaaggaaccattcagacatttgcctgcaaacttaacgtgaccgcctctcagtcagggggacctcctggaaccagtgcctgcttgctttaaattcaacaattaaacctgtttggataacactctgaacccaataaaggtattggtctacgggtcccttctctctctctctctctctctctctctctctctctctgcctgtactccttggtgtgtggtgtgtgtgtgtgtgtgtgtgtgtgtgtgtgtgtgtgtgtgcgcgcgcgcgcgcccgcgctccctccaggatctgtaagtaccaaaaacgcttaaactttcacactgcggttgtgtcactgaagcagtgcctgaaatctaatccctgagtgtgacgccgccccaaagggccccaagcaggtagatcccatgctgatgctcttttatcctggcctctcagctgttgaggagagtaattgccgggctaaactgataaagtttcattccaaacaattagcctagtctgcaggattgcagtcgcggcttggacaccatcccggtgtctgtcccccgcagagggcttgctaccttgctgtatcagctggcccagcaggtctggggccgcgcgctgcttacaggcgctggatctcgctgctcgtcgctgcgcgctactaggtcctgctgtcgtccgagtcgcctccgggactctccggaattgtagcggctgtagccggctccttgcctgcggcgcggagggcaggtcccagtggtaggaggatgtgttccctttgcagaatcagaccccctcctgggactgtggggaccctctgtcgccggcctccattggaggatgcgttgtccctggagctgggtgcgctgttgcgtgacctggggcctgggtggtgggcgggcctgtccatggcaaagggcacggctgcgcgctacttcccgagaacccgccagcaggctcttgggaagcagcgatttctccttagtcacagtcagagagggtgatgcgacacactgggcttcactgtgctcgtgaagcggagccagggtgaaaggatcatatggcctaaccctaaccctaatgggagtaacttcacctgcgtcccacaggccccgcaagagtgacgctgccaggcaggcgccgccctgttcggttcctgctgctgtcgctcctcgctccccaccacctccagagctccggtgggtcaccatggaaagggaagccgctgcctgcaaggccagcagacacagaggtcaccctccaattttttcgggtaacattctgtaaggacagaacaccaggaggctactcctaccaccaggagcatgtcaggtaaacatccagagagatgaaggaagaaaaaattttattttagccaccaagaaatacaagccgttctaaagattatacttaaaagaaaaaaaaaacaaaaaaaggaaggaaaaaggggaccgatgatcttgcaatcacggaagttgtagagagctggctgcctagagacactgtgcccttccctcctccctcttttcctcttatcaaccagaggcagagactaagaatgccttcaagcaactaaagcctaaaataaaaaagaaagaaaagaggaagagggagagggagggagagagagagagagagagagagagagagagagagagagagagactgttgctttatgctattacaagtccaagaaaaaaaaaaaaagagatgaactttaaactttaaatacttagcagctgccaggtctagcaaacatgctagccctagatcacttactgatttataaacaaacccctagatacagagggggaaaaaggtaattaaataaaagttatatataatattttaacataaatatatgttgataaatggtgtatatgatatatttgcatcttttgatatagttagaagttcataatgcatatagcaatttatatatca

SEQ ID NO: 48596 - DNA, 1557 bp, Homo sapiens
atgaacccgggcttgtgtatgtctcattctggagtgactgcttcctctgatagctaaggaaaggatggcagctacacttttgaactcttctttaggtacgtctgacacactttagaccttcatttcttcagcttgaaagccatggggacacagcatggtcctaggttaggatacaatgcaagagttgggcaatctgctatataaataattcccttatgtctatcagcggcctgtttaactgctgagaaattttaataaaggcgacaaaaatgccgaaaacaaaaatacacacagactggctagttagcaaactgtccaaagcaagtgtctgtcctaaactgagcacttcagcctccctaaccttttcctccttcccgagttggtctccttcaaccggctgcctcatgatttcccccgaggcttggggtacttacgccaaaaaaaatcaacactgcctcatttctgcatttgacgtcaacccagactattttaaaagaccgaagaagaccaccaacttgcgtcccactcccactccgactctgaaggaaaatccgaagatgaaactaaactccaaggctgcaacccgcggcggccgtgcaagcggccccagcgcaggtcgccgggtgggcgggccagaggccggcggggccttctcggtgggctgcggggccctcggccctgcccggccacctgcacagccgggccctgccaggaggggccggggccgaaaagcccccaccgccagcgccgcggctcagggaccaggcgctgatagcgcgcggccgacccccttcccgccgggccggccctgcccagccccctctggcctcagaagaggcgccccgctcccagcctccccgcctcgctccccggctcctcaccggcagcgccagaaccgcgagcgcgagcacgcaggcgcgtgcacgcagaggccgggacccgccgggaaatctcaaccgggcagcccccaccccgctcgaacgccgaggcggctccacccgcgcgagccccgccgcctcgggcacctcctgcatcacgtggttccgggccgggtgacgccaaacctgcgattcccaagcggcagcgcggcctcccgagccgggttgacgctggcgtggcggccatgtttattgagggcacctggcttctcccgcttgcgccgccgggtgagcctgaaggcgcgcacccacctggctccaggaagagggaccgagctcgcgtgctgggcctcactcccactgggggcgtcggccactcgatcgcaaccgggtcgtaggcattttgggggctcattttaacagaagaaacgctggagaagcttgtcagaggtgacagctgagaagtactgcctctgggacttctgcctccaagccaaagcactttccactgcattgtcctgggccctccaaagaaagtgtgctgtccttctgaagagaagaaatgattgcatggcttccgaggggctgccatattcatattactgtagtagagtgtccagagtcacccagaaagattagggctgtaagaaagtaaagctaatttaaaatattaaagagg

SEQ ID NO: 48597 - DNA, 2772 bp, Homo sapiens
acatcgcaagacctcatgccttaaaaaaaaaaattagcaggcagggtggtgcacacctctagtcccagctactccagagactgaggcaggaggatcccttgagcccaagagctggaggctgccaagtccctgtccctaaaaaaaggaccacatttgttttcttcataaataggaacagtgaatacatcctgcacacactattctgtcatatgtaatataatgagaccttttattgcataattaaattaatctcgttcaaaggttacaaaaaaactattacatacacccactgcttactgaaaactgccaagagaaaagtacttttggaatttaagacaacgttatgtaatggaaagtgtatttttgttatcagaaaaaaaacccagtttgaatgtcaactcagctactcaccgatgaccttagacaagttgtttaatttgtacaagctgcggttagttcatctgtaagaagctgagataacattcattatagcagtggaaagagatggagcaggttaaggttaagttgcacctaacaaagtactcaacaagttagatcccgcctgccttcagttgtcaggagtacattttaagtaaactgggcattactgatccttaagaaaatgggtaagtcagaaaacttccccagtcaatttttaaaagtcttcggcgatggttttctcacgttgagagccatggttcgccccaactgtattttggaaagtaaacttattattctaatccccttttctacaatagaaaaacctacaatcttgtttaaagtaaacatccccctccccgacgttccccccagtccaccaaaaaaagaccaaaactcaaacttgcctcgttgttaggggttcacaaaaaagtgataggggctttcggtttttagtccttatgtttctaattcgtgcatcgaagaaaccgaaagcgggaggttttgaaagacactagtgccaaatggagaccaagactccgacttaactgtaaagctgagagttttccaagaaaagggaaccccacatatttgaccaagattccaagtttcagaaaccaccgcatcaggtctacttgagccaggaaaaaaatcctgagttcggaacgggccacccagagatggttaagctaaaactgccttcttttctggtctccaaagtgaaagcgaatccttggctatgtgcctcaccgtcccgcagccccatgttaaccccgcaaaaccgcatccccccgaccctccagcagcctccgaccaaggaagctccaggaatcccgggtcggcctggcaaatgactttgcaaagccgcatttccaactccattccctactggaccctccagaagcaccaatgccgacgtcaggatgggaaaaactaaatcgacagagtaccagcaacctcgactacgctgaagacctcgagggccccttccatacctgaatgtagtcagcgaaaagctgtacccgcgctccgccatctttacccgaagagccaaagcacagccgcacacatgcgcactgtggccgatttcctttcatttccccgcccctcacctttcctttactctctatgattggaggagagtcagagctgctccaagagcatgcggggtgttgtagttctaagaagcgaggcttgcccgattctgtgcctgtgcgcatgctgaaagcaggggcgggaccggggcggtcttccagcagggaaaatggcgctggccatgctggtcttggtggtttcgccgtggtctgcggcccggggagtgcttcgaaactactgggagcgactgctacggaagcttccgcagagccggccgggctttcccagtcctccgtggggtaggtaaagaagggctccgtgggagagggggctgatgacgggacctcgggcagcgtagcagacgcagcttacacagttcgccctcagccccggttctgatccgcggcctcatgtcggggacgtagttcgtgacattcccatattagcgagaacagaacgactgtttttgcgctccctccaccgcaaaaaaaaaaaaaaaaaaattcctctgcttgttccattcgtacacagaatgtaacccaagcttgtgtcaaagataaatcatagccagccagtaagtaaagcgctgaaaacagattttattcagtaactactgcaggtaaagagctgagctccatcccggtttgtgcagaggtgactttgggcgttttaaagggagaatgagcgaggcgggagtgtaggggctctgtagagtcagagaagtgtagtatagtgaagtcagtgcaaatgtgattagccggctgtgtctgctagctcgcagttgtcttagggagaattctatcctcccgcagagactgggagacaaaggccctatccttcctaatgattagatttcgaaggaatggctctcagggccttgaaagaaaagcttccgagttagttgcaagggatacgtatttacaattatatgccctttccaggaaatgctctaagggagttcgggacctactatcggggtatgttggccaaaataaataggaaattttccaggcagcgttgagctttctcaggcaggcactttaaagggggggccgaggtcatcctaggatacagccttatgctgctagaaactatgctagagtttggtcaagtctgtggagttcagggatttgtacagagttgtcctgagaggacagttctgcaggtctcacttggcatcaaggctcaccactctctggatctgtctttcctttccagccctgccctcacctcccctcc

SEQ ID NO: 48598 - DNA, 781 bp, Homo sapiens
taaggtgcctggccaggcacagtgactcatgcctgtaatgaaaacactttgggaagctgagatgggagcatcacttgagcctaggagtttgcaaccagtctgggcagcatggcaggaccttttctctacaaaaatttaaaaattagtcagatgtggtggcgtgcacctgtgctcccagcttctcgggaggctgaagtgggaggatggcttgagcctgggaggtagaggctgaagctaaatgtgttcacaccactgcactccagcctaggcaacagtgcaagactctgtctcaacaaaacaaaacaaataataaaataaaataaagtacctgactagaacttgaaaactggtagaataggtacaaaggatggggaagggaagccttacagagcacagcctaagcaaaggtgcagaggtcggattgagaaaggctcacagagagacagtgactagttcggtctgagccaagcaacaggttcccgcttgctgtgccttggttttcagaaaactttagtgctgcatggaagagttggaacttttttaagggaccactgaatgaatttgaggaaagtaattgattcatccattgtttcagggtgaagtcatctctaaaacacatttgagagatggggaaagactcttggcatttggggcaggacaattctctgatgtgtggaatcatcccattaccttgcaggactttttttcctgaccccatccattaaatgtcaggagtgcccccagttccccaagtcattatgacaaaacaaaacagaacagc

SEQ ID NO: 48599 - DNA, 1303 bp, Homo sapiens
atgacatgaccagtgataggactttttcagctctattataagcttatgggaacaccattgcctatgcatccattgttgactgaaacatcgctatgtggcacatcactgtatgaacaatatgtaatgaatgcagaatacagacacagatggaaaagcataattccccatctggagacacaggtacacataaaaataaagacattagattgtgttgtctatggttctatatcctagtgcctcgtagacagtttccacaccattaacatttttctatatttaatcacatggatctaccatcatttaacacaagcctttcttgaacatgatgtttattgcccgcttcttattataaaaatattgaacaactcaaatatctctcttttgtttccttaagataattctgacaactttgttaatgatctattttcagaacacagaaggaatctagagaggaatgtaaattcgtcctttgagcccttcctgtgaacttgctacatttttttttatcaagtctccagtgtttgcagagagagggttagctgattattaacccaaattcagtctaaaacatgcaattttcaatcacagctttaaggaaacccacaagtgtacattcccaaattgcaacattgaagagcagcttgtttaccagttgctgaaaactattttctgaggatatctattttgttttgtctggagagctaaatgtttgaagttttcacatttacaattatgatgaaagcgatcgatatcaaaagaaaaagaaatcctaaaagtagtccctactacaaactgggttttacccaattatggaagagttgttgcagcatgtctggggaaaggcaggccaccaagggctctctctcccctcgctcaccccttaccacatgtgcccacacacgcacgtacacccctgagaaacttaataagaccaaaggggtcaaatgccaggaaattagagtcatgtcattttggttttaaatggaaaatcagtcctgtagtcattttctgaccttaggaaaacaaagcaggccgcggatggtggctcacacctgtaatcccagcactttgggaggcagggcaggaggatctcttgaagccaggagttcaagaccagcctaggcaacatagcaagaacccatctctacaaaaacatttttaaaattagctgggcacagtgatgtgtgcctatagtccctgctattcaggaggctgaggcaggaagattgcttgggcccaggagtttgagcttgtagtgagctataattgcaccactacactccagcctggataacagagactg

SEQ ID NO: 48600 - DNA, 1872 bp, Homo sapiens
cctagcacatactaaatcctagttcaaacagaccctcggaatttcctccagccctgcctgaaactgtcttcatcgctgtccattcctgggccccttgttggagaagggcgtttccatccaatcctcctgttctccaggctctggtctttgagccatccagtaccaaccaaccgtttgcagacatttctgtggctcagggacgcagcaagccgtatctccccctgtgttatttcctctatcacactcatattaggcatgaagaatgtttgtcagtcagtcatctgcctttgggctaactggacttcagctggtttctgaagtttttcaatctggctcagctttacccgtgagtgggtgacctcagaagtaggcaccattaatgaatttcctgtgaaggccaggaatagaagtgagcctctttctgtttcaaagccttattcatttctgggtgatgccctgacagttagacactttcactcagggcgaaacaacaaatgtttcctgagtccagtgcacagccaagccttcccgagctcagccagcagatctggctgtttccccagtttccctctgtaatttatcacttagataaccttcagctggtgggtctctgagaatcctgtctttacaagatcaataatattttaaatacacgttaaggcaaactggcatgattccctccaagaaaaagagacttataatttcaatcccagaaagcctttacatatttatttatttatttattcatggagaaaaaagagaagtatgaggattcaatactgcatagtttattgatcagcaaacttttctttcatcttttgctttgtaaacatttgagactggaatgtgctgctgcagaaataccagcttctaaaccctggtgtctggctttgccagctgagcagagctgagatctaatgacatcaaagtgagaagtccaccaaagtggcacaaaatctactcccttgtccttcaagtaggccatgggcaataagaaggaccaggagagaaaacagatgcatctgcatctctacccaacttccagaaaagcagcaaagactaccacacacagagagtgaactggtggcccctgtctgcatacaaaggatgttatccttgggtgtggaatatggaagtgggaaccaaaggaaaatcagcaatgcctgtgtttgtcattagggatcgttaagtaatttgccctacattacgatctgcaatatcacacatggcctattcttaagtggccgtttggaactgacttgtctagactttgtagcactggtcctcatcaccttcctgaattctgtgtgagtgagttttatgctggtctcagagggagaaatgtctttccttttttttaaatctggatgtttgaactctttctaagtgtcttacaaaattatcatctgttacattaaattaaacttggcttgaggatgccttcatacttttgagtcattacgtaatggattgccacctcacttgggacatgaattaactgaaagcctaatttgggagtatactttggcaacaaagggttgagtctcagccaatcacaacagccaagcttcagtcagttgcaggtggctaactgatcagaccatgttcaaataaggcaaacactgagctgcttccgtaccatgctcccattccccaaccgtaaatgctgcctgcccatggttgcagaatggagctctctcctccctttctggttctggttctgagtgaggaccaccccattctcacaccattctttgatcaattaaactctgtaagtttactttgtctaaagtctttaacacttcaaaattcttaactattttaaagcctattttagcatactttgacaaatatcataggatgagttacact

SEQ ID NO: 48601 - DNA, 468 bp, Homo sapiens
gaaatttaaattgcagtgtccataaataaagtgtaattggacctcagccatgcctgttctatgctagctttcacaccagacttgagtaatagcaacagaaaccacatggtctgcaaagcctcaaatatttactctctggtcctttgcagaaaaaggttactgtccctgctctaaattgttgcattccaaagtcactctccgagcatttcaaacggaagagccctttctgaaacattctgccttgtgactctgaatcgattgcacaccacttttggtgatacagctactaggaaccattgttatatctccacaaagattccaaagaatttccttacacatttcaaaattattcctcctgttttctttatgtatgagaatgaacttgtggtacaaaaattctttgcaggtattttccattccaagtgagagaatacatatgttgaactgtttagtgaataaaagatattt

SEQ ID NO: 48602 - DNA, 2288 bp, Homo sapiens
ggtgtgcagggttaataatatttatacaactctgcctccagacccctctcccagtgtacggagatcaggatctcatcacccctccccaccacgtgaagtcctgcttacagctcaaatgccttttattaaccgaagtgcctccagacccctcccctcctcaccacgtgaagtcccgcttacagctcaaatgccttttattaaccgaaggtcagcttttgtgactctcagacgctcaacaggtgcgcaactctgctaacgcagtaggctgtcctggccaaagggtggtgctgtgagtcgcctccagcctccgggccgtcccgaaagctgcaccttctccccctgagctgcagagggcgcgcgtgaggcatcgggcgctcaggaccccgcgggagctcagcgagggggcgggcggccacggagtgaggccggggcggggtcgggcgcggggcggacgtggggaggggttggccggggccagaagcagggtgcagggcaggcgcggggcggtcacgggggcggggccggtcgcggggcgcggggcgggcccgagctaccggtagtctgcctgccgcagtccgagcgccgcgctggggagagcgggtgtttgaaggctccgcggaccggcactaggagccgggggcgggtccgtgaccctccggctgctcggagtgaacaggcggccaggaaagaagcgggcctgaacaccatgatccctttggagaagccaggcagcggcggctcctccccaggcgccacctcaggctcgggccgggcaggccggggtctgagcgggccgtgccggccgccgccgccgccccaggcccgcgggctgctgacagagatacgcgccgtggtgcgcaccgagcccttccaggacggctacagcctgtgcccgggccgggagctgggcaggtgaggacgggcggggcccggcgcggaaccttcccggacgcgcggggcgggacgtgggcgccgataagtgccggcgccgcggcggcgaggctgaagtggcgttgctgctgccgataacgcgcgttgtgacttggcacaaacttgggtgccgacggcaagtagggcagccgagtcgcaccagcgccccctccacgcgccgcgcccagcaagcgagtggtggtaactcgatggcggtcccggaggcgcggacactttcctcagccctttcgttctctgtggcgtttcgaatggctatttaacgagagaaggtgcgggccgcgctctgcctttcaccccgagcagcgggtctgaaaaccagaggtctgtggagccgactttgcatttttccttcaactcttgcgactttcttggtctgcctgtgtggttttaataaaatacagcatccgttgtgaccgcttcctttgcaccggcgctctgttaccttgtgtcggtcttctgctgaattcattttcgttttcttggttggttttctgccgttttagttctaaagcatttaggtccctttgcttcgagtttagattggtttctttcgtgggcgcttggcccttttctcgctttttactttgctgggaaccgattcttgccttctccccccaccccacgctagcccaccctttttttgtgggagtagagagagcttacaacttggtctgtaaagttgcaggtgcaggctgttcggatgctttacattttgtatgctgaagaggggtgatcgagtgatttttgtggggtttggcgactcttccttgagaacagtttgaagaagttgttaaatactctggctttgggggcagacctgagttcatattcgtgcccttcttgctgtgtttgcctttggaggggttagactctccagcctcactttcctcatccgtaaaatcgtataatgatgacagtacctacctcagaggtggcctgaagatgccatgcttgtcaagcgcataccactgggcttgccacatggcgttcagtaaatgttcgcattattgccagcatttgtcatggttgcaaaatagcaccatgttgtaatgggaaagggcctgacagttggaacagccttcagctggggtcttggaaaggcaaacaatgtaacattggttataatgttaaaaacacactgccttacacatattaaggtaacttttggaaatagttttttttggggggtgggggtgtagggagggtggaatcctaccttaacaaagtcttacttattcctaaatgttaacaaaaggaaaaacacctttcaggaacaagatttacttcactgctaggccctagttgactggatctgtgcatactttgtgacaaaagat

SEQ ID NO: 48603 - DNA, 970 bp, Homo sapiens
gactagaagcaagctgggtcttctgggtcgtctctactcctttttcacttcatcaccgttttccccactgagcttgaacacaggaatctgctgaccatccttgagctctaaaaagacctcgtcaaggtgccacctgagagaaaccaaaagtatagtatctctaatctatgaaggctgaggcaacagccgtagtcaaaaaaaggggcgcggaaagcagttgttttgaataatgccttaaatttttttaaacattattttgtgcgagtgctgtgtcaacacaatttttaacattctaccatgggctctcattatttaaccagcttcgacttcaaggcaggcttaacaatgactgacaggcgaatggaagggacatcaggaagaaggagcagtttatttctcatttcctaattcacagtgaccttcagttcctggcatggaatccagccagcttgtacactaatcccaggctcagaggtcagtgagcccagggtgagctaggtggggcctcctgctccttttgtccttgggaattaaaatacagcctggctaaacagcaaacatctatgagagaggcttcccgtgggggaagtgagtggatgtagctattggcaaccagacaagcaaagccaattaaggggtggagagcttatgcaaagaatgtgatgaataaattctggaacaagagtccatgccctttattcatttataacaattgaggcagtcaagtgagaagctgtaacatagcatcaaattatgatagacccagatcactataactggaaagttttacaaattcaacggcataaggagagggcaattcagtagactgtatggataaactggactcagctaagagccgcagtactggcttgctgcccaggccacgaagctttcagcttcaagcttgaaaaataattcttcctatgcccacagtaatttaacaacaaatgaaaacggagttggggttgct

SEQ ID NO: 48604 - DNA, 2272 bp, Homo sapiens
gcctaaaaaaagccagtctagaaaaaactgctgccgctttgccaccagtagcattaaaatgaccttaaatgtcctggctgctgacagtaattgtggcctgtctttacaaattcaaatttgagtgcagtggggctggaagcggcatctgtcgggattttgccatcgtggtctctgcttttattttctgcccctgccagagttccttgctcatggtccctcctccattaaatcaacagcagagaatgaaagtgcaaaaaaagtctgacaatgctggacgcacagccacagctttccccacctgtgaaccatctggtattccccttccctctgtcccttctttatataatctcagaatcttgatggagcccctgtgtgtgcactggactgaaagcccatcgtgctttgctgggcttcttatgcatattagtcctggtccttttatttgtactcgttgctcctggaaaaactgagattacaggatacagaggaagctatagccaacgaaatggtggactagcctttaaaatcaccctctcctcctttctctaatctaaacaaagcatctcaagtatttcctctgatggaggagcaggagcaggctaggaggaggtcaggccgcaggcggctagcaggatacttactttgaatgaggtaatacacaatggcaaagcccccggcatagaacacaccgtggaaaaggatccttgctcccagaggcattgaccgcctgcttcctgcatacttaaaaacaaaagatacaaatttattgtaggattcccagttttgtgccaaggggatttgcccggcttggacccctaaaggaaagaagcattaaggaagccagaaaggaggccagaccgccctccctcatttgcttcctttccaaatgccagggttggttctgaagccaaactgagtgccctcctgagggtgccctctcgagagtggcccatgtccaggacccatgctgtgggggccctgccacccccagccagcccagcacagagcgagcattcagcccaccatcctgacagacacagcccagactgtgtgccaagccccgcatggccaggaagcacaaccactttgtctcaggccaactggtaaacaggaagcttatcctttgtggcaatggctggtcctgtaagcctgcgaatgggctggagctgtcactggctcctttcatattttgaaaaatgcaccacccttgggatgaggaaactctggttatgactcaggctgaatgaacagatggagggatgccagctcggtaaatacagcataccatccatccactcttataatatgtaagagtatcaaaatgagtgtaaagttaattacagtaatgtgatctgggaaaagtcatttagttctcataatgaaaacggtcagagcatctctgaagaatgtattagtcagatcttgcttaatttgaagagagctcaacagggtgaggcagccagactgggttatggagaggttcccagagtgttacagcttccaacgccagcatgagacacgagagaaagacagagtgggaaacaatgcagaaaatgcccatccctcctgtgaagttaaagcacaagtgaaccctaaagaccaggagaagcccataactattcagggagtgactttcttctattgtctaactcgagaataccctggcaggttctagtggggaacttggccctggaacattccattaccttttgccacatcatagcacaactctcttgaaaatcatcaaaggcaagttgtcctgcaattagaaaagattttacattaaaatcatatttttaaagcccagttctctctagtctcatacagccaagatttattaccaacccaagctttagaacacgaacaagaagttaaaattaaactctaaaacaagccttgtctgtgaaaggccctggtttttcccccttctgctgccaaattaggaagaaaaaacaaagcctgcgggtttcctgtctgtgtcctatgtagtttttgttacagcaaccaaagaaccggtgtgcacaagggagaaccgcagacagcaagtgctttgaccacagcacaaacacagggccaatcaacaggaggctggacctgcagaagcaagatgctagcaataaaagctgtacgtgacagagtgaaaacagcacttcagagttaaaaagaaacaatagtacagtaaacttatacatggactttaacaatattgataatacctaatacttctgtctctgactattatgtgtcttgtactattctaagcactttatat

SEQ ID NO: 48605 - DNA, 2356 bp, Homo sapiens
tcaaaaaaaaaaaatttaccactgaaaagaaattagctcaaagatgtgataaaatgtcatctgagaacaaatcaaacctctcgaaactaagatataacataaacacctgataaaacatatgctaatattcataatgaattataaaacccaaataatgaatgaaatcgaattgttttctaaactgtactttcttaagaccaaataacatagtaagggttgttctccctctaaaatctactctaatttcactcctacctctcgccagtgttcactatcaaaaccttgaaatattcaagtgggaaatgccatgtgaagactctctcaaaaataagcaaacaaataaatatcatgacatactagaatatgaaagggggaagcgcaattttaatgtggcagtgaagaacggcacctctgccaaggtgacatgtgagactggagggatcatttgaaaaccaggggaagggcacgccaaacacgccaaggccctgaggcagccacaggctcggtatcttcaagaagcagaaggcaggctcgtgaatgaggtgtggaagaggaggccaggcaagagggcagggtcttcatcatgcaggttttgtaggtatggtagggagtctggattttactcaaagtgtaagagaagatgctgaaggtttcaatcaggaaatgacacagtatgacttgctttttgttaaagatttctctagaaaggacaagaatggaagcagggagtccaattaaaaggctccatggcagagctggtggtggcttggactagctggtagcagcagacctgcaaagaagtaaatccacttgagatatgaagcagaattaacaggacttgttgacaaattattaacagaaattggggaaagggtgaaggacaaggcgcatagcagagtgatttctgaatttatcaatattatccttaaacctccttacaaaaaacttgagcattgaaaactaccatgcagttggaacttagtaatgataaagagtcttgatggaaagttttaaatagaaaaccatgatttctaaatcattagtcatgacatctgcttgaacaaatacatttcaaggccattctcttgtagattttaaaccacagcaagaaggtattcagtactttctggcataaaaacttcatggaatggactctgattcataaccattttgcaaatgaatatgagtagggcaaaccctattaaacatttacttcagcattcctattaagagcctccattttagaaaaaaacatttataaaaataaaacaatttggtatcagtgactacaaaaggaatctgggaggtttgctattgactcttccctccctagagtcctccctttattctcacagactcaggtgtttgctttctatttctctggagagtcctctccactcccctgcctgttttacatagccccccattctatattaggggctgaattgtgtcctcccaaaattcatatgttgaagccctaattcccaggtcctcagaacatcacagtatctggaaaaaaggtctttaaagaggtaattaaattaatatgagattttcagggtgcatcttaatccgataagaaatctggactcagacatacacacatacagagaaaagactgtgttaagacaaaaggagagggtggcatctacaagccaaggcaaaaggcctcagaggaaaccaaccctgacaacaccttcatcttcaacttctacctccagacctgtgagaaaatatattcctgtcatttaaaccacccagtctgtgctattttgttaatgacggacctagcaaattgatacactctatataccctttcctactccccgaccccaagaacatctcattcaagggcatgaatctaggtctactaaaataatccccacatctctatctccaggccaggtgtcccttctgcacttgaaattcctagtaaatacttccacaagtccccatgtgagctcctgccctgaccctcctccactccacaccaggtctccccttcctgcattccctacttggtgaacggaaccaacccaggtgcctaaatcagatacctgggagtcatcctcataaaaacaaaagtggcttccatatgtttactcacatgcaagaaagagctttgcatgtatcttatcaaatcttcttaagggtcttataaagcaggaattactctccctattttgtaagtgaagaagctgagatttgggttaattgtgagagccactcctttaagaagtgacagagtcaggatttgagcccaggtctgcctgactccagggcctatgctcctcacctaaattacccccaatctaatcaggccccctcaaacccatacaatctgtttcctaaatat

SEQ ID NO: 48606 - DNA, 1884 bp, Homo sapiens
tatacccaaaggtataaaaattgctcttccataaagacacatgcacacgtatgttcatcactgcactattcacaatagcaaagacatggaatcaacctaaatgcccaccaatggtggaatggataaagaaaatgtggtatatatacaccatggaataatatgtagccataaaaaagaacaagatcatgtcctttgcagcaacacagatggacctggaggccattatcctaagtgaattaacacaggaacaggaaaccaaataccacaggttctctcttctaagtaggagctaaacattggatatgtatagacacaaagaaaggcacaacagacaccaggacctacttaaaggtggagggagggagggaggaaggtaaggacagaaaaactacctatcaggttctatgcttattacgtaggtggcaaaataatctgtacatccaacccctgtgacacaaaatctacctatataacaaacctgcacatgtacccctcaacctaaaagttaaaaacaaaaaagggagtttacaaatagcttcctaagtagaatttttaagtcttctttctcccccacccaatagctccaacacttcagatttacagattataaaccttcaacacatataaataactaagatggtctttgataaaaatcaaaactattcttaaaattcaactctgagtaaactttcattctgtttcatgtgttatattgtcctgtttgcctgcaagtagaaactgtgtgttacttgtctcatgttccatataatacaacgtttggcaagtggtaagcatctaatacacaacaaagcttacttctttcttgctccaaaaatgaaaatggctttataaaactctataattttgaggaagagttggagaaatcaccctaaacatataaaactgcaatgatattactgtgggcaatgtgatgataaaccactccttgtgttagaaaagaattaacatagcaacttgctttgtccataattttagtctgatgtaatcctaaagttggagggtgtgatttgtgacaaatggacctgagtcaaggacacgatttccttgatgaattgagtttattcagttagtcacagagggagtaaatatgtatgactcagcatcaagacttatcttcaggacttttaaggacaaacttcctataactactcttattcaaaccaactctgtcctcttcacagctgaaccatggcacaggtattaggtattttcaaaacagctggtaaagttgatagacgtgcttggctgaaggtaattttaaaggttaaaagtcatcatccaagtttgttttcaacagatattacactttgtgtttttcttagaaaccctgaacacaggagtagcccttcattttttgttcttccccaacacaaacagatgacatttacaatcacaaatactctgtcaggctatagaataaataagtgcactcactgtaacaccatcactttctcctctgctcaaggaaacatgtcaaaactatttcaagcaatagcaaagacttggaaccaacccaaatgtccaacaacgatagactggattaagaaaatgtggcacatatacaccatggaatactatgcagccataaaaaatgaagacttcatgtcctttgtagggacatggatgaaactggaaaccatcattctcagcaaactatcccaagaacaaaaaaccaaacatcgtgtgttctcactcataggtgggaattgaacaatgagaacacatggacacaggaaggggaacatcacacaggaaggggaacatcacacaccagggactgttgtggggtgggggcaggggggagggatagcattaggagatatacctaatgctaaatgacgagttaatgggtgcagcacacca

SEQ ID NO: 48607 - DNA, 1713 bp, Homo sapiens
ctatgtccaagctccacctcagactgagtcagaatgtccaggggctaggactgggaaatggtacgtttacaagccctcccctgcaattttaatgtacaaccagggctgagagccacttccaactgaaacctggctctccactgcagccttattcagccacagctgtcttctctcttacatccctcttcccagcaggcctggagacagggcaggtgttctcgtttctcactgccatttccaaatcactatctcatctacctccctaagatcccagcttcaagtcttatatcatcactgcacccatccctaatccaccttgtggcaggattaggatacccccaaccttaatccttaaagattttagctcctggctatgacactctctccaacattgttcttgtcaaatgcatactgattttaatatctgtagagatcatccttgacctcatcctctcctcccataatccagtactccacttgacctcggcggttcattcccacaatcataccccagaacttgtcattaccaatagctgacaccctccacaatctcaatttctagcatcccactctcctgccatcccttatcttttcaattcccctcctcaaatatcatcactccaacatttttaaagtccataatttttaaagttccataatccactgatcctaccatcttttcaccatccttcacccagcttagagtctagatccaccgttaagactcaaagtttccctccttcgaatataccctcaactatcgtacctcatcttaccctatcattatcaccaggaaccccaatcctggataaatcctactctctacctaatccgaacaagtgaatttggctggaggaaaaaaataaacataactctactgactgaccttgctatacacttatgacagctgactccaagtggaccttggtacagccttgtaatcacacaccattttagtctcctggttgactaggtcacaacttttcctcttcttacctctacagctcctctgctttcctcaggctcagcagatgatcttgcttcctaattcactaagaaaaccacagcaacaaggatctaccagttcacctgccaaagtactctttccctttgcctctatggatgcatgctctgtgctcctaagaccaaccccgccactgcacactagatcccagttcctttcatctcctcagccacattccagcaattctcccatctcatgaatcatcaatttccccctctctatattagtcacatcagcatcaaaaacactataatagctcccatctttaaaaaaaaaaaaaagcactcttaatcccatatcttccttcagcaatggtcccatttctctactcctctttggaaagaaactcttcaaaaataatgtctatttttgccatctccaattcctgttttcccattttctcttgaaaacacaccaacttaacttttagctcctcaccactccaccaaaacaactcctgtgaaagtctttaatgtcctccgtattgttaaaaccaaaggtcaattctcagcgctcattttactcaatctattagagcattccatacagctgagcagtcctttctttgaaacagcatctatactaggtttccaagacacaccactcactcttggttctcctccttattgagcaattcttttccatctctgttattggtaagccttatcctcccaactctaaacactgga

SEQ ID NO: 48608 - DNA, 1780 bp, Homo sapiens
gttttaaacgtgcaggtgtaagcggagagttgctacttctatccaaacgtgagccacctcagaaataaagcaatagccctccggggagaatggggaggaatcaggggaagaccggagaaacaggttatcaaattatcagaatctccatagatttttttaaattacacagcatccacccccaaacacacatacagactgataggcactgatatatacataaatacatccaatgtcccctacacagaaaatcacttttgcagtcagcccctgttgggagggtttttctgttattcaagtgtggtggggacaaaaagtattataaccactaaaccaggtaattctttcctacaataatttgggcagcgtactcctcagggtgttgaaatttagcactaccaacaaaagtgcccagtcccaactcttcgagaggaccctaactctttacagtgtgctgttggggatggtcagcaaaaactgcaggacaaggtcaaggttagctcgacacagcctcctaactccgagcggacggagccactgaaggttaccaggtgccaaagaagctgcgcagggaggccgcgacccggcgccggcgcgaacctccgcgatgtgacccgtgagggaactctccaagaagcagcgcaccccgcgcgcaaaggcggccccccgaattgcaggaacaaacgcttcttgctggggggaagacggagactcttataccgcgggagactaacctgtgagcaacagaagcaccacgctacaaagagcatgacgagttcttccaggcttgggaaagcacgggtaaatgcccgcggtcctgcgcgccagcggggagcagtagagacttccggcgtcggctgctcgcagggctagagcgtcgaaccgggacaaccggaggcttcagctcacctcggattgtaaatgctaacacgggtcctccggccggctgatccagaacttaggtcgccgggacgtgtggcttctgcttctcagacgctcggactcgcgccgggaagggtttcgcctcccctggtccccgctttttttttttttttctgcgtccggttattgcaaatgcattcagtccagtagcactagcccaggaaatataagccaccggctcacgttgctcctcacaggtatgcggcgcttccgctggcctccaaggacacgaagccccgggccgtctggccccccactctagcactgaaattcctgccgccccgttcagctgacaaatttggcagcactaaattttattttattcgacaaattaagtacccagttaacaccagggagtaacggggtaagaaaatttcagaaggctggtggataataatagcatttacctcataaatttgttatgaggatgtgaagcacttagagtagtgtctggcagtttgtaggcgctcagtaactgttagctgttattatttttatattgattattccatagtcaccactattatcaccttaatgtcaagcttgaaatccagtatctttcctctgcgaagccatcactccaagactaattaactttagactggggcattcttctttaaactcttgctcacacatccctatcagaaaaaatatatatatatttacatgtgtcatgtatggcattaatatattatgcatgctataaaactcacaagacatcaaacttttgatgaggtaaaaacaatttttaaacttttttaaaaacttctaacagaagttcttttcttcctccacaacaattaggttgccaaacatacattctatcactctggaatccact

SEQ ID NO: 48609 - DNA, 942 bp, Homo sapiens
aatacactagactttagtgaaagtaattgacctcatctcatttctctcctgttatattaagatcactttcagtaaaaggtagaagcttttgaagtggtgaggaggaggtagaggagggacatagagcagataggggctggaaagtggggtggggaagagagtggcttctctttggcagagtaccaaggaaaagccctatctgtacagaacctttgtgcctgggaacttgatggctgcaacctgagcctcaacctagtttgcttgcggagccagaagagaagctaaaaaccttcagttaaccaagccagacaccaagaaagttaaaccgaaagagaaccccccaccccccgcaaaaaaaagaagtaaagtgggttaaagtgatatgttagcacagaaagagaacataagggtcatctaagttcatctgccccctcttctatttcaaggtgcagaaactaaggcacaagggaccccgtgtcctgctcttgatcacatagctagtgggtgccaagccaggtctagaactctgttctctggggtcacaggctggctcttcatccctctagagagatagctcatctgtgtgcacctgagcccgttgtgtttcggagtcaaagcaaataaaggctcaaactccaagactgttttgcagaccggctgcagtagatacggggggaggagaaacctgctttaaattgcttcaagcaagttgtttctgcaaaggtgttgacttttttctttcaactttctagtgagtcactgcagcctgagctgttatttgtcattatgcaataattcaggaactaactcaagattcttctttttaaattatttgtttatttagagacagagtcttgctctgttgcccaagctggagtgcagtggtgtgatctcggctcactgcaacctctgcctcctgggttcaagcaattctcatgtctc

SEQ ID NO: 48610 - DNA, 937 bp, Homo sapiens
caaatgtcctttgtactgcacaaacagttttctcaagagtcctctctcgggaagtcatacctccctcttatgaatttccattgtgctttatgtatcttttctttcgttaccttcccctcctgctttgactgtagctgtcggggtgcctcgctcatcttagcatccccatggcatctgacttgatgcctcatgcatagcttatcttcactaattatcagttgactaaatgataggatgattcagagactgttaagtaatcttctaatgcaatccagagcttgggagggtcagtgaaagtgtagagaaaggaaatcatatgacagaaattttcaagcaaaactagttgtggcccagaggctggctggagggagaaagacagaagaaggaccatcggccacagtcgggctttgatcccaggatgtttgttgaatgcaggaatgactccaagcatttaaagctgggggctgccaggattcctagagctactggcttttgcccagaagttcagagtacaacctgtcaggaagggtggataattggagtttagcacacagcgtgaagatccagggcgcggtgggaaagccaggttgaaatgccttgggaatgcggcttggaagagaggatggcccacagctcaggatgctagggtctttggcatagaggtggtcatggaaaccctgagaatgagggacccccatattctggggacatgggagagagagaaaaatagagggatgaagactgagctttgggaaatatgcacatcttgggtaaaatgaagaaagaaagtgaaatgtgaaaagaaaacctcggtagcatgaggtaagagaagaaaggaaggagtgagtttgaagaaggtccaggtaagggtcactcatgtctgaagtccaggaggatgtggctgagaagaagcccttgaatgtgatgagaaggtctt

SEQ ID NO: 48611 - DNA, 1198 bp, Homo sapiens
tgtttaaataatgtttcagatcttatggacagctgcaaaccatgtcattcagaatacacaatcttctcaagtgcacatggaacattctccaagatagagtatatatcaggtcacaaaataagtcataacaaattaagaaaactgaaatcataacaagtatcttttctgatcacaatggtataaaactagaaatcaataataggagtaatttcagaaaattcacaaatatgtagaatttaaacaacatgctcctatacaaccaatgggtcaaagaattatttttttttttgagatggggtctcactccgtcactcatactggagtgcagtgacatgatagtgagatgagaagtcttcttccgatcaaaggtttttcttgatcgaagagtttgtggtctcatgggcttcaaggaatgaagctgtggaccacagtggcaagtgttacagctcaattagagaaacgtgtggacccaaagagtgtgtggcagcaagatttattaaagcgaaagtgaatgtaaagcaaaagtgaaagtaaagcttccacgtggtggaaggggacctggaagggttgccctggcttgagtgtcttatgcttatatgcccttatgactccttcccttttccttttccttttcctgtcctataggattagcttattttctatccgcttgtgggttggtgggcctgattggttaaaaacatcacgctgcagctagagcttaaactccctatatgattggttgaagtttcaatcccttagcttgcagctatgactcattttggcttaggagaaagtcccctttgattggttgaagtttcaatcccttagcttgcagctatgactcattttggcttagggaaaagtccccttagggaagtccctattgacccaggaagtccagccaacttagccacttagtcgctcaatagctcaccacaacctcaacctcctgggtccaagtgatccccccacctcagcctccccagtagcttgggactacaggctcataccaccacatctggctttttgtattttttgtagagaaggggtttcaccatgttgcccaggctggtctcaaacttctgggcttaagcaatctgcctgccttggcctcccaaagtgctgggattaccggtgtgtgccactgtgcccagcctcaaagaagaaatttaaaaatcttttgaggccgggcacagtg

SEQ ID NO: 48612 - DNA, 418 bp, Homo sapiens
tgtgtggtggaaaccggggttttttatttccaaaattccacatgaagcccttcctctactgggggttctgaagaccaactgctcctcagtagtcaggactgtgacaggaaggattttactcaccactgacgcagcctcaagttgtctcaaagtgaggcggtgtccccttagatctgtgttgaggaaaatgaggttctcctcctcactgcgggcccggcgctggcggccgcagtaggagcacggaggcggtgggggcttctcaggggtccgacaaggcggctcgcacgccccctgctggtcatctggggcagcgcggggccctcggcgctcgctcactgtttagcggtggccgcgtgccccctcctggctgtctggttgaattaattaaattcagatcgttcaatgccatgattacgga

SEQ ID NO: 48613 - DNA, 1592 bp, Homo sapiens
gactctgagctattttacagctctgtaaattacagataactgacaggaatgcaaaataattcttgtctgtagacatgcaaataatttctgttcagtggaggatcaattgagtccctgcctgccatggaaaaagtcagttttgcatccatcttcaaatttgtttcaacatcctgatctatatatatctctgcttttttatgtctcccttgagttggtttcatagatttctgaccctagcattatttcctgagttaaagaaaacctgtgacacgtgttcattttgtttacatgacagtcggattgagtgctccttttggaggcctggggtccgctcacctgtgtgcagcgacagccagcctttacggtgggcgatgtagtgcggcgcgtgtgcctcctcgtaggtcaccggcttgtcccccttgcttacgcgtactcgggccgcccggttctaggagcaaaaggggccgtgactccacgagatccccgatccagacccctacttcgcgccatgtccccccagtcagctggcactgttccccggccccaatcccctgatccctaagccccgaccctagccccgcctcggaccccagcgacacgcccccttcagcccgcacggcttccccggcccccggccccccggcccccaggcccccaggcccctgccccggcggtgctcaccttggcgcagaccggggaggtgtgcagggcgcgccaagcgcaaggcagctctcggctccaggacagcacctgtggagggagggcgcgtgaggcggaaactagggaccccacctccgactcgcagggacctgccgagtcgccccactcacccgtggccccagcaacccgctgcacacggaggccgccatcttgggccaagcggagcgcgggacgtaccacagcgcgctgaggggtggggacgaccgcggacgagaccaagtcggagctcgtactctgtactctggcgggggcggggcagggcctctgcggggcggggccgcggtatgctgctagctgttactcccgccttccccgcagccctgtgaatgctcagccttgtgaatgctcatcccgccgctgttcgctctcccgcggttgctgcttgcatagggtttcagatccggaaatttgaggatgcgaaacgtgagattttctcttcgacaacctcacgctagtacgggtgatgggtgtgcggcccaccggagcccgccctgcccaacctgcaccctcggggctcgaagaggagccaagcgtttccccaggtcctagttatgcctccaaataatattcgtagaaaaacaaaacagaaaaaccctccagacttttatccacaaataaagaagaaacatattttggttaaaacgtcacccaattcttcaaggatgacttacgcagttatgcaagaatgggtttgccacatgtgaccacagtggtgactggcccctgaggaaggaaaattttaagtacggggaaggggccggagggcaaggagattcgtgagaatatcgcagggcctgtaatgctgaaaccagtgcgtcgccactattattggtatccagtaattattaatgtcaaacggaaaaatagcaacg

SEQ ID NO: 48614 - DNA, 1080 bp, Homo sapiens
gacactttacactttgtaaacctatggtttttacattattccttgtgattctttttttcctaataactcgttcactaggaaaaatcccagaggctctcagctctattctgagaaataggtcaaacaactgaaaccctatgagtaaagcagagaggcgtgtcaaaccagattgccaagacagctcagccgttttccctgtgagctcctgctccatccccccacctctgttctccttctggtgaggcacaagggctgggtttggtgggtgaggtccccagctataattactgacatcagctttgcggtcccaaggaatccactcccctgttatcagagctatgggcaattagaaatgcccagtgccacaccagaaccctgggctaaaagtcagaacctgaagaagccaaactggtgcttaggatagagggggtgcggactcaagaaagagaagaccgagggatgggctcatgagctccagcccctgagactgccactccctggctcccagaaactgctagatctagatataatgggctcagatgaggagacaatgaaaatgtgctaaggaccaagaagggcacagaaaggcctctgaacccttgggtgggcacaaatggaggtgcgactggcaccagaggctgttctgagagatgtgcccgccagtcaaccagggccagagacaggcagaaggggcccccaggcagacagcagcatggaagaaaccatggcctccaaagtgtgtatgtggcggggcgagggtgtggttgacgaaatgacaggagaccaggaccaaggtcatcttggctcttgtacagccctgactcatcagtgctcataaagctgcactctggtgaaattttgttggagtcttagaagaaatcaggataggtttatggccaaattattttattagtgactcagaaagaggattttcccttttactgggctaatacaccacacctgaggagttggggtagttaccagatcaggtttatattgtataaactgcagaccaccaccagttctgctaggtgctgtttcagtaaattaagatagtatcgatgagaagatgctgtttta

SEQ ID NO: 48615 - DNA, 3583 bp, Homo sapiens
gagcccctttgaaaatctgttgaaagctacagaccttgtgcccaggaaaattacacactactcccaatgctgcatacaatttcagagaacaaagggacccccagaagcccatccatgaatcatggagcctaagttaagaacctctgattcagacaacagttaaagccactaaaacagatgtgaccatgcagagaacatgtgttgggactagcggagatggattatagagcccaaggaaaccccaacagtgaaagagcaggcagaggagctggcagacaaggaagatctgggcagttgtgagacagccaagcaaggggcaaagacaagagatgagctgttgagtgaggcctgttcgaaagaggggagatggcagcatgagctgctccctgtcttctgccctctctgccgtctctatactgctgtcacattgattctctgagagctccaccaatgcaaatagtttcatttaccttcagcgagtggtgggcagtgagtccacaaacgggaccaggtcccatcatctggtcccagtctcatcctctgaacttgtctccacttagctccaaacacactgggccatggggcatttctcaaacacatcttttcctttgatgccttcatatcctttgattgccatttcctttatttagcacaatgcctggcatattcataaggtcctcaaaaatggtcagcgtttcttctttccttcccaactcatggagattgtcacttaataaaaacatcaatttggagactcctctatgactagcccagtccagatcaccagtcccttcccatccctgccctttatctgtggacttgctccctaagatacctagtgcagtagcttaaatgtttgctagctggctgactgagatagccctgagggtctcagaaagcactgtcttcctagctagactctgatctaccagggaagcctgtagaagtggacacttaggagctatgtctgccagtgtacataatatgtgcatagcttaccccacaaaatgaaataaagcaacagtcatgagtcacttaacaacagggatacattctgagaaatgtgtcatttggcaatttggtccttgtgtgagcatcatagggcaaacttacacaaacctacatcgtaaggtgtactatgcacctaggcaatatggtacagcctgttgctcttaggctacaaacctgtacagcatgttacagtatgaatactgtaggcaactaacacaatgataagtatttgtgcatgggaccactgtcatataacgtggtcctccgctgtcattttgtggtgcatgacttgtatactaaaggttttgagacctcagcttttgcaatggatatcccgcagaaaattatagattacaaactgcagactcatgggggtcacacaaataatcacaaccgcaaataccaaatgtcaccaactacagggacacagtttaagccctactggctcacagaaacaccagtgaagcattaagtccacctctgacccatgtctacaaagtagtgtacttgggcaccaaatgcaccactattttttttttttttaaagcttcgttcagggcagccccacacaggttcagccaccctcaacattgcctccaggaggctctgcccaccctttcctgacaagggggaaaggaatgctgcaggaccttgaacccctaggtcaatcagcctggccttcccagggatggttccctgcttactctattcatgagctcaaagtgctgggtagtcagctggcaatgaaaaggcctggtcccggaaatgaccactgccccaaagcctagaaagacagcaggcggggttcaaattcagcttgcttcattcaggcccactgtactgagccaaatcaccccagggcatggctcaggcctcatctggaggaggcacgaaatccatgatcccggccccttagcaccgtcccctccccacccctaccactgaacacacacctgtaaagctctttgggaactgttctgaatggctatcacagccactagatccaagaccctctgaatgatgggtaacagtcaaagaagaattttaacaactaaagcgatgaccttgagcctaatttctttctttgtaaaatgaaagtgttggactgtcattcccaaatttcagtactagtaaaattatcaaaacaaaaaacaaaaaaataatgaattactgaggttttagtttgccaagtgagaattttttctcaaaaattacaaactatatgtgtcgccatcatttcctaaaaggaataacatttaaatcaaaaaagttgaaaagaggtaatatcaaaataagcgcagccaccccaaggcaggccggtaggcaatggccccgaccaaggagatcccggagcggctctccggctgtcagcaaagggtctgcatctgcccggatcctgacattctgggtacgtctcaacgacgcggcaaacaagcgtccactcccaacgcgagcaagtttaaaacccaggaacatcgataccaggcgccggagcgaagcatttccaggcctccgcgggttgccccgggccgcggcgaggacccgcaccccggttccccagccgctcgccgggccctcgctcccgccgcgccccgggcacctccgggcctcgcgccctccccggatcccctaggcccgcgtacccggacccccgcatcccgggggaccgctgtcctccgccggcgcccccgcccgccccccacgcccgcgcggccggtccgcccaaggtcggcgcgagcgggccgtgggcctggtgggcctggcgggcgggggcgcccctggccgggtccgggccgcatcccagaccagagcccgcaggccagagccgctccgggtcccgctcccgttcctgccggcagccgcgggggcgcagggcctgcgaggcggcactcacccgggcgacgccatgagcgcagcgaggtctccgctcccgcctccttcgcttcctccgcgcggccgcggctcggcgccggggaggggcctggcccgccggccgcccgcccgctccgggacgcgctccaggggtggaggtggggtgaggtggggtaaggtgggcccggggtcctctcggagcagcccggggacagctggggcggggtgggggcggggcggcccaggtcagcccgcagcccgcccaacgcccacctgcccaggtgcctggaggccggaactcgccgggcggtgcctgcggtgccaaaagctgtaggataacctgccccagggccttactgaacttcacacctttctgtaattggagtttaatttctgtaagaaaaggcttttctttagccctgaagcgtaaggccttattattaagcaaaacaataactttcctacttcttacttgcagtgctgtgttggacgagttgctggcctctctgagacggtacccattgtaaaatgtgtataaagtggccttgtgaagctctaggcaatgcgaagcacttttattattctttatagtgtgttattaagaaaaataatgaatctgcagttcctccagtgaggtttcacaactattcttacaagttatgagtccttaggcaggtagatttttcagcttcagttcttc

SEQ ID NO: 48616 - DNA, 1644 bp, Homo sapiens
tcgaactcctgacctcaagtgatccgcctgcctcggcctcccaaagtgctgggattataggcgtgagccacctcgtctggctttttttttttttttttcaaaaaaatgttggttgcaacctattaaattgatttcgtgacacactagttcataaccctcagtttgaacaactctgacctagacgcctgccaagtcttgggaaaataggaaggagacagataattaagtttgggagatgcatagtctaaggccagggttctcaatgttggcagtgcaagatcacgtgaggtacgactgaacacggagatctccaaaactgcggagagttttgcgtgtgaacgtatgcacagacatctacatggaaatggctgtaacgcatccagccataaggcgtacgagggtatatatacttacagagttaagaaccactattctcaggagttatatgacagcctgggaagacgcccaggatgtaggaacagggagcaggcgagcgtgtggcaccttgagggtgctccgcgcgtctccgtaaagccaacgagcccctcctcttcgctggcctctccggggccttgctgactagtggtcgaagccacaggaccaggtgcgggtggccagcgtaacccgggcagccccgctgcttcccctcggccgcgccaggacgctcggcacgcggcgacgacggccccacagtgccccgcgcgcgcaagcgcaggctgcggctcccggcgtgcagcttggtggcggctgagccggcagcgggccgcctcaggcagccccggccgggccgcccgggtccccggcagcggggtaggatggcgctaaagcggatccagaaggtacgcactttcccaccctccaactctttgggtgtccgaagcgtcgaggtgtgggcggggcgccgctgccgtgaagtgaaaggtgacggaggctccgcgagtcgcggatacacctgcctgggaaggaggcagaacagcctcccgcgcagcctgaaaagcgaacgcagcctgagaaagggattgcgcgagcgcggggcggggccgggccgtggccacgagggctgcgtcatgcgggcggggcgccgtggggccacctgcaggcttctggacagcgggttccccctgtagggtatccagaagggctgggtgggtatccagaagggtatccaggaagaagctgggtcctaagggatgagtaggaactcggcaggtggggaaaaggggaaaaggctttccctgcaacggggagactacgaggcttggaggactgacagggtagcggggaagctgaagggcagatggtgtggacttgggtggtccttaggagcagtgctgaagtaactggtttttatcctgcaggtaagagggagtccatgagggtttaatgcattcactagaatttggaaaacgcacaacagtagaagaaagaagtatttctaattctatcactttactatttgttaacattttagcatacctaccttcagttttttttctatatttaaaacaattatactgcattttgtattccacttattcacataatagtaaatgtaagcatgttgtgaagtagtatttataactttttttttttttttttttgaggtcttgctctgtcgcccaggctggagtatcgcccaggctg

SEQ ID NO: 48617 - DNA, 509 bp, Homo sapiens
taagtgcattgctggtactatatttgttgagtttaattgttttaaaaatattttcaaaaagatagtgtgatttagcactgaaaagaaaagcttttgtgaacacaggcacagaaacaggacaacgacgagtaaatttcataataagggagcaaatatttgttgttggaggaaggactggaatttcctaattccatgtcaagcaaccaaattcttcatagccacagaaaggaaggtaccacctaccctcaagttggtgagactgggtcatttttttttttctggaatacgtgcaaatagattgtgtatcatgggcctttgcagaataagtattcatggcttgaaagaaaactccaggaagagtagtagaggactctaagaattgccacattaccattgttttggaagacacagaggatgatattgtgtagacatcaatgactcagtgttgggctctgaatgggaagaaactttaggaatacctgaacaaaccagtttatttatttcacttg

SEQ ID NO: 48618 - DNA, 1083 bp, Homo sapiens
cccaccatgtctctaaccccctcctgaggcctaggagcctcctcccaccaggagaattccttccagctaccaagattggtatgtagaggcagcatccccagcatacagcagctctgacccactctctcatgttctaggaattaaccgacttgcagagggatcctcctgcccagtgttctgcaggacctgtcggtgatgactgtaagtattttggggggcttcaagttgtaggagcattttaattaagaccccccaacttaggccaggtgcggtggctcacgcctgtaatcccaacactttgggaagccaaggtgggtggatcacctgaggtcaggagtttgaaactagcctggctaacatggcgaaaccccgtctctactaaaagtacaaaaattagccgggcatgctggcacatgcctgtaatcccagctacttgggaggctgaggcaggagaatcgcttgaacccaggaggcagaggttgcagtgagccaagatcgtgccactgcactccagcctgggcaacagactctgtctgaaaaacaaacaaacacaaacaaaaccaaacaaccaaattatcagccaagcagtatttaagaaaaccaatcaatgcttttcccttcattttctcttgaatggcttttcatttgaggtctaggccatgagttcacagcagcttggctggtcagcttatactcaaagtagaacctgcactgcctctcatgtcccatagtcaccgcttccctcttctggcgcatgagaaagccagcttggcctgaggagtcacatcagctgctggaaagtgcccttggccaagtcaaacttgggtgctggtgtaaatattgttggagttggtctagaggacctggtgctgctgcagctcctgggagcagagcaggacagtggaggaggggcagggcagggtagggcagtggccacttgcctctgccaaggggaagggcagtccctattattttctcccacttccactcttccctggcggagactgaagcagcagctctgggcagcttcttgggagagagagggagaagcagcactgcctgttccaggcctctgctgtccct

SEQ ID NO: 48619 - DNA, 2096 bp, Homo sapiens
gcctggctaattttttgttttagtagagacggggtttcatcgtattagccaggatggtgtcgatctcgtgaccccttgattcgtccacctcggcctcccaaagtgctgggattacaggcgtgagccaccgtgcccggcaggatttatattttaaggaggcaggggagttattctccatgggaggaaataagccgtgagctgccttgcgctttggcatgtttctctatcatacagataagaagctagttcagtcaagtgtatgcagatttgtggatggaaaaactggtgctcccaggaggaggggagcagattgaggaattactgacaccttctaggggcgaccagccagatgtgcaggtgaagcacaagacaggttctcttcatgcctccactatcctggcctcgaccaaactgcagagggaaaaactcaggtgagagtgagaaagcacagtcactttcagttaggtttgtagcggtgtgatcgtcacttagcactcatttattcgtgtattcatacatttatgcatgtttctttcacagatcaaactgttgagggtccacaaacaggctgaagacctcgtctggagggagactgcagtgaacccaagatcgttcaaataagcgcatcgacataacaagatttagaaaagaataagcacggtgctgtgagagcagctagcgggggctggactgggtccctgcggccaggcttccaagtcgagctgccgtttgggtgggaccagaagacgggctagtctgcgccccaggatccctccctgaggacaaacagaaggccgggtcctcccttctcccgcttgtccttcggcattcgcgggacctgcatgctagaccagctggccggacagctcgctaggacccgcgggtgcggctggcccctaccatttccgcttcctgccgtggggcggggtttccggttgtcggaggcgaggcttgtcggctgtcaaaggggcggcccggcccggcccggaagctacagcagcggcgcggagactgcggggcgggccatggcggcgaacctgagccggaacgggccagcgctgcaagaggcctacgtgcgggtggtcaccgagaagtccccgaccgactggtgggcggcgagacgggccagggtcgggccaggggctgcctcaggggtgggtctgtctggggcgagcgggggactcggggggagcgggagcgcgagcgcggagcggtgcccaggcaggtggcctggggcttacctgtctgcccctccacaccgcagcaggagtgctgtctcaccctcgtgaccccttgccccgccgatcgtggacaggttaaacccggcttggggggacccagtgagtccccgcccctccccctgtcgctcgccacccactgtgggcttcgcgggcttccatgttggatcctcggcctggtcgtgcttgctagcttcgccaggttcttctttccagtcctgggacttccctggagaaggggttcctgcacagccctctctgagaaggcggaagccacgcccggtttttttgcaaacgctgtgttcggggatgggcatttgagagcggcctggcagccgggctgtgaatgtgagccctgccctgggggcttcagacgaggagctcagggatctgggttcttggctgtctgtgaacgtggacttcagaactttcgtttctccaaaaagtgtactctttcttgtgcctgagccatgggaagatgtacgaaagtaggatgctcgctatctatttgggaaaaggtcccattttccctctaccacccaagatatcctcactttcctctttgcttaaattgtttttactgaccagttttgagaaatcccagttctgagaaatatgctgagtatggtgggctaaggtgaccaactttggggaatagaaactgggccttggagtctgagtcgtggtggggccacactgtggtcagcactgaggccctcccaactgtcttccccttgtgtgggggccatctccacttgtgtaagtgctttctcatctcctctgctctccgtagtgcccagcacagagcggcttttatgcagtgtactattgtgaccctgaggatgttatggctttgct

SEQ ID NO: 48620 - DNA, 847 bp, Homo sapiens
gctggtactacgggcatccaccatcacgcctggctaactcttgtatttctcgtagagacagggtttcaccctgttgcccagactggtcttgaactgctgagctcaagcgatctacccaccttgacctcccaaagtgctgggattacaggtgtgagtcaccatgcccagccttccttctccattttacagaaaatgtaacagactcagagaggttatttcttgggcaatggtcacctacctggcaaatggtagataagactcaaacccaggcctaacaaacttgaaagctgatgttctttctgctgctcagtgccacctctgcaggcctccatgtaccaagcaccacactgggcagtgtgcccaaggcccaggctgtccctggtcactggtcaaagtctaaccagtaggcagacacaagcccctggcatatcatggaagttgctgtggtcagcatcgtccactgagaaaaggctttgatagatcctgactgcactgggtggagaccccaggaagcccaccacacaaagctgccaccaaaccctctgcaccagactgctcccttccctctagggagttgatgctgagggatccagggtgcagtttagggaagcccagggcccagcctctctggagggctcacccgctttctgctgttgggttagtttctggggctgctctcggaggtcatctaaggttcgcagtccttcccggtaccaccggtcagcagtcttcacaccgaccccgaagatctgggtgaagagctgtggggaaggagcgtagcccggttgggcagagctctcatggctagactcggatgatcacccgctccgggacggtgtggcccatg

SEQ ID NO: 48621 - DNA, 1417 bp, Homo sapiens
ggctggagtgcagtggcgcgatctcggctcactgcaagctccgcctcccaggttcatgccattctcctgcctcagcctcccgagtagctgggactacaggtgcccgccaccacctccggttaattttttgtatttttagtagagacggggtttcaccgtgttagccaggatggtctcgatctcctgacctcgtgatctgcccgcctcggcctcccaaagtgctgggattacaggcgtgagccaccgcgcccggcctactgcttattaattacccctgacctctggttttgattctcgcagtgatcctttaaaacacgcctcgccctaattaatagcaccctttacagaagaggagatggaggctcagggaaaggtcacaagaccacgaagtgccactgcaaacttagaatccaaaaccagaagtgccatggaagccctcgccgcgccgcgccgccccgcacctgcaggcgtcaaggacgcggaagcctttggagcgcgccaggcctgtgaggaaggcccggcggctgcgacccatgcgaggctcgaccaggtagatggcgactcccgggaagcgcgtcgagggcggcgtggaggaagcggcatcgccgctaggggacccgacccgcgctcgccgccgtttggggagcattgggacgacagcctccagcagcgcggagcgaacgcagagggaaactccgagcgagacggaaggaagccccagtgaggctgacggaagcgggtgggcgggcgggcggccgccggctggaagaggacgtggccccgccctatgcaaatgaggcctctccgtggggctcgctacttgggccagtcggagcgctggggagggtccgggctcctacaggattgggtgtcccggccgctccggaagacccgcctccatgcaaataacggcagaggacccgccttttatttaaattaatgtctcggaaagcgctgttcggccccattggcctccgggaggagaggctgggctggagcggggcggggagggtgttggagggggtggaggaggcggggtcaagggggcgtccccggctagggagggtgaactgggacctaggcccgggcggagcggggtgggctgtgtccttggcgccggggctgggtctagggttgagccggcggctcggggcggacgcgtgcgggctgtgcccgatccctctgcgctcgggactgtcacacggaagccggcgggcgcaggaccgacacgcgggtttccaatgcgctggtggggcggtcgcttcaaacacgcgggaagatttttcagtcgaatggcattaggacaactggcaggccatttggaaaaatagaagttggtgcccttcctcattccttaacaccaaaataaattccagatgggtcaaacatttccatctaaaaaggaaaccaacaacgt

SEQ ID NO: 48622 - DNA, 1791 bp, Homo sapiens
ccctgtagcggtcatccaaaaagagaaaaggaaagctaggagtgtttgtcccatctggagttcttcccgaaccctagactcaggtgtcctgttccatctggacaactaccagggtctcaatcaagttcagtttgccccaaatggaattcccgatctgcctccatccagctctccggcacctgtctcatttccagacaagaggtctgccttattaaataaaacttctgtgaaataataagcctattattaaataataatagaactaaaccaaaaccaaaacataaatcagtcactgctctgttcaaaactctccaaagtgtcctcatttcattgaataaggccccaagtccttacaactgcctatgagatctgctccactggtcctctcccctcctggttcccactcctccaccttggatccctccccacagcaaggggcctctgaactcttgcttgcccctctcccgtatacttatagagctcacttgcccatctccttcaagttcttacatctttactcaaatgttaccttgtgccctgcccatctgatttacaactgcaactctccccagtacttcaactgttattgttgtttacaacatttaccttctaacaaactgtatattttaaatgtattgtctgcctgctccaactagaccataagctccaggagagctgagatttttgtgtcttatgccactagccacctagggctacgaagtacaggagatgtggtgagtccaactgtgatgtttgggttggacacacaatggatttctaagaatagtacaaagaatatcccaataattttttcacatacaattgaaataatagtttgaatatatttatggatttactccaattgatttgtttcgttttacttttttcgtacacctactagaaagttaaaaaattccctagcggcttgcaatctatctccacgggacagcactggcctgggacacaggctccgcacacgtgtctaacgagtgactcgttaggagcttttggctcgaacgtgcttgatggcggcagcagccaggccgcgctactcgggatggggccgagagcgccctgggggctgtcccagtcacggcgggtgccccggctcggatccacgcggcagctgcgggacgtccgccaagacaccagcccaccgacccaggagcccggcctcgcggcctggaactgccacccccagctgaccccgtttccctggaccccactcaccgcgcggcgcgccgcatcccgccaatccccgcgcgcctgccccgcccatcgccgcaactcgctaatccccgcgcggcttccccgcccatcgcctaatctcaccaatcgctgccctcctcgccccgtccgtcaccaggcgcctcatcccgccgaccactgtgcgcccagtccctgggacgcccagagaacgcggagccacaccctcggtttcctgggcaacgcggggcgggggctcgcaggccggcgccgcgggtctttggttggcggccgcgcgtgcaggggttgggctgacggggggtgtcggcctccagtgggctgaccgcgtcaccccgtcaggccctgcccaaacctcccagtggtcgtcaccccgccagacctcccagtggtcggccgccagcctccttggtgaagcccccagcgtcccagctttccccgcagagctgcccacttgtagcgatggcgacacgcgaggaggatcccaacagaaagaaggcccaaggcccactaacttggccggggagaagtaactcttcctgaagggatggcgcggggtctcggggt

SEQ ID NO: 48623 - DNA, 689 bp, Homo sapiens
ggcactggctccaagctttcctctcacctggccaggctgcatcctgcccgacttcaggcccagcaccaagctgttcctggtgcccagaccccagctacaagtatctctctggcgagcctcatgctgggtgtctgtgcaaacttacagggctttcccaagcagtgtaggaaatgtggtggtacctggggagccctgagagcctggcgccccaggtgtagcctcggaagaagagcacagacagagcctgtccctccccctggcagcctctgggaggcagccccagccagcttgcagaggtttctcttgctgacctcacccaagaggtcacaggacacataatcagggcccacagccaaacgtacaacttttcttgcctgaggacgcccccacactccctgcagggcatctgaccctcatctcttcagcagatgctcactgaatgccaggtgcggcacagggcacagaagcagagttgacagtgggaccaacccctctcaagggcggggatctgcaggaaagaacctcagtcaagttggggacaggctggggggtgaaggaatggggacagatgaagagggaccaggtcgggcagctgctgccagaagatgggagcaggggacctgcactgaggctggagcagaggcggggagggagggagtgaggctgagctgtgagcagcaggaggtgag

SEQ ID NO: 48624 - DNA, 707 bp, Homo sapiens
accaaaatggtgacagtaattatcttgatgatggtggtatgaggattttaatttattttcctttttgcttatctgtatttcctaccttttctgcagtaaatgggtattaatggagtaatatttaacaatgaagttaaaaaaagaaaggttgagccttatctgccattttgcacagaagcaagcctggaggcccagattctaaagggtagaggttcacagttaaatgagccaagctgctagaccccatatgccattgggaaagatattgggagccaggaaaccagggaacccaaagtgtccgcccttccaccactggcctgttccctgataccctcagtaccagctgggcaccaagtgtgggcacgctgatgcaacagggcctggaggtcagcatgatgttgcaagtgtttgcttacagcagggtagacttgagaccggctgtgctcttgtgctaaggggcaggctaagggcctggtgagtgggagggtgttaggcagtggctgatggccaggacatcagggaaagaggcaaggggagagccgagagacagcagagcatgccaggatcaaatgaccacaactagtgtgtgccctgtggcttccacatgccaggggatgtgctagaccctttagatggattgaaactggccgatgagctgaaggctgtcattttatatgcagggaaactgaagcctatgggagttaagg

SEQ ID NO: 48625 - DNA, 1464 bp, Homo sapiens
gagttaatgggtgcagcacaccaacatggcacatgtatacatatgtaacaaacctgcacgttgtgcacatgtaccctaaaacttaaagtataataataaaaaaaatgcttactttaaaaaaagaaagaaaagaaaaaaaaaaaaaagaagggttcaggccgctgtgggaggcccagcaccacccagcacaagacagtacggtatcccgccgcgcgcccgactccacctggcgagcagggaggggccaagcttacgcgaggcgtggcatcccgcccctcgctgcattgtacttccgggctcacatttctgcatccggagtatgagaaccctcaaccaggctgaccggatccggaagtggattgcgagccaggaggaggaagccggcggtggccccgtcagcagccggctgctgagaggccggtaggcggcggcggtcccgaggggcggcggccgcgctgctccctgagaacgggtcccgcagctgggcaggcgggcggcctgagggcgcggagccatgaagctgtacagcctcagcgtcctctacaaaggcgaggccaaggtggtgctgctcaaagccgcatacgatgtgtcttccttcagctttttccagagatccaggtgagcggcacaggctggtgggccgtggcggtcgggcggagaggactggggtgggggtccgagtcggagtgggcctggggtcggcggagggatgaggggagggtggaggaggccaagggtaggggcagggcggggtggccgagtgcccggggtctgagaaggctggtgtccgagtcagaggcggggcggggtggggagggcccggggtctgctgtccgggcttggtctcctataatggaatctggccgtggactctacctttgaggaaccaacattagctctttaagagcttataccattctagaatatagttctctactcagtgtttttcaaatttctgtcgtgtaaaaattttaaggagactgtgaagtagtgcagatttccaagcttcatgccaagatgttctgaattagtagattgaggcctcggtatttatattttagaccaacacttcccacccagtgattctgactctgggagcttgggtgccgcatcttgagagccatattttgattttcttgcggggcttcccaacaattctgtatgagagatagtgatatacttttttttgtttgtttttaatgggtgaagtcactgaggtaccaagaggttatatcacaaccagctagaactgaaagccaggtttaacgctttttagttggacactagtggtacaaaaggattccacacggaagatgcaaatgaagcatgggatctgtagggcttacaggcttttacttgtttctggggcgctttaattgctggaacgtgttagaagtaacacagacacttccagaccattcgtgggagggattggggtgactcaggcacgaaagaaggaggacc

SEQ ID NO: 48626 - DNA, 614 bp, Homo sapiens
gtgtctgtgagccctgccaggctgagcagggaagggcacacactccctatagagctgggcagggcagggccccagaaagcggcccctcttggctggctgaccctgctgcccaggcctctggggaagattcgggagcagagacagcagaaaaggatggggcaagggaggggaaaggccagtggcctcgtcacacatgagcagctgtgggcctgaggccaagcccttcctttgggcagggagctcagcgccacctgactgggtgccagtggctgcagctttaaataaacttggacatgtccacctggggccaggaagcaacaccaactgtgccctgggcaggcactgtcaacaaccagccagcataacaaccaagggaccccagcgctgcaaatgggctgagtgcccacaactgagccctggcctcagacatcccccttaggtgccctgctctgccctcccagctccctggcccacctctatggcacggctgcacccccgaggaatcggtcccttccctacccaagagccgccacagcagggcagtggtaggcccttggcgtcgccagggacccggcgcctagcagggctccacaaaggtgcactaggctgagctg

SEQ ID NO: 48627 - DNA, 1031 bp, Homo sapiens
gttaaatccaagatatttcaaaagtgaacgacatttcaaagaaaaccaaagaagaaaaggtaacagtagcccagaaaggagttagggactctggctaacacctaggatggggtcgggtactctgagacaacctagcaacctagcagtgagagaacagacacaaactccctgaggccaatttagcaacatccatcaaaattacaaacgccataccctttgacccagtaattcctgttctgggaattcatttagctgatattcatacacatgttccaagagacacttaaacgcatattcactgcaacatcatttgtgatgctggcacacgggaaacaacttaagtacacaccccttggggactcattaaataataagatctacacagcagaatactacatggcagttagtaaacatcttggccacacatcagagtcacctggaaagtttctgaaaatccagacatgacacagaagaggccacactcagaccaattaaatcagatctctagagcaaggacccaagcattttattttattttatgttttatggaccaaacaatatgaacatcagcattttaacgtagcggagaatctcagggcaaaccacccaaaggcaaactaggttccactgctcaacaacatgagcctgggtcagtttcctaaactacaaaatgggaaggcaacagaacggcctcaaagagttgtgaggacagtgaaaaacctatgtgtacactaaggagaagctacctggcaacaggaagtattcagtcagtgtcagctgcttatctagtgcaagggttcacagcacattccagggatatgacaaaggcaacattcactgatgtgcttttgtctgtgcatgtgtactatatatagtagggaaaatatatacatacatataaaatattaaaattttgcaaaagatgatattgaacaacagtcatctttaggaagaacctgcttctattacatactctcctaactttcaaaaatgttaccctaaatccaactccaacttataggaaataggac

SEQ ID NO: 48628 - DNA, 724 bp, Homo sapiens
ggcttgtcctagaaggggttaatatgttagattgttccatgacaccctctttgtacactgtcactactctgcttccctgcccagggcaggaggaatggcctagttggacccagggccctgtcactgcccaatgcacaccaacagtgttggagcactctgttcctcatccaaaggacaaaaagataaccagtccaagcacaaaggacaaagacaacagtttctaggcagtaactgacattcttagtgctaccatattttccttcttctctgttaaagaattctgctcgtgatttttaaaaggaaaagcccaggactgacacagcctttcagagatttttgtcagcatcccagcacaagcaaaggcaaagtcaccatcccactgtctacagcaacacctgcaggtcaagagcctgaactgcaggtgctatgaaagttgacactgacggcccatgcccaggaaaccaacaccaaaccctaccgtgaggtcatccaagaggcaaaccctaacaggcagctcttgagaaatgcctgattagtgactacgtcataagatgctgcagactttgcgcccctctcttccacagtgctaatcatgtctgcaggcactggtcacccagtctagtattacataaacactgaggctcaaatggcactttttcactttttacaaagtctttactatgaacaattctttttttttttttttttttttttttagatggag

SEQ ID NO: 48629 - DNA, 1800 bp, Homo sapiens
gttttctattactttctgggttttctctctttaactgtgtcacaaggagagagaaaccattacttaaacacccgtatcaccctcacctgcggcaactaagagtgtaaactacattcagcaaaaggttgcttaccactacattcaaaagtgcccagtcaacttcactgaatgagtattgacagcgtttccaacatacaataaacttaacctggagggtacggaattaagctcaaatagaaattttaataagcactacattgacagtctttgacctgggaagtcacatttcaaacaagcgaccacacccattgatcaacacaatgcctccgtcatccccgccagctcaagtctttggtagttctggggcatgcacgtttctgttgctgtaaatgtccttccttctgtctggcctgcatggatttcgctccctgactagcggcccccagcaccgtgaggggtacgcgctggcgggtgctgagtagggctcttaacagtcggcttactacttctgaaacctcaggacgtccggagcgaacacctcagcggaataagctgacatccaatccgcgcttcaaattactgaagccattctcacaagctcaaccccaggacaccaggaaaaggaggaaacaggctgggagagcttggaggagcgggcgccaggagtcagggcaggccgggggcggcggctccccagaccgcaggcccgcccgcctcacctgcagcaccaaggcctgcgcggccccgggcgggaagcccatgcggtccgatgggtggcgcagcaagcgatagaagtctgtcttgcggtagaggaagccaaagagaacgcgcaggaaatcctggacgttgcccacgtgctgcaggatgcccaaaagggcctggtcatacagctcggccgcccctgtctccatgtcgcctcccgccctaggtacgcttcacacacacagcgccgcctcagacctgccgactggccacttccggcgtccgcagccaacggctccgccggacggcgcggctgcggaacttccggtccgtgctcgttcggcccccgcggccccgggctgttttccccagacccagctgccccacgggctttgccttgaggtggtcttagacaaaagagcccgacaagggcagcaaggaggttcctacgcggaaggaagcccgtggcttctgctgcgctgcgagggcttgaccgccatgtttgaagcgggcggaaaaaaattatggggcgtgcagtgtcacgtgactgctcggatttttgtcacgttgtctgtggatcctttcttatttctgtgttgaattccagcctgggtatttggaacctatggttaaagatggggctagggtaagctttttgttagtgagccagagacgggaaaatgcgtatatgtgggatgtatgggtttcttattaacagatctgtgagttaaactcagggcgttgcatcagaagaaagtcaagatgacgaagaaaataaagagtgcattcaacgtatattaagtggaaagagctagattcagaatagagaatccgtatgccatcgttgtgaaatatgtacgtgtatgtgtgtgtatagtatgtatatacatatatacgtcatatatacatatgttgttagtgtctgtcaaagtataatcttaaaaaagtaaaaagcatgacactcatacaaatatatcatgaacacatatccaagatttcttcagcaaattaacaatgatatggtaaagctggttcaaaagcattttgaggaagtggagattaaacattttgacaaagcattagagtaagattaggttg

SEQ ID NO: 48630 - DNA, 1118 bp, Homo sapiens
gtcggcactctcttccaatccagtggttctcaaagtgtggcctggggcccttaggcgtcctggagaccctttccagggtctgtaaggtcagaactgttttcataataacactaagatgctatttgccccttttaactctcatttgctctggagtatggagtactaaacgttcatcttgaggacctctgctctactccaacctcaaggagcctccactgccaaggccctgctgctgcccttggctcttggcccccttggcccagcagcgttgttggcatcttgttggcagcacaccagagtggacagaaccaaagaccgaaccccaatcaatagaagtgtgtgtggctgtggcctaccccaggacacccggcccaggtgcctgagaccagccacgacctctggcctgagggcaccttttccaatgcataccatggtacctcatgggttactgatggccctacggcccctggcacagaaacaagaagcaaaacatagcaaatataaatatgtactctgccaatcgggctcctctgtcagacttaaagcaagagtgtggcagggagctcccacatgtcaagaaatctgcagaaagacagagtggactcggggttgaagggccagcgatggccacgcacaaacctgcagccatgagcaggaactctgaccaaaggaaatggcggccggacgaggggcagagataatcatctgggcggccccaggccagagccgtaggaatagctacctctggtccttcaggaccagctgtatgcccggccaggttcccaggaggccatggcagcccagccccagccccagcccactcctcgcttgggccccaccatggactcacttggcacagtacagaaaatggtccttccagtcgacttgggaggtctgccccatcagtgtctggttggctgtgagcagcaggagcgtgcggttgttctggaaatactgcaggaggctgttgatgcagcagtcgtagagactggtattgtccggattgaggggggcgtagcagatgtcctgcagggagatgttgcgctgtgcttcgggcgaccatacctggaggtgccgcagcctctcctgcagctctagcagctccagcagcaagtcca

SEQ ID NO: 48631 - DNA, 5448 bp, Homo sapiens
gaagaactggccaaggagggtgtgggtggagaagctgagcttgtcagagaggctggtgcccttcttggggtccaccatcttgcttttgtccctggcgggggccacacggaatcccacaagcaggatggtgaccacagcgaagacagagcagaggatgatgatgaggaccagactgcccggcatctggcccaggtagaaggtggagtcgagggcctgggggcgggctatggcaggacaggatgcagcacagtcttggcaggagcaggtcgccacgtcgtcaccttgggactcattgcaacgtgcaaccccctcattcagaggctgaatcccactccccacggcctggccaggctccaagaggtggaaggtgatgtccagtggggccagaccattgcctgtgtctccctggaagttgagccagcgctgggcattgcaaagggcagagccatacacgccacacatggtgcccacagccagcgtggcagctgcagggacgcgcacacggctgcaggagtcatagctctgctcggcaaagctatgctggtagaaggcctcataggccaccacagctgggagttgtccagcccctagctgggccacgcgggtcacattgatgaagaggctctgattggggctgcacgtgttgtggcagtgcaggttcacaaaattgtcagagcaggctgggcagcgggtgaggagggccttggtgatcgacagactcgcttccagtgataccagctgcttggcggagcagcaggcttgggtgttggggccggtgtagaggcgggggcagatcttctgtaataggatcaggtgatcacctgtgatcttgcgggccggcgtgttggacaggcaggacacgttggagagtgtcatgaggcttccagacagctctgggttcttcccacattcgtcatagaaggcgcagtagccaggctggtggatggttgtgtaaggctcactctgggcctgcagagcacagcaacatcacgcgtgggccctgacacagctgggtgccatccaggcagcaggcagccagggagggtgtgagggtaagaaggacatggagcaggggcagggaagcggggagtgtggggagtaggaagcctcctggaggcatgtgccagccagccagtgttggagtgacaacactggcctttcttcctgggggtggcctgatagacctgcagcttaggaaagtcatgctggagaggccagagatgggtaaggaggcaaagctgactccaaggtcccgggctctgcccacgtcaaagtcagcctgagtccccacactgtacaccacatccagaggccagggtctctcatggagagtctgttcaggaggccccccgactcccaccaccactaccaccacctgcttgaggccaaaagctgtcacccacctcccagacacaaagtaagcgaggaacttaagaggtgccagcgctggatcttctcccagcctccagagtgctcagtcctccctaggtgatgctcaccaggtaaccccatcccagcacctccttgcctcagacctccctcaactgcaggcctggaccccacagtagggccagtgacaggagggacttggagcaccccagtccagcagcctctttcacccctgtgtgcattcaagcctgtaacctggaaaccctccacctgcacccctcctctgtggggcctggcatccctcatgtgtccagagacttgcccagcccgcaggccctgaggctcccttgctgtcacccagtaacgctcgcctggtacacggctggccccagggtccctaactggaggccgcaggggaggtggagccaagccctgggactcaccaagcgcaggagcagggcccacagcagccagcccctcaggccggcctccgccatcccaggtctgggaaggggtcagcggggagccaggccaggcctcaggaacagccaagggctgaacacacattaaggcagcctcctccccttcgatgacaaccctggcctgactgggttagggaccaatgaggctgagccctgctggttaatgatccaccactcccactgtttggccccagtccacaggcccccgctttagatgagcctcatcacgcaggtgctagggtctccactcacttcccaaagcgaccgaagccagagggctgagtcagctaggggagagaccacgctattagcccctaacactgctggagttggtgccagggcctggaggcacagatgggaccaggcactggctgggacccggcctcaggagctcagcatggccgaggaacctccgcaccctccctggctcagcctcagaccccagctctgccctaccccctcttgggaccagggccagcaatgggctcagaggaaccctctgcactgtcatccctagcaactgttgttaattaatattaacagcctgataacggaggggcaggcagggtggagtgacgcagtgacaaaagtcccctcctccaggaagcaaagggaaagaacagctcactctagggcctgacagttgacagagaccccagatagtggaagactctcctttgctcactttgctcttcatcccctcttccccccgaccttctccctcttgtcccttgcccaggcctgtcccaccggtcacccctagcaagggacagagcatggctgggagccttgagcagcagccctgctccacctgggcccaggggtgtggtacacactttctgctccctcctgataggaatcttcaaggcctaccttgggttctcactatcaccaggatgggccatgacctttacccccatttggtaatgggcccccattaccaaagctgagctgcagataagggcagcttgttgggaacatctcctgcgtggccacctactggagacagctgcaggaagggacctgtctctagtgttctgtggacccctgcctgattcacaggggagccacccagcctcatgcaggagaagacagaggctgagaggaagggggccaaggcagggtcaggctgacccctaagttctcaagacagccatagtggagaggaagacagtcagcagccaaggacctgcccctgtgagtgacagctccatccagcaccttcccagcactgctcccaagtccctggccggcagaggcggacaccccaccacccatgaagctgcctctctaggtcctctgttcccggtgttgtcatctagttcctccagaaacagatcctgaaacaaggatcccagtgcaaagagtttattggggagatgaccccagatgacagcagtcggtgaatggggaatgagccaggggatggaagaaagctgaccagaatgcatccaagagcttgctcctgcccccagggacctccgggaactggtggggacgtgcccaagaaggtcccctccaaggaataaggacacagacagctttccaccacattcatctgtcactggtagaggacattcctggaagatttcgccccagcacgtggcgggcaccttcagtgtcaaagggccttaggcagggccgtgggcacttgcgacaagaagacactgtcggcatgcacagagctgtgtcagaacaaagatatgaaaggcccaccctgcctttcatatgtttcttcccatgggggctgtctaggctaagcccctggagcccagctgtgcccagtctagcaccacagagagatagagtccagctatgtggtctcctggggtcatttgtgaaacacacgcagcataacagcggcacaatccggctcggaatgacagtgaaaatttcacacccgatctcccaacccagctgccggtgcctctggacacacgtgccgagctgtaaccatatgatatgtacatgcatcctgctttttctcttgacttttcacataaatcctccctgttgccttcaatctctgatcagcacgtccgtgactaggttatggtccacagaacgcgtggatcttctcctcttctggtgctgactgtcgagccggttcccaatagttcatttttgataaataagtttctggttgacttctttgcacctaacaatgtttcctccttctttgaatttatttccttaaaacaagttcccctagatgagatttgtgagtcagagtacaatgtttaccattcttttttttttttttttttttttgagacagagtctcactctgttgccaggctggagtgcagtggcgcaatctcggctcactgcaacttctgcctcttgggttcaaatgattctcctgcctcagcctcccgagtagctgggactacaggcatgtgccaccatgcctggttcatttttgtatttttagtagagacagggtttgaccatgttagccaggatggtctcgatctcctgatctcgtgatccgcctgcctcggcctcccaaagtgctgggattacaggcatgagccaccagccccggcccaatgtttacgactcttacgtggacagctcatttctttcctcaggctaatctaggatttattgggtaattatcagattctcagttattggaatttggtgaagggttgatgccagtcttgggtaatgaagactcggtgatttcccgagggccgtgactcttaccactgacatgggcaactcgcaaaggcaccatcttcccacagtctcaccttcatcgtgtattatgtttgtcattagaacttactaatttaatgactgccagataatacctcattttccactttctattggtattagtaagattgatattataagtttgatgttagaatcataagacaggtctgaaatgtggctactctgagaaggtcccgagaggggcccagagctgtgccagttcactgagggagcagccgggggtgaggcagccatcagcagagcagccctttgttgctggctccggggtgacacctggcagaggctgccccaggtgagtcatgtacagacaagccctggagacatgaggatcactcactgaaataagccaggcacagaaagacaaacttcatgtgttttcactcatttataggagctaaaaatgaaaacaaacgcatggcaatagacagtaggtagaacgatggttaccagaggctgggaagagtagtggggaggtagggggaagcggagatggttggtgggtacaaaaatataattagatagaatgaataagagctggtatttgatagcataacagggtaattacaatcagcagtacattttaaaataactaaaagggtgtaattaaaatgtttgtaacagagaagtgacaaatgcttgaggtgacggtcactccatttacaacctgatgtgattatgacacattgtatatctgtatcaaaatatctgatgtaccccataaatatataatctactgtgtactcataaaaattaaattaaaaaaaatcactcgctgacttgctgttctgcatcccaacagcattcaaagaatttggggatctgggctgagagg

SEQ ID NO: 48632 - DNA, 1003 bp, Homo sapiens
aagaaagaaagaaagaaagaaaagaagaaagaagaggaaagaaaaaagcaaaagaaaaaaggaaaggaaggaaggaaagaaggaaggaagggagggaggagagagagagaaagaaagaaagaaagaaagaaagaaaaagaaaggaaagaaagaaagaagaaagaaaaggaaagaaagagagagaaaagaaaagagaaaagaaaggaggaagggaaaggaaggggagaggagaaaagggaagggaagggaaacttagctgggcatggtggtgcattcctgtagtcccagccactcgagaaacagaaacaagaagatcacctgagcccaggagttcaaggctgcagtgagccatgatcatgtcactgcacaccagcctagacgacagagtgagatccaactcaaacaaaaataaaacggctatgtatacaggaaattgagaatgccgcatgcatgtacaaggcaaaacacatgttcagaaaagccctgaaacttttgtcgcaggctgatcctaggctcagaacaagcctagctaagtgttaaaagagtcccaaccccaatttgcaaaagataggagaggtatgcttgtgtgtgtacgtgtgtgtgtgtgtgtgtgtgtgtgtgtgtgtgttggtgttgttttttagctcctggcattcaaggaaatctctgtcaaaacactggctaaacacaagctgaagaaacagacactttggtgaccacaaaaaaacaatgaatagtctttgcaaaaatagcttgggaaagtataaaaacaaacattactacagtcttcagaaattaaaaaaaaatgctgaggaagagagagaatctgatttccagacttatcacattataatagtcaaatgtccagttttcaacagcaacagcaaaatcacaagtcagacaaatgggaaaagatggcctattcaaaggaaaaaaaaaaaaaagttgacaaaaactgtgtccaaggcagcccaacattacacttattagacaaaaaacttta

SEQ ID NO: 48633 - DNA, 1025 bp, Homo sapiens
attgaggcgagccacagcaggatgctgcgtggtggaggcaacccttggggtgttcgtcggaagacccccttgatgtgccttgttctttagcccactgttgccacagataccctcagtgcattctacgccaaacctactgcatctcagcaggtttgcggataggctggagggataacaagacactggatgcattgagttctgaaagcatttcaggataaataaactaaatactgtgcatttgcccagtgtcatgcctggcacagagcaggtctgcttggccaaggcaccttcctctctgcaatgatgaaccactccttcccttccttacccttgtaaacatggctgtgaggaatggaagagcagcaactcacagcctgttccacaaggcaggagtcttacataatgatgttcctggggaaaaggatgacagctgacggggcaccttccctgctcaaattcaactttatcaccattgcctcttggggccccgcccctgaagtccaaagtctcacaactaattcccccaaagctgagtcattcatccttagcagatgcaggcagagaatccgctgggctgggaatgcaccctgagccttttgtgctccaggtccagaggtttctgggcacaccactgtcctcccatctgctatcaccagctatatcatcagaatgctgttggccgggtgtggtggctcacgcctgtaatcccagaactttgggaggccgaggcgggtggattacccgaggtcaggagttcatcctggccaacatggtgaaatcccatctccacaaagatacaaaaattagccaggcatgatggtgggtgcctgtaatcccagctactcaggaggctgaggcgggagaatcgcttgaacccaggaggcggaggttgtactgggccgagatggcgccactgcactctagcctgggtgacagaacaagactccatctcaaaaaaaaaaaaaaaaaaaagaaagaaaaaaaaaaagaatgcccttgttttcaaaaaccctccatcttctgta

SEQ ID NO: 48634 - DNA, 627 bp, Homo sapiens
accatctctgctccttgcctcatagactgtgccttgtccatctgattccagaccatagcacagtccacacagccaggcacccattcaggtatacatgtgggcaaaactgtgccagcccagagtggagaggccactgcattctcctgaccttcctgcttcagcccagggcgtcaccagcctgaaaaccatccaagcttctctgctgtttagtgaagccttaggcttccacgcagcatgtgccacacctccttcctcccttccaggcccacatgccctctgtgctgtttggccctggacagccctaggttcatttgcccatagcacacataccctcatccaaggcctgccccagtcctgatttgcacatttgtgcaaagggcacaggctttggccagactaagtccaagaggccaaccctgagtgcctgtttgttcacacgtaaatgggcacatggtacctgcctcccaggtggggtgttgaacgagccatttatacttactttctctctgtagtctcaggacacgaagatggaccttcctgttctttattttttaaagatagagtctcacggccaggcatggtggctcacgcctgtaatcccagcactttgggaggccgaggtgggtg

SEQ ID NO: 48635 - DNA, 1990 bp, Homo sapiens
ggtggacaagacatcagtatcaggcagaatgtagcagctgggatctcaccctggatttgctctcttttttgccacacacaaacccaaccccacaacactgtgtagcttcattcaggtacagctttgctgcttttacccacctctgagagactgagtcttcagcagctgagacattggccactcggacatcccgagcacagtaggtagccagctgctgaatcatggactgtgcttgccgtgccagctccttggtaggaacaagaacaaggcctctcactgcctgttctaccaccggacctgtctgtaagaatatgaattaaagactttagccagcagtgcacatcactgtgtccacgtgtctctaccccttccagcctacctgacccatctgctgcaacactacttagcagtactttgatcatctatcactctgcccgcctcagaatgcagagtggagagttctttccccaggcactgaccctcaaaaagaataacgtactctgatgtttatgaagctactttaaatatactagttatgaagctaaattctcacaataattctgtaagtagaaaagatagatgtgctccctttttatgtaagaaagaaaagaaagtgctttgtcgaagattacgcaaaggttggtggtagcagggccggacaaggatccaggtaacctgaactccagcccagagtgtttgccacaacagcaccaggttctcaggccggcctgcacgggtacagggccaagagaaaacctcagacaaacgggaaccgcccttcccaggcttttggagcttgcctccttcctcccctcagctctctcgttacccaccgccttcctatggagcaacagctgcagcatcggaatagcataagcggccgtcttcccggagcccgtgcgggcccgagccaggaggtccttcccttctagggccagtgggatggccttctcctggatcagcgtaggtcgcgaccagcccagatcggtgacagcctaggagaccaggagtgcggtttaagcggcgtgaagagcgatggcgcgccccgcagagcccgtaagccggctccccagccctcgcgtgtacctgaaggagccggggatcgaggcccatgtgttcgaagcccagtgcttcagagtcctccatggcgctgctcagtagcgcagcacgcacgcgctgcaggaaaaacgccaccgacgcgagcgggagcaaagcaacaaccaatcggcttcggagacgaagtcacttcccggaagtgctggcggcctaggcttccggtactcggacggagctctgcgactgcgcagtccctaggactgggtctagtaggaggcggtggagcggccgtgctggggtcgacggggtactttggactacagagccgctccactggctcttccggcgttcccggacgccgctgacgcacctgattctcgcgacctgcaggagaagcctcggccggggcgagggccgaggtcgtgacgggcatgaccgtctctctgcttggttagggttagtgtcccgccgggcacatcaccctatgaatggagccactgagatagactgggctgaggagaaccggttggaataatgagccatggcagcaactgcctgagagagaggaccggcgggttgctgtagggctccctaaccggactgcctgtcagaaacctgcacagcttggtttctgttctttgtgtcccaaatctgactcgggtcaccagttaagacccgtgtcagacttctgacctacagacttgcgtcgttttaagccagtaaatttgtggtaatttgttacagtagcaataggaaaataatacaggtgaggactaagaatcctaatcacaaatctttttttttttttgagacatggtctgactgtcacccaggctggcgcgatctcaggctcaagtggtcctcccacctcagtctcctggaaagctaagactacaggcacgcaccaccacgtccagttagcgtgtatgtatgt

SEQ ID NO: 48636 - DNA, 2109 bp, Homo sapiens
cttttgcagcaatctcagggtagttgttggcatgctccccaacctggatgtcgagatgcacccgctacaaggaaacatggaatgtatgagtggtggggcctccagttgtctgttccagggtatggaacccactattgtccctggctgtggagcagaaggcaacatctgtctccccaattctgactgtgctacaaagtttcacaatcttgataaatcaaaatttggaaacaagtgagagattctaagctgaagccaaagagaaaatcctcttaccagtttgccaccagcgaagagagccatcctggtagaattggagtgcagacagatttgatggtcaccgggcgtgtgggaggtgaacgtgaagcggccctccgagccgtactgccgggacagcaccacctgcaacatatgtgagtgaaggccccacctttataccgcaggctctccaagtgcaagttcctgtcccttgaggcctcctccaggcagtgctttacaccccacgggagctccactgaagaacggctgcgtgggccaacgccagccttaccttgccgtcggggtccttcacttccacgtgcatgcccaggccaggggtcgagggcaggaagacctccttctgcttatcccacatctgggtacgatagttgcctgcggggcagacacatagtcacgaccggccctagtgggccgcctctccgcccggccccctccgacgtgcggcccggagctctaggcagggggcctggcgtcctcggggcaccctcaggctaggtactgggggagccagcgacccggctgggctcgggaggagggagcgccgccgagggctgagctgggtacaaagggcctccccaccctcagcccgcctgaccgatgaccatggtctcgtcggggatttcctcgatgaaacagcgcttctcggtctcgccgatgtggaagtagagcccctgggcgcctgtggcgcacagcgcgagaagcagcagggcctgccgccccatcgcccgcagaggcccagccccgacacctgccatcgcgcctcagcccctaagcgcctgcgcacatttgcgcatcgctctgcgcctgcgcgccaccctagcgaccctgagagttaggggaagaggacgcctgcgcagtgatatgtactcgccgtctcctgcaactccatccgtaccgaacactgccgcgccccgccccctcacacagcccggcgcccgcctacccccgcaacgagagtagagggcgcatgcgcaatgacgttcgcccttaatttctcgccccttaccccgcagcttacctccggcatctcgcaggggaggcacgcctgcgcagtcacgcccgccctcggccccagtcagcgatttgggtctcggagcaccaaggagacggtggacggaatctgaccaggcttggtggctacgatggcctgaagcgtgccttttgggttctcagctcgggctcacaagtgttttctgtgctaaatacaaaaagccctgtgatgttttgctttgcgtgtccacctatctgactcgtaagaaccgaggctgaatccagacccacactctgtcacgtcgggagagcctgccgcggcgagcctctgcgagcgggcatttcttgggtggggaccaaaagcccagtgctgccatagtttcggatcattcttttaagaagctggggccgggcgcggtggctggcacctgtaatcccagcactctgggaggctgaggcgggcggatcccttgagcccaggagttcgggaccagcctgggcaacatggtgaaacccccgtctctacaaaaaattaaccggtgtggtggtgtgcgcatgtagtcccagctacttgggaggctgaggcaggagaatcgcttgaacccaggaggtcgaggatgcattaagcagtgatcgcgctccagcctgggcgaccgagggtgataccttgtcttaaaaaaaaggtgggagagtggaacgaaaacttggaataagtagggtcatggagcttgtttacatcccctagttacagcacatccttttgaaagtgaaaaacaaactggaatgttacttagtgggcatggaatcgaagcaacggaaggttaaaactgtttttatcaaggc

SEQ ID NO: 48637 - DNA, 1718 bp, Homo sapiens
ataagcacttatacgccccctttttttgtttgttttttgagacggattttcgctcttgttgcccaggctggagtgcaatggcacgatctcggcacaccgcaacctccgtctcccgggttctagcgactctcctgcctcagcctcccgagtagctgggatcgccaccacgcccagctaatttttgtatttttagtagagacggggtttccccatgttggtcaagctggtctcgaactcctgacctcaagtgatccgcccgcttcggcctcccaaagtactgggattacaggcgtgagccaccgcgcccggcctttccccaaattttaatactttaaaatagggaacatcttacaatcaacaggttgtgacaggttaattagccacgttttatctttgataggtagctctaaagtcaagaaaacccaggcaagatcccgggcaagatcccagcactgccaactgtcatttgtagaccggggataggaacacctgtctcacagattgttacacaatagcgccggtgaagcgcttgtcacaaagcctgacccaggacaatctcaaaaacggagattctgttattcaaattgtttatttttgtgcgctaagtttcacatcaacccaactatctcttgataggttcctaccaggcgctagagatatcttactttcagaaattatttatgatagcagaagccgctggaagtccatagacaacctcatctctctagcggagcaaacagctgggctccagctggccctggcttctgcaactgcgcagtcggcgctgtgacgcccggcgcggctctgtgacgtcacgaatcggtcctctgtaagaggggagggcattcttctccaggggagggctacgtgttgacgccatacgccggggcggggccgagagtttggagccccggagtggggtgtcggcgcctcattcgggtggagctgagccggagacaggtaaccgtgcgctgtcgccgcgcccgtcccagtgccgggtgtcgcggcgcttggcggcccggggttggagatcgcggtaaagggggaggccgccgcgcccttggtgctgcgggcgccgcggtgacaggggagtggagctggatggagtggggctcacggagggtggtaggagggacgggacctgatggatggccgtggcagccaatggagccgcggggcctgcccggcgggcggagattggcgggtacgggcgggctccgaggtcgcgcggggcgcggagcgacgcgccattggcggtgggcgagcggggggcgggcgcggcggcggatgtgagggagagggcggtgcgtccgcaggggtgacccccaaggtcgccgcgggcgtcacgtggttaggccgctctccgacggcgtccttcccgaccgggacgcactctccttcccgcctgtgaggaccgcgtcgctttgtccgaaagacagtgtggcctgctcgagttgcgtcggagcatctggctttggggtggccctgggtgggactgcctgtttggattaccgcgcagaccttggcgccgcccccacacctgctgccagaagttgggtcgaacagattgaccgagatgaagcttatttctcgtagaaacatctttcaagcaccattttccctcgaaaatatatcagacattggatatgagttgtaatctactgagatttaatagaaaacttgccgcgccctcgccctgacctgggtgcgtcccacct

SEQ ID NO: 48638 - DNA, 931 bp, Homo sapiens
tcagtggaaaaacttggagtgtagttggaggtaggaagaactaccgaattaacttaaaacttttgatttctaaagtgaaaacccaggggtaaagattgcattccctaattatatccagaatatattgcttgtttacctttaatttgtaaggagcaagtttttgtttgttgttcagtttgtttttaaagaatatgttctgctgtttacttttgctgacctatctcttctcagtggagcaggccagaggtgaatgcaggacactctaagccctctctcttggtgtcccttaagtgtattctgagcatatttgggccaagaggaagtttctgataaataatatagaagatatttttatgtaacagttatttctgggtaattcacactatgtttcagagcttggattttcttcgggtaggtgtggacatggagtgtagttctaactttacaaccagagcacctgctttgagacaaattcatgagcaaccatgtaggccagcaagcacctttttttccacaggcagcgtccttgtgaactttccgcttggatcctgactctgctgttagtagcctatgaccttggatgaaatgtaagggaatagaaactgaagctatctgtaaagtgaaagagctggtgcctgccttattgggagcctctgggtttatgtatgagtcagatgcgtagagttgctcaccatggagggcccagggtaggcaggcattattgaacaactgctccatgtgctcttttcaatctttgcagaccccacccacgtctcccttgctcagacctggctccccatggcttatgaaagggggctgagtgcagaaggtggcaggcaggacactggacaaccctctgtggcttttccttacccttcgtagtaccatgagattctggctcttcccgtctctgtgtttctgcctatgggtc

SEQ ID NO: 48639 - DNA, 1535 bp, Homo sapiens
gttctctggctcccctccccatccaagactcccttggagggaggtttgaggactttgggattctcatatctcttcgcgtccatgattggatcgtgaggtgaggagatagcctttagaaccctctctttgagtggtcagtcacgtggtattccctctgaaaccctggagcagatgctttgtgtagctgggctggggttcccccaaatagggttgcataattattgaggacagatgaggcctcaaccagacgaccacaggtgaccccagactgtgggtcttcctcacctccttgagagttgcaattctgagagctgataaaatgtgccattgtgtgcagatctgggtagtttgaagcgttctcatttcctgaggtgtgtcagaaagactgcgtgagaaaggggtcacagtatcttggatgtcatcttttcatgcagtaaaaagtctggtttccatgaatgtttgtataacaaaccacctcaaaacttggcaccagtgtagcatgtctcatgactctgtgggttggctaggtttccccactcctcccactgccagctcccttggagctgaggctcacaccaggctagaagccatgaaggcctctgatgtgtctggcagtttgtgctggctgttcactgggccctgccatcctccagtaggccggagcgattcctgcacaaagtcccagagtagctccagacagggaaaagaaaggctgtggggcctttgaggcctaggtccagaccgtacactgctactccccacgccattaccttggttagagcaagtcacagacaacccttagggacatccgtttggggagaggaaaaggcatggccactggacagccctccacagctcttttcataatgacctgatagagcagccacctttagtctagtgcagaatcccagcaaatatcattctgatatcagtagattccatagggcagagctgaagcagctgttctttgctaatcttggaagtttattgatgttttatttacacacctgtacagacagaagataatagagattgtttagaaatattctgtcacctataatgactaagcattgctataatggagcatgtggtttccttaattgaagaatacctaaatagaagcccattcttaactggcctcagtataaacagcttgtagtggcaggtcaccaggcctggatcacagtgccctaccttgtttttgcttcataggcagaatggtggtaagtggtactctggcctgggcaaggtctgagcaaggcctgcattgatggagggtccagagtccagctctaccatctgcacattttctttggagacttgtgcttagcccaacagcatgaatcatttgctgaaggctctggaggtgggcattccatccacaagtctccccaatagggagtaccctgtttggacatacagggtagtcacacatatgggttttaaatcttgttcttaggatattttcaggaaaagctctggcccacacgtttaggaccatttcctgggcagcattggaaggagtggtagaggtc

SEQ ID NO: 48640 - DNA, 2275 bp, Homo sapiens
gtgtgtaactgtatatttgaggcaaggcaaggggacagatattttccttacgttattagttgtgcaacagaagccaattaagagattggagagatgaataacactagtgatgggttgcaacttgggtgtggagctgggcacacccacgtacgtcattgtgactcagaagtccctgtcaccgccctgagccaagtactaaagtaaggcccaaataccacacttacttcataaagaaaccaaagtctgactgcctccatttctcatgagtgaaaaactgtttctattataggaaacttaggtcttcagtgtgtttgatggtagcatgctattagattgtgtattctcaagtctgattttccccattactgtgctttctccttttcacttctgctttgtcacttggaatgtttctagaagtagaagtcactgcccctgcctacatcagactgcaattccgggacatccaggcaacagcaagggataattaggaataaatttggctggaagaaagggaaaatgcagcttaggcagcctaaaccaacaggcttatttttctcactcagtaagagagctgaggtcgcctgactcagctcaggttctcagtgagccatcagccaccaggtgccacctttcagtgagtgggcttctatcccttccaggtgtctcttcatgctccatgggaattagatgggacatgctttgactctctcttccagaagctttctcttctttttgaaggggcttctgtttgcgctgggtggtcaatgactcagcctagtcttgatttatcccccaggatggggacagacagcaggggagagatctcaggttgagatgagtgtacagtaagggctgggagtatcagaaggggaaacgctctcccagatagtgacaaagctaagcgaccatgtgaagggagaggacaaacatcccatggaaagaagggtagctgccaggcctgcgggaaggaaggagcatgatgctggggcatgggagcaagtggacagggagggctctgcaggtcccctggaacctaaagccaggggttatggaaggcagatccagattcaggtgttcagaggatgaggcaggggtgggtagtttaaggagctggagaagaggtatctccttggggagtggaagatgttagagagatacagggttgcaggacaacagggaggtggaaagagagtgggggatggactgtggcatctgggccccaccaggaaggaagtggccccattggtgactcatacagggaggggtggggccagtgggtgcctgggagctctggtacttgggcaggtctggcttcctgctgccacatctgttgggaggtgaagcctgcaggccaaataatgaccttcattttcaaagcctttttgaataaataaacttttttgaggtttaacttacatatattaaaattcacttgttttaagtgtttagtgcagtaggttttgccaaatgtgtgcagtcactacactcgatacaaaacattctatcactcaattcaaaaaccttttagtatacctccaggtcttggcgcaaagagggcttgctgttgttgggtgtgggggctcacccagtcctggagacagaatgggctctttgtctgaaggtggggcagggtgctcccccagtggtgtgggaactgagccaactggagagtgaagtgggatgcatggtgtaagatgaataagggaaaggctgcagaagttgcattcccagcattttccttcccggggattcccagcagctcagcagtaccggtatgaaccagtttttttctgactgcctccagcatgagctgaatttccgtctgtgcagttatcctcagccaattgaaaatcacctggagttgtattccaagcacaaaagaaggtcagagagtggaggcccgatgatcatgatcgccctgtctccagggcctaggctggaaggagtcctgcagcctttgtggctcaggaccagagagctgaccttgaccctgaccttgtgatcccaggcatcagtggctggaaattcctttcattttattgttgagcccagaagcgcccagctctctttggcaaggttaagctagggtaagaggcactgttactagagtgaccagagttctttaagcgtcgctctgctattactcagttaaccttattaataccctgcctggtgactgctgtgtgtaaattctgcctgagcccacatctctccagtgggaatatgattgacattccaggtgctctaagtaagttggaaaagcccacagagagcc

SEQ ID NO: 48641 - DNA, 1861 bp, Homo sapiens
gaaccaattattactttaccaggctctataattttaaatactgtaaatctactactgtcatgcttacagtgttagaggaagggaaactgtcatcataggtaatggagcctgggctggggaagtgattcccgcatcgatcaatgctcactgtaaagaacgagtatgacccacagggacgcagaggtcattccatggcttcaagctcatgggccaggacagtgccacagaaacttcaactagatgcaaagaggccttagctctggggaacctgcagcccccgcaggcagtaacaacactgggtgtctgggatggcctgggctaaggtgagatcggcatggggagatcagcattgtgatgaccagtgcctctggtatttgcaccctccttggctaggacactcgcccaggcatttgggctgagtagtggaatgagattaccgaaaactttgggtgattcccacattcatagattgtggacagaaatccactctagcagtactcacctcataatgctggaaatttcccaaaaaggaatgaaatcattagagtaaaagcaatagagtatattttaaactgctacagatggtcacactgattggtcccttcatgagatgccaggacaggagaggctggttagtccctgatttgctcataagtctgcatgcagctgagtccgaactgtcagtccctttgttttccagtctacacaaaccttgttgtcacaagtttgcccttgccccaatgtggatagctgccaggccctctttctgagcctcctcgtcaccttgcctcaagccctcacatgtccccagcagggtcagtgtggggtcattgcaggctcagccatctgcctgttcttcttactcctcttgacacccataggacatgatttgatttctattaaatccagaaactcagggagctggagtgtgtgttatgtaactctcagcatttttcgtgaagaattacatactttctgtaagtgcagctgaggtcatcccataacctcatgcatgattgtgaaacagacctgatttggctcagtgctaatatggcctttgggatctttgttcatgaaagcatttcctcagtgcagcaatgcaacctgctgcaaagggagaacccgctcctgccagaggtatggctcaggctgccagacacaaggagattccccatgtgtcctggctgtgatttcagcagacagttaccacagtgcagtatggcatggtagtcgcagtacaacatcaccaggatgatcaagagcaaataccatgacaagaggaagactgactacaggtgccctgtcagcagaagacagactggacagaaaagtatctgcgggaagaaacaacacactatcgggatcaggaaagcatgaaatgtcagtgactcaaaaccaatggcttttacactcaggcagcctgggcatcgtagcaaagctgcacacctccaagggggccccgtaagcaaaccagatccttacgtccacatgctgctatcctagtgagcacctgccacatccaccaaaaggcaggacacctgcagttctgtttttaaaaattctaggttttgtccctgacacacaaatcatgggtcttaaccaaggatgactcagcacagcgctgaggaccagggtaatcacaagaactcagggaggtgcaggtcagtaggcccgtaggctgaggacacagcaggagagggtgtgttgtatatcaccttggctagccacagcgtccaggttttttttgctaaacacccatctagatggcattttgtaaagataagattaacgtttaaaccagtagattttgagtaaagtagaagaccttgcacaatgtgagtgggtttcatccagtcagttc

SEQ ID NO: 48642 - DNA, 2356 bp, Homo sapiens
gaaagaaagaaagaaagaaagaaagaaagaaagaaagaaattctgacacatgccacaacatggatggaagtgaggacactgtgctaactaaagtaagactgtcacaaaaagacatataatgtatgattccacttatacgatgtccttagagtagtctaatttagagacgaatagtgaatgccaaaggctaggaggaggaaagaatggggagctagtgtttactgggtatggagtttccatttgagaagatgaaaaagtcctggagacggttggtggttgcacaagaatgtgaatgtacttggtgccacagaactacacttggaaacagttaagatggtaagttttacgttatgtgtattttaccacaattaagaaaaattaattatgggtagttgagagaatgtggtcttcctcaacttacggtaggaaaagtcaagaataacttaaaggctgataatagcatttcaaagatcgaaactgatcagagaggctattccatcaggctagactagctcaatagtgactttttccagaaggagaaccactgggaagagagaactgagcagtgaggacagcgaacttgttaagtttagttttctgctttaacgaggggcttccggagtcctttaataagatcccctcccaaaagtggcaccctgggtctctctgtctcccagtcgtgtccccgcccgccgggccagagcaatggactcccaggaagcagggggggcgcgggcggggcgcgggcggggcgggtgggggaagggcaaggactcactcttcctttcctcctccgccggggcccgccccgagccctggccccaccccggctctctggatccgcctcctcctcccgaccccgccccggcaccttggccccgccttccactcggccccgccccggcgtcctggccccgcctccgccgcccggccccgccccgctcccggcggactgcgagcaggaagagcgcagtggctctgccgacgccgcgttcagaaaggtgtggagggggctgggggcgcaggtcgcgatcaggctgcgtctcctgcccgcccagccacctgcggccctggccccaccctgccgctttgggccgctcgggctcgcggccgcccccgccccgagcgccggctcggggctctgctgctctggcctgggaggcggggccggctgcgcggcgtcatgcatatgcatgagcggcgcggcggcggctccattgtgccctcggagcgggcggcggcgcgatggcgcgggtggcggcggccccggggcggcgggcggcgcggagggcgggctgagcgcatggagcggcgcgggccgggggccgccacggcgaggggccgggccaggccgggcggaggtgagcggggtcctgggggtggcccctggcaacgccgccagcaggcaggtgtgggccggcgggggcaggcaggtgcggcaggtgcgggccggcaggtgcgggcgggcaggcaggtgtagctggtcgcccggggcgccccggttccgctgcggcgccacggtagggttcacagctgggctggggctagaggctctgccgcccacctgccggcacctgccacgcgtgcgtcgtggtcttgggcaggctcggccccgtgggcgtcagggtcatccagccctcccctgagtctttgttggaggctggccgaggggtgtaagcggcgctcggggttctcctgagcgatgaaggctggccgggccttcgctccaacctgatcgttcctagctttggggccaggcagtctcacctacatggtacgcccctccgctcctacttacgtgcccaccagcacggcgatgtgggggccgtctgaggccgtcacctgctcgcggaggagctgttccgctcctgggctgaacgacgctgagcggccagcccccagctgccagttttgatggggacacccctttccaaactggacatactgaagctcaggcgtgaggatgccctgctcccctgaggtgccttgtcttccctagtgccaggtgtccttcaccgcggcacccccacccggtgccttgtttacccctccacctaccgtgtctctcctcccattccctggaccctctgccctgcagtgttctgcctctccttctccctagggtaccctctttccagtattacagaacatccatggtggtgtctttaatttgtgtcatcgcagatttcacagggacacacacggaacatgtgacttggtctgagaccgtggtgattacggataggatggacacagactcaccaccaagttctggcaagctagaaccagagggcatcccttgatgcttagtgtggaaacaggagaagtgaaggaatcttaacttccagaggtactg

SEQ ID NO: 48643 - DNA, 878 bp, Homo sapiens
gatggaggaggggctggtgcttttagaggctttcatgggtgaaacctccaacagcatcatcaaagatacgagcctgctgggaggagtcactgcatggactggggttgtgcagctcagcgcagagagctcgtatagggtggccttatgcagggtcatctcatgcagtcaccttgtgcagagtcacttcacacagggtcaccacatgcacaggatcacctcgtattttcacctcacacaagggtcagtcacacagggtcaccttgtactgtcacctcacatagggtcagctcacacagagttaccttgttcagttgcctcacacaggattgcctcatgcagggtcacagctgacagggctgagaaatgacagggcctgtgcccaggacagggttgtgcaaggtctctgagctgtgtccctttttttccccacagcaagacagctttgctggagggcctggaggtggaccagtacatgctgggcatcctgatttacattcagaagtaagcatcctcttcctgtgatccctgcatctgtggccactggagggcagccccaggacatgtcgggggatgtcccttgccaagtgcagccttccagcctttttccggcatggagcaggctggattccaggccagagacagcgtgtgtgtcctacctgagtgttggtgctgggcccagcgtcctgctcgatgtggaaggtgctgggtggaagcaagcatttgagtgggggaacctgcctggaaacagcccagggctgggaggggcagtgggtgccgggccagcagcaggccaggaggtaaccattccccacctgtccctgcccagctctgactatgaggagatcaccatcgaccccacgtgcagctggaagccagtg

SEQ ID NO: 48644 - DNA, 624 bp, Homo sapiens
ctgggacaagcaaaaggctgcaaacaacccagaagcccatcctcagaagactggagaaatgattgaggaatgcatgggcaccgtggccctgtgctccatcacaaacacctctcagaaacaacgtgggatgaaaaagcaagacagttcatacagtatgatgccatttttataaagctcaaaaccaaatatgtgtggaattcatacccaggtgctaaagtcatcagggagggcagggagtcagtacaacacagtgctcacccgtggggaggggacggagctgtgcttagggaagagcagagatgctggaggttttgaacctcagggtcagtggtggcttcgtgggtttcactttgtcgtactttctgtttcacacattttcttgtgaatgtgccaagtattacataaaaaccaaaaggctgaccagacttaacagtgctccacccaatagcagcagaacacacgtttctaagtgcacagggaacgttctccaggacagaccacacgttagtgcacaaagcaagtctcagtaaattagagatcggaatcctgcaaaccaccttctccaatcacaatggaataaaaccagaaatccataccagaaggaaaatgaaaattcacacatac

SEQ ID NO: 48645 - DNA, 2793 bp, Homo sapiens
gatcaccgcccactacagcctcgacctccgggctcaagcaatcctccccgcccagcctcctgagtagcgagcgcctcgacgcccagctaatttttatttttatttatttttttgtagagacggcgtctctctaagatgcccaggctggtggccggtgtcgaactcctaagatgaagcgatcctccccggccttggcctccgcgcctcctaaagcgccaggtatgagccaccgcgcctggcctacaagtgcattttaattaaagtattattaatgtctttgcctgaagaaattcgcttttaaattgtgacttatctttcacccaaaaatcaaagcacaattcagccccgaggcgggggcggtaggagctgggcggggcgggggcagggaaagaccaggagcagagattcaaaaagagtaagagggcaaaatgtgcataatgcatcttcacaggtaagagcctggccaggctcctgttttaatggcttcctcctgaagaagattcaagcagagtgtaagatattttcggaaagtagagcattttgaaagcatttcataatctctcaaaaccggagactgctcctgtcccacctcgttagagaaaacagcgatgctcaaaggcaacctccttcctgacattgcctggtaggacgcgacgtggtgtttgcccgcgcggaatgcggacgcaaggctgctcctaggtctcggggacgcgccatccccatttccgctcgcggaggcgtagggtccgggcgcgggaccccagtcgaccttgactggcggcgcgaccttgaggcctgcgttcgcctcagttgccccctctgtgcaatggggagacgcgcctcatcgcttgacaacggccgaagagccgccgcgcttccgtctcccgcgtgcgcgcgccatgctgcccacccccgttccgcactgaccctcccccgtgccccgcgtcccgtactgccgccccgccccgagtcccatgccgcagccaccgcgacggagcccgcaggcgggaacctgcctccgcgcgttagcgcgcacgcgcgcctcatgtgtcgtccccatcagcgccggcttccgtctataggccagatgcactgtcactctggcgaagtcgcagacccgattggccgggacggaggcgcgagaccgggttgcgggcggggccgaacgtggtataaaaggggcgggaggccaggctcgtgccgttttgcagacgccaccgccgaggaaaaccgtgtactattagccatggtcaaccccaccgtgttcttcgacattgccgtcgacggcgagcccttgggccgcgtctcctttgaggtcgggcgggcggcggcgtgcgggaatggggcccagaaagtgggccggggtcggggtgggtggtagcgccccaaaggcccgggcgcggggcgaccctgcttgaggggcgagcgcgggcgggctgcggcgccatttcctgacgaggggccattttgggaggtccgcgagtcgcggggaggaggccgggacggcggcggacaaaggcaggcggggcggctgcgaggccgttgggggagggggcccgcgtccgcccgcccgcctcatgtggccgcgccctgtcctgtccgacgcacgtgctcggcggccgcgctcaggtccgcgccttgagagtcgttgggctccgccctagcttggcctgggcgccgcagaccggagccagaagcacgctcgcgggggcttgcgaccgccttcctgggaagctgtcccctggcaggcatgggtgctttacatcctgagctgggaagctgtttgcttgagggtttttctcaaggatcgaggcgcggtgtgagcccgtccatgctcggtcctgtagatcccgggaggccatgttataaaaggagacttgctgggatgtgacgggttgccacttgaaatatcttccatttggataaagtaggaatatttatacatgtgccccaaacgtccctccgtgtcccccacccccaagcggaaatgtgaaaatgggccttgcctttgctggtgcccaaggaccgccttccactgcagtgacggcgctggcgggggaggcgctcttgagcccctcccgattgtccctctgcctagcaagcaagttgcgactggccacaaggcaggcctcttccgaccaaggtggattaccagtgattacctaattagttttgagagcgttaaatgagttcttaaagatcagttgtaattatagcatagtatctaaacttggcgcgtgtcttcaaagttaaatattgagtacgattccgttccagttaacatggatagaccttagggagtagcgaaataggatgttagtggttttattcctttaaatcacatctcaaaaggccaccaatggctagtttgggatcttattccgaaaatagattgatcctcatgcagtcttcgtgaggacagagcgatttccttgttgcctaccctgtccatagtgcctggcacataggcactgaaacactgcatgttaatccacaccccaccccacctatgagtgtagtcaaagctggtaagtgacaagggctttcgtggaaacttggcctgacctaatgttgggcatcaggttacccaaagagcttcagggaaatgagaaaggacttgcaggtcttgatgagaatggaggggtaactgccaatgagggctttggctttagcgaaagtctgaaagggaagccataggaacttaaacgtaccgactataaagctctgagaaaagctgatgttttagaaagaccatacattctaggtacaaatacctaaaaactaaaaaataag

SEQ ID NO: 48646 - DNA, 666 bp, Homo sapiens
ttgggttacaggtgtgagccaccatgcccaaccactgggaagataattatgtgccaaagtagacaatttcctccctcaacagaccttttgaaaggaaggccgggccaggcatggtggctcatgcctgtaatcccagcactttgggaggccaaggcgggtggatcacctgaggtcaggagttagcaaccagcctgaccaacgtggtgaaactacgtctctactaaaaatacaaaaaattagcctgtaatcccagctactgcggacgtggacattgcagtgagccgagaccgcaccattgcactccagcctgggcaaaagagcaaaatgctgtctcaaaaaaaaaagaaaaaggaaagtgagtcagatgccaagctggtattgcggcatcagcttgtgtagtaagatttgacctggtcagaaaggtctcaaatggctaccctgagaaagaagtggagcttggaagaaaggtaaccaggaaaacccatcatttttctgctggttggaggctctcatggaaacccttaggaaacttacaagctgagaggcgggagtttgcctagaccacactgtgagtttgctgtatatatccacgccttacacagtgaataagaagatactcagggccgggcacagtggctcagacctgtaatcccagcactttgggag

SEQ ID NO: 48647 - DNA, 721 bp, Homo sapiens
actttaggctgggcgacaagagtaaaactccatctcaaaaataaataaataaataaaataaagaaacaaataaaacaaagagttcaggacattgactttgtggaatgtccattattctggagctaattgtttcctgtttttctcttttagctcctgtattttctgtaaattggaaattacactaggcctagaagcttaattggattcaaattcatcatatttagcaggaagatttcataggtgatactttgtgtacttaatcttgcctcacatcaggaggcacaaagtctcaggctgactcatcagtgaggctaaatttgaacttgcagttaaggtaatgcctgccagactgctccactggaaaggtatcttttcccttttctgaaaattaggtaatcttgaggggtgatattttgcctctgcataaagaccctctttccaagaagagagccttttcacctgattgttgtgttttggcattaattatatttgtctgaatcaattattcccttttgcagttgtaaagtacccttctgatccctccctcctcctgtcactatggacttatgtatttttattcaatatattaaataattgttttcccagttgccttatttgaatttacatccaaataggatccatatatctatagaagtttgagcagaggagtgacagcatttgcctaactttttttttttttttagatagggtcttgctctgt

SEQ ID NO: 48648 - DNA, 2032 bp, Homo sapiens
ttcaacagaatgcttaaagcacgaataccggcaaaaataagattccataacagtcttattatttttacacaatctttgatgcaactcagagcgtatcctttagcaccttctcttttcccctcaactttaaaatggggctgaagttctattcactttcatttttttaaagccacactcttcttatctagatctgaatttcagaatgaaaagatgaatactttaagactgaaaatccatagcaagggcaaaggaaagtactgttgtataatgaaaaccgcaaactgcaaggggctcagaagataacgggcgttcatttctaacctgtgcaatcacctagaacaaatcgtgtggttctggtctataaaaccattctttgtcgctcaaaagaccacaaatacaagcaccctttcgcagaaaccctcaaactgactgccagggagattacgtaaccaaacatcgccaaagacttatctaacttgtacagcggcagcctgtttgacctcattcatacagagaagcgatcacattaagatccagcacttgtttctacatttccaagccggattctgccgtcctcctccttctaagacgggcggtgcagcgtcacaagcgtcgggacagatctatccggctcggaacagacttcgcgctctacccggccaggcccagctctcacccggggacccgtgtcgggctccgcagctgggacatggcgccccccggcgggcggcgaggggctcggccggacgaagcccagacacccgcaaactcccgactccacaggtagcggcgccgacgccagggcctccgcgctctgctctcccaggccccgtgcccccggcccacccggccgcccttaccatgttctcggcgccgactccgcctccgctcggccgcgcgccctcccgctgccgacccgcgccgccgccgccgctctcgcagcaccgaccgccgccgccggagccggacaataccccgtgcccgcctcgcgctgctgtggccaatgcccgcttgtcttgctggttcgaaccccagcggctgttcaatcgcgcgcctccttctagccagaccccgcccccccggcaccgccttcctaacggctgtttgtttttgcacacggcacgcggaggcggggcctccagccccaatagtgacgcgctctctgcctttcaccaggcgcccaagcctgacgaacagaaaggcaaaccaatgagattggacgcctcgcagacgaaagccaataaaaatatcgcccgcgagcaagggaggcgggccactgggaaggacagcaaaattagctaataaggtgaagcgattgcaggcgctgtggctttcccgcccattcgcggcgttggttttcccgcttctgagacttgtttggggaggtaaagagtgttggacgtgcttctcctggtgggttttcacagactgtgaggatttattcgtcttagaacgtgtggatcaggagggcgctgggtttcaaggttaggcaggcctcatgctcagccgtattctggcggactgactaccctgacgtcctctcagcgcggaccctgacaaggtccgcggcaggctgaggcgggagaatcgcttgaaccccggaggcggaggttgcagtgagccgagatcgcgccactgcactccagctgggcgacgcatcgtctcaaaacaaacaaacaaaaacaaaagctatcaattggctacatattgttatttgtatgacaaattctttttccttttttagagatggagtcctgggactacaggcgcgcgccccaatgcccagctaacttttgtatttttaatagagacggggtttctccgtgttggtcaggctggtctcgaactcctgacctcaggtgatctgcccccctttgcctcccaaagtactgggattacaggcgtgagccaccgcgcccggcatgtattacaaattctaagaacacgaagataatggggccggcttggtggcgcgaacctgtagcctcacctactgtcaagactgagacaggaggatctcttgagcccagga

SEQ ID NO: 48649 - DNA, 1780 bp, Homo sapiens
ttatttgcctcatttttggtgaatgaatgagtgatgactgtcacagtggggtgggttaaattaaggaataaatgtttataaagcaaaatttgtaaggaatggcctctgctaccacacagttaaaaaacaatcacacatttggcaggctcactgagcaatttcattcctcattgttcattgcctattgtcatgcatttgtataattatcatattctttaccaatttttattttataataatttgtattcatttatccatacattgattttctaacccatttattccagttcagggttgtgggtggctggagcctatcctggcagttgagggtacaaggtgggagccaatcctggactgaatgctattctacacacggcacatgaactcagactgggacactttagacatgccaatgaacctaacctgcacatcgttgggatgtgggaggagaccagagtacccagagaaaacccacacagtcatggagagaaggtgctctagaacacaccccagcaatgatgtcaggcgtagcctcagagggtggatgggagcagcttgcagggaaattgagagagctggctccactcccaagccccccttcttttgagacagggtctcattctgttgacgaggctggagtgcagtggtatcatcatggctcactgcaggcttgatctcccagggttgggtgatcctcccacctcagccttccaagtagctgggactacaggcacatggcaccatgcctggctaattttttatattttttaatagaggtgaggtctcaccatgttgcccaggctagtcttgaactcctgaactcaaacgatccacccacttcagcatcccagagtgctgggatcaggagccacctgcctggccctggctcccttaaagtgtgacctttgaaggcaaaatggtaggtacaatataaaacactgcaacaaaccctgataattcccacgcttgtttctatcctaagtcttgcccacaaaagagaaaacctatagctgacaaaggtttgggagagttcagcaggtgtaatcaaaatagagtttgcagtccccaccagaaaagatgtggtgtcagatgaggagcagataaatgagagcactgctctgatgagtcacttgcctaagtgatgtcaccagctgggttttcactgccagaaaatcagcagctgctggactagaacattccacatcgctgacaacagctcttcttccttcagaagtttgttttctgccattctgccagaacacctagcatgctttctctttttatgttatttatactagaaggtgaggaacctgcctttatgttctgaactatgcatgatagaggacccaattaaaaaaaaaaaaactctttcagaattccaagccaaagcttcaaggccagaagcagctagatgtaaataagggcagggatttttttatgcagagaaacaactcacttaaggtcatacaacaagccagtaaagacaatacattttcttattcttaaacttagccatcatctcataaggccaattggatcccagtactccttcatccagtgaattatcagcagagaatcacttcatttagtgacttgttcattttatttatttattttttttgagacggagtctagctctgtcacctcgcccaggctggagtgcagcagtgcgaatctcggctcactgcagcctccacctccaaggttcaagcaattctcccgcttcagcctcccgagtagctgggattacaggtgcgttccgccacacctggctaatttt

SEQ ID NO: 48650 - DNA, 2708 bp, Homo sapiens
atctattccctccagggattatcctgatgggtttacgaacctcagttgagaaacaacagaagctgagacaattttacgcaggtgaggagatgctgttttcctctttgcaggttgctgtcagttccttggaacttgactgcttttctcaagttgtccgtcactgttctcttacgattatttctcttaactgtgttacgttttgttttttccctctgcggcctcccttgctccctctccactagctcactggggatgagcaggaaagggaattctctagccaaggggatggtggttgggtggaggcctgtaggggaagctgcccgtttcaatcctcatccacctcctcaccctctgactcttcgccgccgccgctgcccccaccacgtcgctcataaagcttatccctctgtcgttcctggatttctttcatctcatccgcataccggcaaaaggcgcctccgaacttgccccaggctttgaagggtacggtgatggcattgcggtaggacggcttcacctcgctcactcgcagaaacaccccgtatttgttgcagcccacatcgaagaagaagcgcttggagtccacggtgatggaggtgccctccgggagctctccatacaggccgccccctgggcccccggcgccgcctcccgggccgcctgccagctcgtcgtcctcgcctccgtagtcgtctatgagcttcgccagcgcgtcgcggaactcgatgaggccctgcgcaggcagcgcgatggtctggccgctctgcaagccgcccggcccggggcccgcgccgaagccgccaccgccgcggttgaccgtttggcggatgcgcaggaagcggccgcgctggttctccttgaggtccaggtagtacttgcggttctcacgcaccaagaattcgctcttgagcgcgcgccgcggcccgccgccctcctcggcgccagccgccagctgctcggggctgctagggcccagctgcgcgtagtgttctatgaagtcgcccagcgagtcgcggaactcggcggccaccgccatggacagcgtgaggcggctcttggaaccgcccgcgcccacctcggcgatcttgaggaagcggcccttggcgttctgcttcacatctaagtagaagcgcttgttctggatgtccagccgcttcgaggccagctcctgcgtctcttgctcgccgccgccgcgggacgcgggctggaacccgcacggcccaccgccgccgccgcgctcgctgccgctgtcgccgtccgccatcttctaggccgccgcctcgccgccaccgcccgccgcgctcgcgcccccgccctccggctcgcgctccggggccccccagcctcgcccgcccggctcgctcacgcgctcccgccgctcatcgccggccgccgccgcccccccatcgcctccgcgccccgcccccgcgacttccgtgcagccctagccacttccggcgcgcgatttcccgtgaagtcactccgtcccgccctccgcggcctcgcggccggaagcgccgcggcggcgtggcgcagaggggtgacgtcaggggccgcgccgggcgggcggcaagctgagagtaggctagtgttactgctcggtttctagccctggggacttgccagccttagcgtgactcagccgcccgctgcgtctgtctacgcgcctcttcccgtgacacttttactttagactccggtgtcgtccacttccctccttctcgcttccggggcgttagctgagcatactcaggccccagcctgctcgcgctggttgtgtgctgggaacagagttccagtctatacactggcgaccggggggagggagatcctttggagcactcggaagcgggttctgaccagcctgtggggttccctagaggaggcatgagctgactctgaagggcaaactgcagttggcctggcaactctggagaagagccacccagcataggagacggcagtgcagaggcacccagggcctgatgctgggagctcagagcagctgggggtgtgtatgcctgaagaatggtcgtagatgacactggagggtggattagatcaaggaaagccatttgcagtgcgggagagttagtgcctaccccagagtctggagccaccgtatgtgatcaggttcacattttggaaagatcactgtgggaacaatatagaaagaagatgatttaggatgaggttagatttgggatccagagatcagttaactgtccccacagttagccatattaaagtggttaaggaaattgactgccaatctttagtttctttatcaataaaatgaataattcctatgaggtctttttgttgtaagcattgaggtgtaacaagaggcagaattggaatagtgttaaaaagtgtaggctctgcaactgcactgggtttgaatctgtgaccttgaccagttacttgattttccaaagccaaaatgtcctcatccttaaatttttttttttttttttttgagtcttgctctgtcacccaggctggagtgcagtggcgtgattttagctcattacaccctccacctcccgggttcaagcaattctcctacctcagcctcctgagtagctgggattacaggcaaccgccaccacacccggctaatttttgtatttttagtagagatggggttccacaatgttggccaggctggtcttgaactcctgacctcaggtgatctgcccgcctca

SEQ ID NO: 48651 - DNA, 675 bp, Homo sapiens
agagggaacaagacaagatgacagttaggagaaactggtgtccaggatatgccatcctagcgggtgctgacactgagattcccaggccaggcaccccgtgctgcaaatgctttgcagcttgacactctgggccaagtatccagctggcttgctttgaagcctccagtgatgttttttggatttgtgtggctgaaaggaagtttgtgcatcttgcacagtctaaagagattgcctaattctggctctgggcagaaggcccacacctgccgtttattctggggatttttgtcttatgtaaggtagaaaatcaattccttgtgttagtattgggttccaggaagcggagttctcagcctcagggcttatcaatcaaatcagctgccctccatgatttgtagttcctcttctggcacgcccagaggttgggaagctgcgttaggcacagttgctgtgccctgtggagtctgcactcacctagtgctccctgggggcctcatgagcccctggaagattgatatgttaaaggactggagccttgaggccctgcgtgtggctcacgcctgtaatcccagcactttgggaggcagaggcagacggatcatttgaggtcaggggtttgaaaccaacctggccaacacggtgaaacctcgtctctactaaaaatacaaaaattag

SEQ ID NO: 48652 - DNA, 1676 bp, Homo sapiens
gacaacacgaactaaacttccacattattctatgacactacaattctagcatggcttttcactgtgaccagaaacatccttatcatcatgtagttaatataaatactgccttttccccttcatttttttctcatgtatcttacggctcagaaatcacttctgaaggagtaagtagaccaggcacatgaagtagatttcattttccccatgaaataatggttcagagaaaacgcaggcctagttccaggaaggcagagttggggtctctgcaacgtgatttaccggggcatcttgcaaaggagttgctgtgacagtaagctcttccactttgagaccgtcacctcagccacggctcccacctagaagggaacaaatgcagttagctccaaacgcagttagcttcagcttgtgcctctgaaccattatccagctctagctccttgcaacgcctggcccactctacagcctctcttgcggcaggtctacacgccaccccatgccttccggtgaggtccctcctgaccacacgtcccatcccacctactggggtccacccaggtcatgcagaagccccacttctcggctgaaagagaagcacgaggttactcatcaagtaatccccgagtctcctccgggtaaaatgttccgaacgcgctcaaccgcctcttgagaggaagtagcacgtgtagtgaaggcttggtctccaagaatcactggtgcccccactcactgcggcccagcctcccacgccgcccgccactgaacccaatcccccaggacccctacctgggctcaggaatggtcaggcaacacgtggggcccaggatggcggtggatgactagactgccgaagaccgcgccgctgcgactacgaagtacggagtacggagtacaggtctgccagccaagactgacgccgcgcgctgcgccgcgcacctcgacgtcaccgcgtagtcccgccccgaagccgtgcgtggccggggccacagcgtttggggtagatgacgtcacgcggccgcgggcgctcgcttggtagggtgtgctggggcgtagagtttagggtcctgaggctgcgtctgcgtgtcaactcagtggagtctctcgaccgccctttgttaccctcctttagtgaccagaaggctggagttacgtaatctgcccctacagctaaaaggacggaggcctgacggcgtggcctggagggacgcgctgagcccctaatgggtggtgccttcctggtgcggccgcacaggcggggccgggcggaatccaagcacgatgtggacacggagccttgggaatgaacaggagcctgcctgtgggagcatgtgggaaaggtgatgcaggtggaagggcaaatacaaattatacatagggtttaattttccctgaggaaaagaagggacgagaaaccatccccctccctttttctttcaaaatttcagcctctctcctttccaaatgtactcaagtctttttcttatatggccaggttcaactcaggaatgtttcttgggagccatctccttgaagtgtaattgttggctgggtgcggtggctcacgcctgcaatcccagcactttgggaggctgaggcgggcggatcacaagatcaagagatcgagaccatcctggccaacatggtgaaactctgtccctactaaaaatacaaaaatt

SEQ ID NO: 48653 - DNA, 2014 bp, Homo sapiens
agatccacgccactggcactccagcctgggcgacagagcaaggctccgtctcaaaaaaaaaaaaaaaccaccaaaaaaacacagtttacattctagctgtgctacaaagttcttaccggcagattggtttagtggcaaaatagcagacctgctggtgactccaatttgtagtgtgcttttgggcgaatcacctcattccccggacctcatctggaaaatgtggaaattataccggatgactggtaaggttctacgattttattctgatagggtctgcacatccttgtggttgcacttctattttccaaatgtgtttgtctaaggcaggcagactttataacagagaagtactagaaaacggattccctgtggctcagggaataaagtgggacacaagaaaaaagaaaaccgcaccgcacccagactctcggcgggacgccccgcccctcaacagtggccgcctcctcgcgcccctccttcgccatctgccggccgcgtcccctcccgccggcccccgtcccccgtcccccgccccccgtccccttttcagagacctgagctccgcctccctggacgcgaggcaggctgggaagtcggccgccgtaaagatggcggcaaattgaaaaagttggagctgctcccgcgcgcgctcccgcgcgcgctgagtgggcggagcgaacagggggctggacaggtgcgttctcgcggccgtgcagaagcgaagtaggggtaggagcgtttccggctctcctgaaggacgcggggcggggtgggggtggtgcaaggcaggcgcgttctcggccgtcctgaaggggcaggatcttcagcctgtgggcggtgctctcgccgtgagcggggccaacgggccgtgttctccctgaaggggcggggtctgatcgctgcgggtcggattcccttgggcctgaaagtgaggatgagcgacaaccgtgggcggggcctgcgctggggaaggtggggcctgggcggggcggagggggctcgggcccggaagtgcgggtgtggggcgcggccggggcggagacttcgggcccggctggcgggcggcgccgggagcgcgggggcggcgggcccgggtcgagcatgtagcggctgctggcggcggggctcccggggcgggccgggcgggccgcgggagccgcacgcggcgatatggaagaggagggcaagaagggcaagaaggtgagcgtgcgcgggggcgtcctactgctgtggtcggcgggcggctgggttgaggggccagggtggggtgggcgggtgttccttggggcccgggggggggggcagtgggccagctggcggggcggggcggggcagggcgagaccccggacaatggtcaggtgggctttcgcggccgggcgggcaggaagcgccgcgcctttcctctggcccgggcagcggctcgccccgacctcggccccagacggccttccctgcgcgtcgggacctggggctgcagaggaagtgggcccggcgaggggccagaaagctgtccagggctggaactggagctagtgggctgtgtggttaacgtggagacgtttgctgctcactggacttcgtttttggatatccagtaaaagcaagggtggccttcaccttatggccagctcactcgtccactatcactcagacctaaaaccattgattgattttagtgacgctagctacatttggcagtgggatttaggacatagttcatagtcaaaccccagtttatgtagttttacaaaatgtggctttaattacagtaaagggttatagtagtcgataaagaaacattttaagactggaaaaacgatgtggattgaactaccattaaagtggaaaatggattttaataaaatgtatctttttcaaataaatgctttataatcttcacgtcttggctatcattttctttttgatgtgtgtgtgcgcacttttatccacaagtttaaagcagacctcgataattcctaactatgattttactaccctgaactctgcagggaa

SEQ ID NO: 48654 - DNA, 535 bp, Homo sapiens
tgcttttccaacagtgagaaatctggttcctgttttcttcagtgtatttgcttttttgctcagtctccccataggttaacactcctagctgtgctaggcaaactcagctgaagacatgctgctgttccctccccacagtttgctgttggggatgctgtcctaaagctgaactaagaaatattcccttccccttccccttcctggattcactggccaaaagcttgggtttgatgaaagggagggggaggtgaggatgaaaaaagggtaaaggtcagttacacagctcagccctgaccaacatgttcctgtgccttgctgaacacattggcttaagctgggccctgggtatctcagttttccccatgtcttgcatgttgaggcagagttggtcccagacatgccttctctaatcctatggcatgtgtgccagtccagaggtggcccaggacgtcctggttccttaagcgtggccctgatgaaggggaagggatagtgagaagacacaggataaaaagccagttagagagctcatctc

SEQ ID NO: 48655 - DNA, 1922 bp, Homo sapiens
ggtggcgggcacctgtagtcccagctactagggagggtgaggcagagcttgaagtgagccgagatcgcgccactgcactccagcctgggtggcagagcgagactctgtcacaaaaaaaaaaaaaaagaaaaaaaattctatcagctagtctagctccctacggtgattacatgatccagggaagacatgcgacaagggcaagataaaacgttcacctaggcctcatttctgccaaagcagaatgtacgtttgatctttctccacttcctggaacttggtatatggccagcacattttctttttatatgaggggattaaagcagctgtaaaaagcttagtctaactccacttaaagaaaaaaaaaaagagagagagatcagagagtcggagtatttgcccaaacgcaacatctaccacttcctgagcctaagcacagtgtagaaatctttccgacttatttttttgagacggagtctcgctctgtcgcccagactggagtgcaatgctgcgatctcgagtcactgcaacctcagcctcccggattcaagcgattctcctgcctcagcctcccaaatagctgggactacaggcccgcgccaccacacctggctaatttttgtatttttagtagagacagggtttcaccatgacctcaagtgatccacccgtctcggcctcccaaagtgctgggattaccggagtgagccaccgcgcccggccgcctttccaattttttaagagccctaagagcagtttagccgagtaaacggaagcccaggagccagacttgagtttaggcaaacagcaatccaaaactttagttctaaaatgcagagagaaaacaacttgcactaagtcacgaaaactggctcgctggggtcatggacggtcaacaggggcggcgtcttccaggcctggccgcgcgggctagagaggaagcgtgcgcactggcaagccagcacggaacgagcagacggccaggcccacggcatcccaccgcgtcccagcctgctccccagttccaccgcatcccaggaccttcccagccacgcctgtgttgtgcactcgaaacccacgatcagccgccccttctccccgtgccacaagacctacgcagcgagcaccaccgctgacctccatccgccgccctaactgtccccggaaccatgaggtgcgcggcgcgcttccctacgtcactcggagcgccggcggaaacgagacgagcctcgccccgcacgtccggaagccacgcctccagcttccggccacacctttcggcgggtgacatctttgctgagggctcaagcggagcgataggtcatgggaaacttagaaaagataaagaacctaggaagaaaggcttcggttgccccccgaccagtacgccatcctcatacggagtgcgggagacgaccctttgttgtcggtgctgtcaccctatccctccctgcttgcgtaggcgtaggagagttcctagggcggtggaagactgggctggtggagtgggataggcgacgttgaggcctgtgggggctgggaggacgagtgagtggagactggggaactccagagcgcccacttgcagctggatttttatgtgcaattttcctgatttttaaatagtggtgtttaattacaaagtaaagtgcaggatagcccaaacgaaatgtatctgaggtctatatatggacttgattaatttttacttcctgcacagccttttattttctgtggagttaataattacttggctacgcacggtggctcacgcctgtaatcccaggcctcggtgggcggatcacttgagttcaggagttcgagaccagcttggccaacatggcgaaaccccgtctctactaaaaatacaaaaaaattagccgggcgtggtagggcgcacctgtagtcccagctactagggaggc

SEQ ID NO: 48656 - DNA, 2239 bp, Homo sapiens
gatatatttcacataacacaattcacttgtttagtgaacagtggttttcagtatactcacagtcctgtaacgattactataatcaatattagaatatttttatctccctcaagagaaacccatccccatcagttaacactccccatttctcctcaacccccaaaccctaggcaactaccagtctacccgctgtctgtagattttcccatttcatttatttttcagcctgtgtattaagttagtgcctgttctgggcagaagacattcctgtgtcctactagatggagctctgagctagccttgtaggtggggaagatccagattcctgagggactcatgatctggcgctgtcttcactgcatacctgaattccaggttctggagtgggcaggggttgctgagaaccctcgccctttggcctctcccggggaagtgctgctgtgtggtgcgctcactgtcagcagggctgtctgggcagaacaggccctaattcctgctggggagtgggaggggaccctggtgggggcataaatacatctgcattaagctgttcttgcactgctataaaggaatatcagagactgggttatttataaagaaaagaggtttaattggctcacagttctacaggctgtaccaacaggcaccagcatctgcttggcttctgggaagggctcagggagcttttactcatagcagaaggcaaaacatgaacatacatgtcacatggcgagagcaggagcaagggggtggggggaaggtgccacacactttaaaacaactggatcttgcgagaactctgactatcgcgagaaaggatagcaccaagccatgaggtatccacctgcttgacccacacaccttccaccagaccccatctccaacactaggattacatttcagcatgagatttggcagggacagatacccaaaccatatcaacatctgagtctgacttatcaccagaggaatgcaggctgtggcaggaagtgagtcctcacgccagaaggcctgactgcggccacagtgggtttgagaggaagcaaagccaggcatactgtgtttctctgggccttgtgcgatgcttcagattcggttatggaaggatgagggatggggttgaggggaaagggacgaggaacatggcagaaagagggaattcttcagcaaaaactgtgagaggagtcagagtccaatcacaggggccagtgctccctccaggccccctgtgggcagtggagctgcaaagggagggcgataggacccgatccctgtctccaaaggtggtctgacaatggagtgtgacacacagcccaggaggcaggtgggagccctgtgatccacaggggccctgaggaaagcaagttgcatggtcaggggctggcaggagggcacctcggaagtggtcgtgtggagtctggccactgttggccatcaagtgagggtgcagtagtggaggtagagtgggtctccagggggctgtgcatgtatcacagcctgggctgagagcggagggcacactctaagggggtgagttcaggagcccttatgatgcttggactatttgaaagacaggggcaggcacagggcatctccaggctggtgtggcacttggggcagccacagtgggaatgggccctagaaccagggaacagagagggctgcctgataggattcaccaccttcagccgggagacgcagccagtccgcagcaaccatgcaaagaggaactgggaatgctctcctccctcgctactggcccctgctcccgctccccattggccaaacctggccggaagtaggaggcccaggaccctgttggtagagtccttggactggcctccctggtacagaaccggtggggaatggactgcagatacagcacatacctgccctggaagggagatctggccagatacagcacatacctgccctggaagggagatctggccagctgcagtttgctaaagccacaccaggtaataggaaaagagcctctttatgatgggctgtgttgctgaacttggtcttagtttggctctggctggctatccagggtgatccagctggctggtctgggaggatatgttgacccagccatcagctggcctctctgggttcagatctttttgttgcaaaaacctactcagagcttgagaagaatggacttgggatgagctagaaaaactggaacagcccaggcccatgagatctggggtttccaggttatttactaggg

SEQ ID NO: 48657 - DNA, 736 bp, Homo sapiens
actcttccagttgagggacacttctgggagagacatttcctctcatctgggttgacatggctttttcttggctttgttgttctttgaaatgttattaaatgcagtatttgaccctgccatgtcgttctccatccagtgacaccccctagcaatgcccaatgagcataccagtaattttagggctagaatatgcattcctgggccttggggcagcccgggcaagtctgcggatccttgtgcatgcgtgtcacaagaaagggttgcccacatggagtatactgccatgtttgtccacagataggtaacaacaaatgccacctgctttcccgtaaccctagcaaaacacagaactttgtagactttgcctgtttgcccttggacatttaggtatgtagtacaaacattagagtgcctcaaactattgcaaaattgccaggccaaacactaggtaggttaattatttacagagactggattgattgtccaaacctgcacaaacagataggcttttcccttgggaggcatcttcagcctcttcgcctgtaaactcttgtatgcttttgttccagtgtcatttctttctttgcattcagtagataatcatcatggcaattataatttcaatgtttatgctatttagtatagaatgaagttaaaacaacttatttctctaccaataaacgcttaattcgatggtaattcccattttgcagttgccattattaacatttagagg

SEQ ID NO: 48658 - DNA, 1013 bp, Homo sapiens
taatccctagatggttctttctctagcctttgctaatcagtactcaactagagacttgaagagaccagaacactgtgtcctctctggtattttccctttgaactcaagctgccttgggcttccaagccctctagccttgtcaaatctgggagacccctaggctccacaggcactgtctctacatgcggcttggaaactctcccagcagtatgctgggccattgcaggcctcatcacttattcccatcactcaaggatcactgtctttcattgcctcctgtccagtatttggaaagctgctgttttatatattttgtgtggtctgcttgttgcttgtaggagggcaaattgaattcctgttactccatcttttccagaagtggaacttcatgtggccatttaagtgtctttgaccccaaaactggtcattatccccatgtaacaggtgagggccaaagtaaatggccaaaggtcagaactgaaatctgccaaaccctaaatgggcactctcatggatgccatgcatgacatgtctcagaatccttctcctgccaagttaagtaccatccagagtggaatggcattctggtgagaactgtctctaggcagaatcctgtgaacacagccaagaattagaagtcctcagctctgaggcctgtgcttctccctccacagcagtcaagatttcatatgcatgtgtggctggagggtttctctgaaaggttagatctgggttagaaggacgcagcataacttcaacatagagcaaaagctccaaagaccccagaagttgctttctgcccacagtgtggactgttcgtggagagcagtgtggtagcagtgtggcagtcactgtgcaacaagaaagaagatgtctgtggtgtgtctcaatgccatgttgggcttgagcacgtgaagttcacctgcaggccctaacttgagcacagcacagttttgctaatctatgaccagcctgcagaactcagtactgctaatgcaggcacctctgtgttc

SEQ ID NO: 48659 - DNA, 1028 bp, Homo sapiens
taacaatggtattttggagagagcagtaatttttgtgccactaataaataaaacaaagctattattttagaaaatattcttcactttctgtttatgtcaccctttacaaacctttcttttgtgtatattggagcctgatgtgttaacacataattaataatgtgggtcctatagagaggtgtttgtccagaatgccattattgatgagaacttgagttgaaagcagccccggagaccatctgaggctggaaattgaaggtttctgacctttgagcatgacccagagtaagtcagcactgtgcccagacagccgctgcgtgggcagagtgtggctccagcccatctgggcagccagaccccagctctggtctgaccgagaaggttatggtccctgggtttcttttgtcctcatctgcttctggtctacgctccttaagggacaggaagaaacacctggcgccgtctatctccatggatcgcactgattcgctggcattgtcttcccagaacacacttgcaccaggcctgccctgcatgccctgcctggcttcacacacacccccatcctcgtacctggccctcaaggctcggggcctcgtcatctctatccttagaaatctccacttctctgttttaactggtggaatcactgtgtgcagtctagcggcatattcgtggccagctcagctctgataatatcagtactgccagaaagcagctgtgctctttaggcttaactaaggggcatgctgtcccctcagcccttgttaagtacaaccctacaagtgttccctctaacagtgggtgtgttacacccattttacaataaggaaaccacggcacagtgaggctgcatctgctggccgggtcaccagccacctagggggacctgaaccaggggagctggcttccaaaccatggcttgtggtggccaggccatgggccgctccgcaagggcaatcattgcacagtttttactacattcaagagtttgatgcctccataaatgctgacacatacttagagta

SEQ ID NO: 48660 - DNA, 3671 bp, Homo sapiens
agcattatttgtaatgaagaaaagttggaaacaaaccacagtccaagtcccccaaaagtaacatgctgtggttttcataaacacatgatcctcatacggtaactccagtgatggcaccctgtgtgatatgcacaccatatgcgggtgatggcaccccaggtgatgggcacactgtatgcaggtgatggcctgccaggtgatgggcacactgtatgctggtgatggcaccccaggtgatgggcacactgtatgcaggtgacagcaccccatgtgatgggcacgttatatgcaggtgatggtaccccacgtgatgggcacactgtgacttggggaatgagactcccactctttttacctcagggtcattgctgcctggccatgtcgcaaagtcctgcagagccagggtcacctgtccttagtgcttgccgccgtgttgtaattggcaggctttgctccaactcagtgtgtgtagcgagtgcagcaagggcctggggacctgaggacagtaatttgacagctccatcctggggtgggagaggtcctgctgcccctgtggggtgacctattatgggctgggtgagtggcagccctggtgtttgtgttggactgatggcctcacaagcacattgaggtttcttgctgacagaatccccatgggggtcatggcatgagttcacggggccaaactggtatgggaattttcacctcaccaaagtgatggacacttcccaccatctagtgaattcagggttaatcaaacaacaccacatctaacgtagtacagtcgtgactttcctgaagcccatgcatggtccgggtaagtgtcatcttctaccaaatcatcttagtttttatatgggtggcgaagattcttgggggaatgagatgcatgtgtctcctgggagtgagcaacagggagctctggtgtcctggtggctcgtcctcatttccctccaccacccaggccctctcaccacccagctgcagcaatgatagctctgcctctttgtttcttccctcaaatgtgtccattaccctaatctctcacttcttatggagtggttttgtgcaagtgcgggcccagaagtgctttgtgaacccatggcctcagacttgagcatgcaacagattctcctaggcggcttgcctagtaacagagtgtgggatgcgcccccagaggccggagtctggggttggtgtagggcctggggatgggcctttctactcatctaggtagaaatgccaattagtgagtgaccgtggtctaacccacccccctttaccagaggtgagaaattaggaggggtctgtcacctgagcagccttgatgcggggagagcataacagaatgaagacgaagagcacctgccctatgtttggcacttgatacctgccctctttcacccaacccactgcaccctgaatgcaaatgcttcgggatggcctcgcttccatcgccaacactgagattcagaccctggtcttctgacagggtcccttgggctttggcctggacacatctgtgctcctcctgtgtttagaaactgggttttgttgacgtgacaagagctaggtgacttttccactttgattagtggggagtgtgggcgagagctattttttcaaactttcccatcagtttgccaagcagtgtccttcatcagcttgggagataagggcagcacgtcgggcctttgcacagatttacatcatcccctgtgttgatcatggaacataagcaaaacatcactttgttttttttccccgtgttaaaaacaacttcctttctgaggtgtccctggattgcagcatttcttccctttgaaagtttgactttgcccttgactcttgtattgtttttcagagcatggattgcccaattttcagctgctggtgagtaagcagcacactgcacgaaggcaggattgggaagagcagatgatggaagcacccgtgtgactgcaccaccccagaggtcccagcctctgccgttggcaggaacgagccaccgtgctgctcaggatgacaatagctcctgttcatgcagtgctttcttgtaccaggcaatccatcatccccatcttacaggtgaaaaaactgaggccaggggctttatgcaacatgctaggacatagaaatctaaggcacaaaaacaaacggtcttgctccagagctgttctgctgttgatacttcccagctttcatgacctccccttcaagggctaacacaattgtcagagttgagttgttgagtgcaacggtcaacatttgttcttgcggttcccacaagaaaaagacagatgtgttctgaagtgccatcaaattgctggcagaggccgtgtgtggccctattcataggcaccccctggagtgacacaatgggactgctatgattatgtgtccctcaccttttctgaatcactgatagtggtttccttttctttgcagcacagagaatttgcaatgcggcaggaggtctcctggtccccggtttaatacccttttttgctcagttgattgaatacaaattccatgtctagcactgaaagctttccacacttaccccaaacaactgttcatccctgcctcccaaaatatgctcccagttgcccctgcacatacagacatttttggccctagcctacataaaatgcctgtatggtatggcaggaagggtaaaggctttgattcgggtgaagaaggggcttcatctccagctggtggtgatgagacctactggcaactttggcatgtgtggcttggcatgaggtatgcccagtatagtaaacgtttatgaaacactagctcccccacccctccctgctcttggtgctctgattccaggtgtcctgtgaaattggattcatagttctttatcaaatgggcatggggcacctattggtgcctgtgtggtgctggacagaaggacatctatgtgcttgtcccctgttcactaaaccaggtgagacacacacacaccccaacacacacacacacacagaagtacgtagataggcatttattttagctcttcagcatgagtataacccaatgtgagatcaagcatcaggattgcacaggggggcactgaaatcaggctgtgcagaggtgaggacatttatggtgggtccccagggatggagaaggggtcataggaggaaggaacagtgccatgaagatataactgaggccagaatggtcctcaacctttgggtggtcaaaggcccattagagtcgatgacgactcccaaagaccacacggaagcacacagttgtgcagttggctccagggagtccgaggggccttgagctacggcatggacctcgtctatggctctctgacttttcttatctgtctctaactcttcctctcaccagttttggtcactatgtgggccatcccatctgaagcatcattccatactccccttcctgatgttcttttctttctttcatgcattaatcacaagctgcagtgcatttgttaaagtatttgtttactatttttccccctctacatctttgagggtggggctctgcctccttcatggctgatcctcagcttctgggtgtctggttggtgctcagaaggggtgcaggaatgaggggtccccaggcgccggctccctccctggtgatcttccagaaccgatctttctttctttttcttt

SEQ ID NO: 48661 - DNA, 2221 bp, Homo sapiens
cctccattctttctccctttctttctctcctctctctctttctcttgagacagggtctcactctgccaccgaggctggagtacagtggtgtgatcataactcactgtagcctcaaactcctgggcttaagtgaccctctcacctcagcctcctgaatagctagactacagtcatacaccaccatgcctggctaattatttttattttcacagagacagggtcatgctttgttacccaggctggtctcaaatccttggcctcaaacgattctcccacgtcagcctctcagtgttggaattacaggcgtgagccactttgcctgactcagaacctcctttctaaggatatccactctcttagcctgcttatacccctgtggtggtggcctgctgccctaatgaggagtctaaacccctttgcacagcctccaggcctctttgtgcctggtcccctgcctgctcccctgccactccctgcctgttattccagctcccagcaggaagaactactggctcttccctgaacacactgcactcttcccagctgtctgctgtcatcccaccatcatctctattctcccacattgcacaccccatccctttgctgcttgggggaaggccacttaccctccaagaccagccatggccagcagcttatggagacgtacccagacacaaatagacctgctgtctcttcccacctcacttatcctaagggtcaggttgtaagtagcccgcccttgacagaccatcctcctgctagatgggggcaagactgtggctcagtgtagggcatcccatcactcctttcccccacacctagctcagtacctgccctacattggaagggtacctcccttccactccactgcggtcactgttgggtgagggaaagaatgcagacagaagcttgggagcttgagatggagaagctggaaggaagagcaattcattctgagggggcagccgcaggaggtgggggatatcaggatagagtcctgcaagaaagagtttccgggatggatggaagagaccatggacttgataagcatgatagggtgatggaagttcaggcactgagaacagcaagaccagagtcatggggttagggtcaggccaactgaggctgaggtgcagcaggtccggagacctctctcccagggcccaccctgcacttcccagagctgagagatgcacctcctttcatgtctcccctgggcacttccccagcctccccagtcagctgtgagtcagagcactgggaccaccaaaggcaggccaggctgtgacccctgccagggggcagtggggcttggggattcatgaatgttcccagaaatggctgtgtgagcagtcacatcatcggctgtaactccaacctgccagggcagggccgctcactcccacacaggatggacggatggacagtcggcctacacaggcctgtagggaggggcttggctccatctgtgttgacagagggtcaggagtaggaggagagctctctcttgatttgggggctgtttggtttgctgttgctatgaagcaagcaaggaaaacatttgggaaatcgatccttgaggggaggaattttcactacatgcaggacaagtgagacctcagggaggatgggtgggacgaatgctgagcaagtgcacaactatccagggcggagtacactgcctggcacacagcaggtggcctctagatatttaccaaagaattgcctctttcatgtgtttcattaagaaaacatttcagctgtgggcactgattgcaagctgaggaagtcagagagaaaatacagagcacacattcttcttctggaaatcaaattgcttaggcatctaccctaaaaataatgtcaaaaaattcaaaaccgttggtcagttcctttaccaaacaccaaactctgctctgtaaagaaataatgacaaacaatcataaacttccaactgcagtgacctcactgccttattttgatttttgcaggagacgctggggccattactctttggagactttagaggtagaacaaaagccagcttggcaaatccaagtcacttcccgaaggccacagaaacaggaaagtggtgagaaaaggaggtcgtcagttaatttcaacttggttatttttttatttttattttttgagtcagagtctcgctcttgtctcccaggctggagtgcaatggcatgatcttggctcactgcaacctctg

SEQ ID NO: 48662 - DNA, 3081 bp, Homo sapiens
ttcaccaccacccacaagaaggcattgctatcaatttatgtattcctcccaaaacattcaataaatgtagaatcagttgcatacattcatcttgcttttattgtacacaaacagtaccacactctgtactttctcatttgtacttagctaggagattttacttcagttgaatcactttacttttagagatttttctctataagaaaatcagagttgctctttcttgttgatagctgtctatcttccagtggaaggatgccccaggatttatgtatccagcacctagagatgggcatttaggttacttgcagtatggcttccagatagggattggttcgcgtattttttcacataagtttaaaatgatctctcacgtctgtctcatcatctgtaggataaacagctgagggtggcattgttagcacagaccattctacctccagcttcagaatttcagggtagttattattttcacctgcccttacaccttccctgaagggagcagcagggatcatttccttgaatgtaagaatgactgtcacttgaggtgattcagcaatgctctactgttttagagtgttttagccagattacagagaaaggcatttacttagggcttgcttacagtaaacaggactgtatgggcatcagaaatgtgaattcttgttcaggatccaccgttatagcctctgtgactttgacctggcaatagccttccttctctggcctcagtgttctcctctataaagcaaggggctggacaagccatctccagtttcccagtttggcaacaccactcctaaaggatctgaagggacaacaggaggcccaggcctggaggtagggtagccctgagcctgtgcctagaatgggaggcaaagatggtggcaggtgggtgggaaaatgtggggtttgggggtcacaggagagaccaaggggcaggcctggagcatggcacgctccctgatcacagctctccactggaaggccatggagggagtgatggggagagcctgcaactcctggagataagcctgattctgactttctttgaaggatttttttctttcgacttctttcctgtgaaagagaatatccgagaaatgagaattttaactaaagagaaaacctttgcatttgctactgataaatatctggcctatgcgggaaagtcatgggtgccctgggattctggctccactgctaacaagaccttgttagaccttcttaactgcccctccagagaggagaaaggctcttggaggtagagtgagattggggagcttggcagagccctaggatgaactgtgtttttgttttgttttgttgcaggttggagcctttttcctgcagaaagagaagcaattccgggcttttccacagataacctgctagggctcgcagagacctggattctaaccccatctcgcctttcctcacctggggcattgttttctgcgtttgagaactgctgggtgggctggtgttacccaggatttttaaatttttgcaggagacgctttgcaggagatctctagggcttttttctgtgtcaattaaagagcctggccagctggacctgggctgtctttttgacaaaaacaaacgtcatccccctcccagctgagcacttgttagaactggactttaactgagggcctgaaccccctaacaacgggacaaacagtatgaaatcaaaaccgtttaccctcctcccaccagcggtttgcgtagggccttgggtgcactagcaaaacaaacttattttgaacactcagctcctagcgtgcggcgctgccaatcattaacctcctggtgcaagtggcgcggcctgtgccctttataaggtgcgcgctgtgtccagcgagcatcggccaccgccatcccatccagcgagcatctgccgccgcgccgccgccaccctcccagagagcactggccaccgctccaccatcacttgcccagagtttgggccaccgcccgccgccaccagcccagagagcatcggcccctgtctgctgctcgcgcctggagatgtcagaggtccccgttgctcgcgtctggctggtactgctcctgctgactgtccaggtcggcgtgacagccggcgctccgtggcagtgcgcgccctgctccgccgagaagctcgcgctctgcccgccggtgtccgcctcgtgctcggaggtcacccggtccgccggctgcggctgttgcccgatgtgcgccctgcctctgggcgccgcgtgcggcgtggcgactgcacgctgcgcccggggactcagttgccgcgcgctgccgggggagcagcaacctctgcacgccctcacccgcggccaaggcgcctgcgtgcaggagtctgacgcctccgctccccatgctgcaggtaccacagtcccgcccctgctccagcacctcctgccgcccgcccccgcccggcacctcccgcccccactcccctaactactgggtggggctgcagccgggcaggggcttgtccacaactagagcttgaaaccagagcacgtagttggggaaggagcttgggtcacccagtggagcccgctcattgcacggtcttggcaggacgtgctctgggagaagaaggaagatgttccagggcacacatagcttagtggagactcaaggaggaagctcccacttggccctcgtagcccagagatctttagagacccagacagcaagagtagagggaggcggtggggctgcctccgcagttgggatgccaccctgggtcccccaccagtctccttgccagcacgtgggcagccccagtggctggagcatccgggaaggcctaagaagggaatccctcctgctggcctccccaggaggtgtttggaatgtcctttgtaatatacgtcctggatacagtatgtgcttcccagatgtttacagaacataatgtgagagttgaggctaaaagcttcacttccattcattgccatagaaaaacaatgtttgatgtgtatgttgccccctaagaacatgacaatcaggttctttcctggatttaagcaggcatttgtttgtagcgggaagtggaggaaatgcctctttctc

SEQ ID NO: 48663 - DNA, 645 bp, Homo sapiens
gcgcgcactgggccagtgcacgcgcgtcgcacggctcgcagcgcaccacgggacccaagcccgccgagctcgcgccagcccgcgccaccggcggcccgcggagcagcaccagcagagtcagcgcagcggcccagagcgtgggtcgcgcccgctgcatgacgcctgcaaccggggcacgctgcttggcaggctgggcgcgcagggatggggcgacagtacacggcgcgaagctgtggaatccaggcaggaagcggctgatcctcagcgcccagccgcagtgctcgcatctgggcggcccgggcgcgccggccgctatatagaagccggggtggcccaggacacgccccggaacggcgcgcccaggagtgggggttgggaggggggcgggtcggcgcaggcacggctgcgggggcccgtgcttcgccctgagcagccggggccgagctcgggggcgtgcagctcgagactcgcccgggcacctgctcctcgtgcgcacgcccggagcccgggtcaccttgtcgtctacaagaaccaaggtgtgcccggccaccccggcactccaggccacctcagcacccccggtcaccccagtcactcctggccaactcagcacccccgatctccttgaccccgccgcccttaccc

SEQ ID NO: 48664 - DNA, 3002 bp, Homo sapiens
aaagaataataaagacaataaactgggcactgctgaaacgtaattaaccaaatagtcctttaataggcaattttcattgtcattttttgaaggcgacttcgtattactgtattctcgatgcgttgggattctagcttatctctgcaatctaaacacttttcagtaaagttcgggggcgcaattgcgcgctgaggtcgctgtaactcctgtcggccttctctggcactcgagtttcttcagttttgtctgcgcaccccctcccttcggtgaccaacagaggacgctggtggtccaggattggattgaggattaaatttttcaaggcacttttccaaagagtttgtgggggtggagtgggaagcggtgagacctccgcgggaggagactttcctgaacgctgttgaaattggacgcttgccttaggaggtggataggtgacttgaaggagccctttgcagtttggagtagtaatagcaaatcaggagctcctccattcccctccagcacgaagccttgggtgaagttaatcttcattcatcatttctgtctctcctaatcgatctctcgcccagtgtctctccttgtccctctccctccctttctctctctcgtcctctccccttttccccctgtccacctcttcccccatatctatacagcttccttttatacatatatactctccttttagaatggaaagatcaatttcgttccctcttgtactaaataaataaataattggacctctacaaataaaaagagaccaaagacaagaacaatggagtgccccggggtgacgaaggcccagcaccgtcattttcttatgagctcttctcccacagtgctcaggctgtggctacactcaaccttgtttacaggaaaccgtgccataatcgtcgcttgctgtttcctttctcttgtatcacctccttctagtatctgcgttgacacccaagaacaggatctctgatttcattggaaaattgaaggaaacaaaacgaatcccccaggtttacatccgttccttaaatactcgcagagaccttgactctgaaattagagctgggttcggcatcaaatgcaattcttgaggtcccaggtctgcagttctggttagtgcaatgttgcagcagagcctggactgaccactggttagtgtagcactttttattcagctttatcatctggagagtggacaggggaagatcagaaacaatgtctttttggaaaggattaaaaaatttgttttattcttggttctcttcttttttccctcgcattgcagttggagaaacttgttcagtgccgaatggctagggggcgccaaagctccaggcgtccagcccggcctcagggaccacgggacacacgtaaagactaagtcacatttcaactttcaaaggctattccaataacaatgttttatatagattgccatcacctttatcatgacatcttgcaacagcagagtaaatttgaggcagtgacacggggagaattgtgttttgttatttagccagttttatttgataactgcaagctccctgcccctcccggaacataattgttgcaggaaggatttggactggataaaacttaattttgtgacatgctcgttaattctgttaaacttccaattcatctggtgtttgtagtttttaacataaactagtatttagtgagaaagatgtttaccccctgtgaaggtgcttggcatacaattgctaatcattgcaaaagtagcgaataaccatccgaatagaggtcaggaggctgcatagatctcttttcactaacggagtccagctgacctgattataattagtgtttcctttggtcagcctcgttattttcaccaggtgacctaaaccactcatttctttgagcccactcctgctgctaaagggcaccttgtcgctgcgtgatactggctcctttgcttttcttctgctcagcccccagctggacaagccaccctagggtctctctccttctgacagcactactgtttctcagtgtcctctggggtgtggctatcagtcttactgaccaccaatagacttagaacagaaagagccaaacttctaaaggcaagcagtgttggggacccagttgctaggactcagtggctctcaccctataagcttcaggttttttttcccctttaggggacgtattggtggagacaggaaatctaattttctctccatcagatcgcctgctgggtgagcctcccggaattacatatactgggcttggggatgcattggggaccatcaactgccaacatcacggtggctaacaacactgcaaatgacttttactcacaaataacatcattaagagttcatctatccacttagtccaagaatgattactaagcacctccatgtgccagctgcaggatttcacaggctggctggagtgactcaccagagtccagacagtggtaggcagtgtgacagcagagaaaacagagaggttcaccgggtgcatttataaccctgctggagggatggcaaacctgtccgtgtggtcagaaaaaacttctgagaggtggtggcatttgaattgagtcttaaacaatgtgggagagtccagctgagagaggcaggcaagaagaaagtatgggcatccacagagagtcattctgtgtgcctggagggacgaggggagggctcagaggggatggtgttggcattgtgcatgtgacctgtggaaggcataattctgagatttggaagagaagagaaggtaactggatatactggatggggacagtggtacctgtggcagtggaaatccatggtccagagacaggggctcctcagagttagtgctgtcccgtgtcgtcagacaatctggagatagatgctccagagaaggggcctggacattgggagcccaccccatggaagggaggtttctgctcaggacaatgatactcctgtcatggctttctctcacaatagtgctaccttctacatgtgggcacccacacc

SEQ ID NO: 48665 - DNA, 2189 bp, Homo sapiens
cagtttacataatactagacacatattattttcttttatcttcatacaaccctacattttcagcattctgggaattaaccacaggccccactatctggtgcccagaaagacatgggacacccttggagaggagcacttggcctctttgctgtcctcggacttagtgcagggtggtgggtgccgggtgcggtggatggggctgggcagcaatgatggtgccctttactcttctccatttacctccaaggttcttcatggtctatgactccaaggtctgaaatgatctcatttaccccacatgatagatgtggcccttccagatgaggagttcaacaagactacatggtagagcagccagagaacccactggaaataaggctcaaaataaggagtaaccacaaaataaggtgatttataaaggtgcattaacttatttcactagagaggcagcattttattgagtaaagagcactgggtttttaatctcagagtcaactatacggttctgctgtctgtctaaagatcttggtcaagagtgtctcctttcttcccttgtaaagggatgaatgggaatccccaccttagaatctctatgacattatgaagctggaagtaaataagggacatagacaacctttcagaatcagcaagggttgtcccaatagggtgttggctacaagaattatttcatgaaagaatatctcagggatcacagttgagctgaatctggatcattcttttgacctgtactgaggaaaagacagggatttgagtgcatttagggtgagctggcatttttcacttctcacctctccatgcaatgatgctgtctgctggccccaaaggcactgtatttgccatctctcaccagagccttgtcagagcctgctgcagccaggggctgggcatgcctaagagccgggagccactgttcccaagtgggcattacagggttaacttgtgtctgtggccaaggcacagaatcaaagtaggatgagtcacctcttgtgcatttcttacttcagccctcctgccactttagaagtttctgatgtttaatttcctcgtttcattccagagacagagaatgctgattcactatgcagtgaaacatgcctaacgtgtcaacagctaaatgcccggtgacagtgtggttgtctgggcaacagaagaagtcacccacgcaaacacttaaaggtgagctgtgagagttaagcaagcgggagcttttcactgagtgaactcacgtccacacagggtgcgtgttcagactcacggggcagctccaattatggggaaggtcggagaaattccaggctccgaggagtccaagacagcattccagctcattcctaattttatattcaggttccttaaaacaaaaacttcactatgagacattcaaaccctttgcatgttacagtctgcaaagtttgaaaagcatttccttccttagtgtctctgagttgccctaaatactttctttcaaccagcaggataggggacagtaggtttttgtgactacttaagtcttggcagcaagaatggggccccagaaggcgctagtgtttctggaacaaccgatatcagggcagatgtcttgtgcttggccccttggtgggccacttgcctggagttatgggacagggatgagcatgttcctgcccctgaggagttcatggtcagtaggggaggctgcatagacaaaactcaacccctggactatggctgtggccctggatggcccagaggcccaagaaaatattgggcaagagtacctcttttcttcctctgtaaagggagtaataggaattcacacactacagtcattgtgacaggatgcatgggtgggggtgtgcaggggacttgaagaggccactgcatcccaactttctcttctgctgattatttcctttaaataacttcttgtggatattgcttatgagcagatgccttgctaggtgggaagggggatggaagtgaaaacacataaatcatcatctctgtttgtggaactcgaggtcaggtgtggagagggctgagcaggtgaaactgagtctccaggttggggcatgagccaggggctgaaaggggctctccctgtactggcagggaggattctcttcttccctgctctgtggttgcatgtggcctgccaaccgtttctctgtcacaccatgatgcagtca

SEQ ID NO: 48666 - DNA, 712 bp, Homo sapiens
cctgttttcccacctggtgccatccaggatcctctcttgcatttagttgtcatgtctcatttgcagggtgaccagctcatcctagtttgctctatttgtctcaattttaaaaataaaagttttgcattccaggaagctcatttgtcctgagtcaactgagacagctggtcactctactccttactcttttgcaatctgtggcaatttttagtctgttctcatctttcatgaccatggttcactgctaaagggtgctttttggtatgttgtagaatgttcccagtttgggtctgtctggtgtattctcatgattagacccagggttatggatctggggaggaatatcacagaggcatcttgtccttcttatcatgtcacgttgggggtgctgatgttaacacaagttattaccgtgatgttcgtttggatcgcttggctcaggccggttggccaggttcctccaccgtcatgtgacctttacccctttctgtagtctgttcattagagccactaagtccagccccactcaagggctgtggaataattccagctcctaggaggaagaaggagttttgaatttgtggacatatgttaaaaccactcagtaattgataagtgttttgggggtgaatactttgaggttatgcaaatctcctgtttctccttaaagtttcacctataactgcaggggcatcagtggcttttacctgca

SEQ ID NO: 48667 - DNA, 2077 bp, Homo sapiens
catatccatgatttaaaaaaatcttggctaactaggaatagaaaggaacttccttaactagataaagggtatctatgaaaaacttaactatctgtaaatagatagaatcattgctcatgtatatgtgcatgtatgtatcatatatttatgtctgtgttatattacacacatacacacatctgtagtaatgatcataagatttttcttctttatattttttaaatggtgaatttcatttcattgctagaccttgtattcattggttaaatgtctttaggccatgatgcaatatcttttcataatttgataaattctatttgctaatattttttctttttccatgtcccccatcctcccattcaaaatacagaccaggcacggggcatggtgtatctgaggagaggttaatattttacaaagaattttactgtgacttctttcatgaaagttaccgatctctaactttcatttcttatgatgtctttgtttggtgttggtatcagcctaatgctgagcttctgatatacgttgggaaatattcctttctcctacattttatgcagaaatttgtgtaaaattgctgttacttcttggtaaatgtttgattgatttcatcagtgaagccattgagatctggaattttctttgtgaacagatcttaattacaaattaaatttcattaataaagagtcacttatattctctattcttggggagtcaattttggtaatttatgtctctcattgaagttgctattttattaaaatgccagttttattggcaaaatcttattcattgtatcctcttaaattttttttatctgtcgaatctgtgagtgtatcctcttttttattcttgaatttgtattttctgttctttttattgaattaatctgacttgaattgtgccaacttactgatcttttcaaataaccagattttggtttcatgatttcctctgttgcttgttgtctatttcattggtttcagttatcattgtcatatcgtctcctctatttacatggtgtttaatagacctcctcctagatggaagcttaggtaattcactcattcagctcctcctagatagaagcgaagatgcctccattttttctctgaatgtttttataaacatgttatagttttactttttacatataagtctgtgattcattattaattaatttttgcataaagtataagactttacccttagcttgacatttgttcatttacttttgcctattgatattcaattgcaccagcatcattttttgaaaaaggttatctttgctctgttgaattatttatatacctttgtcaaaaatcagttgggcctatttatgtttatttctgttcattttttaaatctctgtctgtccctctaccaacatcaaatagtcctgattactatagctatataaaaattcttaatattgaatagacttgtttatcccattttatttctctttttcaaaatgattttagctattctaattcatttgcctttccttataagtttcagtataatcttgtctatatcaacaaaattcctgctaagattttaatagagatttcattaaatcagtatttaaattgacaactttactgtgttgagttttccagctcataaatgtgttatgtctgtcacacacatgccttgttagatttacatctaaatattttacattccactagtgagaatgcctagcactatgttggctaagagtaatgagaggagacattcttatgtagttactgatgttaggacacatccagtctgtcatcattaggtgtaatgtgagctgtaggttttgtgcagctgcttcataccaagatgaggaagttcacctgcactcttatttttctgagagctttcactatgaataagtgttgaatttttttcaaatgcttcttctgctttgattgctaagatcatgtaattgttccttttttgcctgttgatatggtgcattatgttgattgatttttgaatactgaactagctttgcaaccctggagtaaacgccacgtagttatagtgtatacttctttttatgtattacagcattctatta

SEQ ID NO: 48668 - DNA, 3767 bp, Homo sapiens
gccctcagaagattcattggaaaatcaacttgcaaaatatagattaataaaggcatacacatttatttaacatgtgtacacagagaccttcagaatgaagacccaaagattcaggggaaattgtccacttttgtgcttaggttcaacaaagtacgaacagttttgaagaaatacgactggacaaaaaaggacatgatctaatgctaatagatggagtggggaaacccaacaaggcctgtctgtcaatatttctcttggcctctctgagtggcattccttccttctgggtgtaaagcaggaccctctctggaatgggggggtcttatgacctatagtcaagcaaggtagatcaggtaactttttttctttttaagttatttttttacatggccagtttttacatagaaaggtggagaaaaaattagagtactatttttaggttttatgactgtctttggggaaaagagattctggtttctatgagccaccttacagaatgggaattctagtttctatggcaagcctcaggggagaatgggactgagagacaggaaggcatgaaaagtcaaagaaaatcttttgtttctgaggctgattctgaggctttcattttgggctactgttttctgaaccccaacagtgtattttgaagtctggtagtgtgatgccttcagcttcagctttgctctttttgctaaagattgcagtaggcaattacaaatactcctgaaacaaatgaaaaaaaatagaaagtggaatcaaagaaaagaaactgtgaaagagaactgaaaggaaatgatagaactgaaaaatacaatgactgaaatttaaaacttactgtataggcttgttaacaggatgaatataaaagaaagaatcagtgaacttgaagatggagcaatataattacctaatacaaacaacagtgagaaaactgtgagacagtaacacagatctaacatttgtaccatcagagtcccagagggagggcaataaaagggtggggctgagaaactaactgaagaaacaaaggctgaaaatgtctcagatttgacaaagaatgtagagcaacactttaaaaaagccgagtgttctccaaacaagataagcctaaataattacaaaacaaaacacatcataattgaactttagaaaactaaagacaaaaaaagaaaaaaaaaaaaagcattgatccttgggcacccatggatgaagaggctccgagagatgctgcataggtggaaaaaccaagaccaggagtgggaaccagatccaaagctgaacatttcagaggatcctgagtgtcagatgtccagggcagcattgctgatgttccccaggactctgacctcagggacggttcagagaagctgcagctgtacgacacagggaagaaaacaaaattaaagagcagagaatttagggttttgacagcccaaggttataaccctccaccatctaaagaggagatagccaagaaattgggaaaaagtgaagtcagcacacacctcattgcaattcagagcattgctaggatgcagttgttccatatatgtagcaaatatttcaactgacattcagatcttcacaagcaccacaggatccctgctcatgagaaggtctacagtggaaagaagatgggaaaggcttcagatatgggttgaaatagtcatggcaccagaaaatccacactgggaagaagccctgctcacatcaagcatgtagacaatgccttcactgggcattgggaaggaggaaagaaaggaggaaagaaagtccttccttctgcaacatcagaaacttcataatggagagaagccctagaaatgtggggacttggggaaaaccttcagatataatggaacacttattcagcatcagagaacccacactggggagaaaccctttgaatgtaaggaatatgaacatgcttttcggttcatgagtgtgcattcacactaaggagaaaccctacaaatgtaaagggtgtgggtgtagttttagtcttcctctgtcctgattcagcatcacagagtctacagggagagaaatgttatgaatgtaaagagcatgcagggccttctgccagaggtgggtaattcttcagcaccagagattccatgctgggaaaccgtctgtgaacttggggaatgctggcaaaggctccctgtgtctcttgcttcacagtgcagcaaggaacacacactgggggagaatttcatgaatgccaggaatgtgagaaagcatccagttgaaaaatcatctaggttctgcatcagagtttgcactggggagaaactttatgagtgtaaggtgtgtgggacaacagccttccaatggggcacagctttcagttttactcagcatcaaaaattgcactttgggaggccgaggtgggggaatcacaaggtcaggagttcaagaccagcctggccaagatggtgaaactccatctctacaagaaatataaaaattagtggggcacggtggcaggcgcctgtaatcccagctactcgggaggggaggctgaagcaggagaatcacttgcaccccgggggcggatattgcagtgagccgagatcgcaccactgcactccagcttgggtgacagagtgagactcggtctcaaaaaaaaaaaaaaaattgcacaacgggaagaaaggcacccatggttctgggctgctcttttctgtccccctccccttcttgccaatgcttgtggtctgccccagttgtgaccctctcccctcctccccacctctagtgccccttctccctctatgccccttttatgctattcttttcttttgagtacatctccttcaggaccttgcttcctctggaagtcactcctcatagcctgaaagctttgtctcactccctatgaactcctttatgttttcattacccatcaataatggcccaaagtgagcagggttctcactggtttcccatcatgtctttaatgacactttcctggtcttgcagaagttattatcactttcccaactccttttcaatttctcacattaaagaccacttttaatgactctgactctatcccctgggaaggaaatggactatctatttagtttgccctgctttgggggttactggagttggaagagtttgtagaagatttggggttttaggagattgtgtcatcacaagtcacagaccattgtaattggagaagccttctggaagaggccatcagagaaggcacccagtggttgccctcgggatggatgatgagccatttggttggtcaggggcaaggctcattgtgcggaaccggagtcttggtatttttaattgccctcataatttttattaccagttatgagtatcctgggtgactatgtcatagaccaagaaaataacctctgaacagaatgtgagtgattaatttaaaattatggctttaactagactggaagggaatgtggtttttctgtttggatttcttttctattcttattcagatgtctgttaacttcagtgttcactccaatccatagatgccaagagtgaagtgggctggggcatttcatttctaaaagtacacatggcatggagtcagcagcttcacgctgggaagtgcccgagaaaaggggaggagcgatgcacccctggcctgctgagaggagtctgtgccagcctcacttctgatgcctcacagctctctgacacgattgcatcccccagatgcctcacggagaaaatgtgaatttgggactggtgacacgtcaattaatttcacaaca

SEQ ID NO: 48669 - DNA, 4298 bp, Homo sapiens
caatgttactgaggattccagcatgactgtaaatgctctgcttttaactgttcagttggatgaaacttgacaaatattacagtggtgaaactgtgacaaaaattaagacatagagcattcccatcacctcagaaatttcccctttactgtccatcacccaacttgtcccagccccagaaagctgctgattgcattcagtgactacacattcacttcgatgttttagatttcctaacaaaaaattatactgtatggagttttttatgtctggcttctgtcaaaaaacaacactccatgaatattttcaagtttttgcatgatctgggcttttaagcaaaaagtcctggccacctgggctgaaggatgattgatggtaaccatgtctgggaagttagagatggggagttattccagaaacactatggttcatctgctctgcagccattagcttacattccaaagggcaatggacctgaaggcttctccttcccacctgagaggatctgtttatgtcaaaaaaaaaaaaaaacaaaaaaaccaggtttctctctttcctccagagggggagccaggcagctgtaccagccacccacataagctgcaagatttatgatttggagctccttcttgtggcacaaaccaaatcacatgtgtaggtgcccactgctcttcttgcatcgtcccatggggaggggctgcatggggaactgacacaagatgctctgtgaatcatcaggtctgtcttggatccagaacaacatgcttcctgtcagaaccaaccaaccaaccaaccaaccaacgacccaaccaatgcatacatgtagaaaagacttcacggcttctttccctcagccttgttttagagacccacccacattcatgtgtgtatcagtagtggctttcgttttattgctgagtaatattgaattgtgtagacacacacaaaaaaatgtcaacggtagaccaccataaaaattttctaggaaagttcaaaacttatttttaatacacacactcacacgcacacacacacatgcccatacacacaaacacacacattatggtggtctaccattgacatttttgacaatactttcattttaatgccagtagacatactcctcttgcaaatcccactggctctaagaaaagcatattcagcttgcatgcatgtgaccctaaaagtcaggtgaaaatctaaaaggaaaagcaggtactcctgtgtatttgcctgtgttagggggaagaaaaacttggagactttagcaaaaaacaaacaaacaaacaaaacagaacaaaacaaaaaatccttctaaggatacattgtcatttctcctaaacattcgggccattatcagcaggctgtggtgttaagtcttgttttttcctttctcacttccatttttagcccacagaactaaatctaactcattttaggtagtgcaatgtgagacacatcatttgatgcttctgacactgaggtcccacagctgtgaaggagtgtcatgttccctggtccacccaccatttagggcatcaaatcctggggctctctacacaaacagatcttgtagatctacatgtttctgacaactatgttgcagcagatagcaactacttgctggaggaagggtggcttttctaatgcattgtaaaggcagtttgggctggttgtggaacagaaagtgctgtgtggactggatgactgttctagccacacactgtggagggtgaggtgcccgctccttccacagtgtcacaagttgatgtcgagcctgcagagcagaagctgtgaagcacctgcctctcctgagggcagcctggaggcatcacctgctgagttgtctctaccaagctgaaacacacacagaaacctcctttagcaattctccacgtggaccagtcactggaattgcagtgccctgggcaagagattagtgagatttcaccagctaagcagggctgggctttagtaatgcttgttaggggatttccaaatggtgtggggagagaatgtgtaatgccttccccaccttttgggtgatatcacctttgagtaaaacatagtaaacaaagtaaaaaatcctgagggcaagccaacgaggattctggggaaggaatttctactaagcagggtagtgctttctccatggccctgaatcacctggcagggactcagccttggaggtttcttacaccacaagatcatctgtctcaaacgtagccagggggaagttaagggcaaaagctgatgtcagagacccctagaggcccctagagtagtggctcccagttgctagatgacagcattgtgcactgttcctcaggacactctactttgtttagtttgtataaaccagtgacctttgcttctgcttaggccacatgtttctgggtaactttgccacccatgtacatcgtacaaagttcaaaagttggggcatttctctgcctcctcctgttgcctcatcagggataactctgagttatcattaaaacataatggatacattttaaacaaattttaaaatgagatttttgtattatcctatttttattaaaatatcgtttgcaaatctaattctcattttcctgattgtattttttttttccatttccaagccaaaaaggattacaagaattttaactttggcttcttaaaaagagctaacttgttctggagcactatttgcctttttgctcctcaggtcgagaccactcatctcaggcacgcagaggctgtctgtgactatcccaattaaacaacttgcaagatccttcaagccagaattcagggtcggctccaagtgagggacacttcactgttctcttccacaaccagactatcatctctgccctaagaggagctgacaagtccacctagcagactaaagagttgtgtaccaggagtctcaaagctgtcttctgatgacccacagctacctttctgggggtcctggggaggtcactttcctcatctaggtcttaatccctttttatgagattgagagttctgaatgagaactacaaagaactgtttaattcttgccatccaatggctagaggagcatttggcgtgtgccagatattccccgctggccccagggacctcctctgcacccctttctgccctactgtgctccctaacaggcggacctctaccagtgttatttctgggtcccctgccctccagcccctggttgggggtggccagtaagattcactaggtattaaacccaagagacagatatttcttcactgttagcaaagtcagtcaggcaccaggagaatgtctctgtgggtgtcacttaagggactttggacacctatgcttaggcttgttcaaataaatgacatgtgagtactttgcagtttgatagttctatgaatcatgaatacagtgcaatgaaaacgtcaacctataatgttaccagggattaattgctatggattatcattcttctctgccttgctttctgcaaacataacattattccttaaaaaacatatacacttatgtgcacaaacacatgcacacatgatgtttttagactaattaacataattaaaattttctgaaatagttaagtggaatagacttttttccaaaaatgacagtttcttctccagtgaagaagaaaagacacctcataatttaaacatttcatttgaaaatatattctcagaaatgtataatgtagatattgctttaaaacaagctcatcttatgaatatttctccaatttgtctgtaagtttgccaatttttttctccttgggtcagggtgcagatatgtagtgtgtatcaattagcatgatatatctgcaatgtttatattaaaaattacgaaaaacatgcttctcgaaacatgtaactagataccagttaagggagtctctggtagccatgaaaattgcactcaggggacccataaggttagcattacattggaacagatgattgcctaagatttgtagctgtggggacaaagcttttgtcagatcattaaatcatataacatcataaccccttctgcaggaagtctgggagccaaaatgggattgctgaaatttatgagcagaagcacatgcagtttactagataacttgaaataggtagagcaaaattggaacctcccgactcactgaacttgctctccccaggcagctgttgcaaatggccatggtttccatgaagagtgcacagatggctccgtcctcacaacttccttagaaagatggaaaatggaacttgtcttgatgacagtgtctgctaggttcatcaacttctgaaatgtg

SEQ ID NO: 48670 - DNA, 2696 bp, Homo sapiens
ggggttagtttgttttcctgtagaatttacctttttattattacataatatacatcttcttctctgataaatcctgcttgttctgaagtctactttgttggatattaatatataacaaagctcctattttgtttttattagtatttttatggtatatcagtcttcattcttttaacttatgtatgcctttatattaaaagtgagtttctcaaagatgccataaatgtaggtcttgcttttattagaatctaatctgacaactctgtcttccaattaatgtgtttattcacactatttacatttaaactgtttattgatttgattgggttaaccctattttactagctattttatactggttccaatagttctttgtttcttgtgtcttttttatcttctctaggtttactcaagcattttatgtattttcctttggtcttctctactgacttatttagttttttattttaacctttttagtggttaccctagagttaaaaatatatgctatttgatatatttgatcctaaaacatttgccttaggtagcgatctcagaataagcaccatgtacaaatatgttaataattacattgcattcttcacaggagacatttttagtttctctaaatgcccaaccacatatcaaaggttaaatcaactgtggcacacacaccctttggtgagatgattacccaatattacaaaaatcattacaaggcagatataaagatggttttaaacaaaagtgtttgaagcttcagatataaacaaagaaaaacaggtttaacctgtactgagtactggctgtgacctcttgctttccttacctatagaataccagtagtgacatagtttctcaccaggtttgctgtctgtaagactaagtaaattactaatgaaaatgcttgaacattctggctaggtcagggaaggaagagagcgcatattaggtttctttctgtgtgagatgcattatggactgaaaaaaaatgctgacaagtccttggtttgaaactaagctctaccacttattagttatacaaacttgttcaggtttttgaacctttctgtgagttcgttatttggtctaagtggaaataagctacccattaacagggttgataaggggatcaggtgcggagaaaggcataaattagtttggctactcaattagctttatggaataaatgtatcattgtcttctccttaggacatggttctgtaggtgctgaccacaaacatagtgagacaaagcaataatcagtcttgtctatttcattaaaaataatactaggatatactgaaggcttattatttgccaagttcttggtgtgcatgtgagaatttcatgtcagccacagctcaaaaaacaaaaccaatcaaacctatatattttaagtaaaaaaaaaaaaaaaaaaaaaagatagagctgggtgccttgtagtgttgcagtacccagtctttcaagatttagaaaaggcttgaggttcattgcaataagttgcgtatatccagaaagaatctcagaaaaggccttaatgaaagtcattccttttaaagaacttgggaagagagagaggggaggtgcttggatatgaagctttgaacagctcttttgaatgaagcaaagctgtcctctttaggtaattatattccacaaaggaaatctggcttcatttgccttagcgtattttttgttggttttttttttaggaacacaaaagcaaggaagtttctaacttccatttacttctttcatgacttgtctttgtcccattctcttttctgtctgcacctgtggcttagtgcaaaagatcacttgtctgcagtgcagaggggaaattctttgctctcagcctggctggggttttcctgaatgagggaatggggtgagatgttgagggcatttgcccatacatggaaacaaagcctttatctgcctaaagtggagaggcaaatgggtggtttttatatgcattgcaattaccactttattttttcattaaaagtgagtctaaccttttaaaatatatcatttatagtggactgggacagttcagttgtctttgctgtcgatttaatagccagaggacagaatatgaggttgaattttattgtttacattagagtaaaggaccaaatgaatcttttaacaagttgaacaaaattttgcaatgaacactggacttttagtgactagattttttttacagattcattaaatttaaaaataaatattccctctcacgatcagaattatttcatatatgtggatatataaacatatatgtaataatctatgcatacaaaagtctagtcaatttatgctcttgagaactcaagcaaacttttggagcttgaggttgggagttgggccgggtgaagttgagtaactaagacacctagagcagttgtatcttttgttagtccagttcataagaagctttataaatattaacttgaaatgcttcaagttcatggtaggacatttctgagttgagttcccagctctgcagtatctagcagcatgatttcaggtgagctgcttcatatgtgctgagcttcacattccttatccctaaagccaggagtgtggtgtctaccatgtttatcatgagggttttcttagctataaatatctatgaacacttaagaagttattattaatgcatcagacgatttaattcttaatgg

SEQ ID NO: 48671 - DNA, 551 bp, Homo sapiens
gcaatctcggctcactgcatctagggtctcttttataaaaacactaatacaatttgtgaggctccactctcatgtcctaatcacctcccacaaacctacttcctaatatatcccccttggggtttaggattttaacatataaattattggaggataaaaacattcagtccatagaagtcaccaaactggttctactcacagtgtaactgcaaggccagtgccagactgtcatgaaataactactagccttgagaatctaggagaatttatgttggaaacttagcaatctgaccttgctgtgatgttcaggtgcacaatcaatgaacatgactcatcagattacagacagattttagtgctgtggaactcaaatgggcagtctccaatggcatgagctgtgtcaggcagacaagaacgtcataccagtctgataattaattaaaaaacaaaaacaaaatcaactggttcttcactaaagtgaatttgagaaacactttcttagcactggaagtaattgctagagatggagtgagattatcatcagtgttcta

SEQ ID NO: 48672 - DNA, 2543 bp, Homo sapiens
ctcttcaagctggcttagcaaattggttagttacaaactgcttcagatcccagaaacaaaacctggatgagatttttctctcttttgttttatgtccttgagtgcttaaccttatgaccatacggggatacttttcttttggtctgtgccatccagaagacaggaatttggaggttcatgtcatagccctaaaaattatcttgagcaattaaaaactttggaaagctcaaaactgactgctctagactccttttgggaagaacaatagaaactacccagtgctgtagctcagtagttaaggtttctgtcttttcacaatgacagtctgggttcaattcccagcttagggaatgagtcctttatggtttgatatttgtgtgacctttgcaatttattgattcttttcccctccctgaacaacttctgacttcctgtcttgaatgtccctttctctgagctacctttggaagttctagatcttgtaaaaaatgctaactacctctttgaaaatacttaatatacctatggttaaataatcttagttaaggcttatttgtctcacctgggaggttacctttggtaaagtccaacagccagaaatattagctgtttgtcctggctagagtcaggtaacaagagctttaaaagaattttttaaaagaatactatggttaaaagtcagctcaactaatagcaaatatgccagctatacatatatttaagaggcctctgtgttttttttttatcttcttggattttatttttctaaataaaaagtttgttatttttttacttggtcgactgaataacttttctccagtttgttttcatgccactcttgatgcccacgtaagaggacttaagatgatttctaacaccctgggtctcctagggaaaaacagaagaggcaccacagatcctgtttggggaaatacctctgtttttcacatggaacccagggaattgaaagcaggtagatccctctcgaaatagaaggctgtgttttgttttgcattgcattacctgacatttttgtcttttgggaatatcagaaattactttggattatgagaaagctttcagctctgctgtgtaataactaggtaggaaatatacgtttcaggatgactaatggcagttatgggggatactctgctctttgcacatttgaatcagaggaacatgctcttggccacctagaaggcatgaaaaaatctccaccccccactgtgataagactccattgagggatgggctgatttcctcttttttggttgggatctaggacctgttataaaatgatacccttaatttgggggatctgttttgccttccagttgtgtcttcttattgggccctaaaaactgcatgctttcctggccctgttccttgtagggctccacactgaagccggtaatccaactaagaaacttaaaactggcaaattaaaaatcttacaactactggattttcttctgtctgtttatttatatgtgttgtgtgtttgatgtttatataaatgagctctaattaatttgcttaaagaaaaataagtgcttaaatcaaatattttgtcaaaacaataaaaactttaatgcttcttaattcacgtgactttagtgatatttaataaataaagagttttaaacattattggtaaaataaaaatgtgttcaaaacttacacatttggtctaaattaggcaggacagatactgtttttactaaaactacataaactgtatctttgacttgataatttttcaacttacctcattgggaactgttggattctaaagaaggcttggggacatgtggagttagccacgccccctggctatgctgaaaagagtatttgtacttccgtctggtatccttggctccatgcctggtacataattgaaatagcttacctaccaggtttttcaccaaaaatgaaagttgctaagagttatcattgtaacgtacgtgaccgagactactaaagaacagttttacatgatggtgtataagaaaactagaatgtgttttctgtgaaaaaaaaataagtgtaagaatgtaggttttttttttcttttgcctggtttagaaggttaaaggattgttttaggttagacaggataaagccaaaggtttgagtggttcatgaaagattactcttataaaagaaattatatgtatgaatatattctctaaagttaaaaggatactattgatttgttctgcaaattgaacatcaacacaacatggtgttcattgatctgttccttagcaaaaaaaatgtaaaggattgtaaaaggtttaagagaatcttaccttatggccaaactgattaagcctggatacttcgtctataggtctcattaaggatagaatttgaccttaattgtacactaatgcaaaaggtgaaatttggctttctctcttgaagtatatttttacgtaatacaaaaaaagaaagatttttgtttggcttttgaatacgctacagaaaatagaaaagaaaaaaaagaaattgtttggaaagctgaatcttccttctat

SEQ ID NO: 48673 - DNA, 3539 bp, Homo sapiens
aatgaacccctcctttttgaccaaggaaatcccctgaaaaaaaatcctgaaaaattagttcaggccatgaaaggaaggggagggttgaatgtgccttgttatacccttccccatttaaactttaggcacaactgagcagcattaacatttaaatagagaccataagactgacaagacagactctttgtggcaataacataccaaattataaccaggacctaagaccatgccaggcaagggttaagtcacacactcctaggcttaaaaagtatactctgttctaactgccacaaggtttatcttcttctcaagcagccaaacaagcactggccccaagataagcaacgttaaaacaaatggcatctcttctagatgctgactaactgaccccagcccctattccgccagctataactgcagctttaattagacaaaagactgatttcagtgactttatccagataaaaagaccacagaccatggcctaattctggctggtttacagaaattaagcccttttgtaattagatctatttgtgtcctaaatagacctattgatgtacaagacctaattttaatatatttagacgttaagtctccaccccaaaataagcatgggccatatgttatacagatgtttattcaatacacatgtgtcaggaccacctccgtaaatattcatagctccccctgcaacctgttaaaaatgtgtgtttaatcaacctgttgtgatatctccacaggagctctgagtacaattaacagtgggaaacaaacttattgacttacttattgatatcagggtcatatattttatagttattacttgtctatcccctgactgaaaacgaaacagaacaaaaatgatgacgattgcaggaatgtcaaagaaagtatgagtcatccttttcttgcaatgtttagattatcatcttagagaccacagtaaacacacaagaaaccctgaatgttgggtgtatattcaaaataaattggaaaacatctctgccctccaggacatgaatgaacaaattaatgcaatgcccaaacctatgatgttactaaaccagtggttctcttttttgtttgagtcaggaccctcctggtgaaaaaaaaaaaaaaaaaactactcatcattctggctatgtttctaggaataggccatacttctttactgtgggttatgctgttgctatacaacatacatagggttacaggatcacttttcccagatcttaccccctcatccaatgatgctttgacatgttacccctgtgatcccaggaacacagaaatatttcaaactccaagaaagtaagttccattcctcaggcacctagcaaggcctgcagccagcaggaagtagtcagaatgaagtcgacaccctgataccccgtagaaatggaatggacattgacagtgggaagtttgtaatctatatggccagtttgctagcttactctatatgtgtggactgtttctgggctcttcatttattccattgatctattcttccatccttttatcaacaccacaaaatcttaataatgtaattatcaaataattgtgaatgtcagctgatgcaaaacctacttcctttacaagaagatctttgtcattcttggctgtatacaatataatactatatcaattatagaatcatctcattatgtctctctgtctctctttctctctcctctctctctccctccctccctctctctttcacacacacataccaatgcacacacgtgcacactcacatgcacacacacacacacatgctcacacacatacacacacatcctgcaaagatgtttattgttacctcactaaatctacacattaatttgaagaaacttaacatcttttcaatgttgtgtctttctaagtgtaaacataatatttagatattctttaattcattccagtaatgttttatgtattttttttctagagatcttgtttctactttgttagacttattccttggtatttaacataattgaagttataaatggtatatattttacttatttgtatacggacattcaaatctataaacatccttttaaattttgctttaactttattctagaggttttgatatgtagtgcctggcacatgataggtggtcaataagtatctgtggaattctcattataagggttgagcaggttgacctctgagttcattgtcagttatgactatctagaatttttggatgttgtagttatgtcaagttttctattacatagttaaatgtaggaaaatgcccaacaaccatggttgcattttggtatttatttaacttcttaaaacttgttatcaccatggtgttgaaaaaaaattcttttgagctttttcactaatcaaacaaatgagtcactaaagaggctggtgatgagtcatctgaatgcaagcatttatcccagttatgcaaatgaaagatctgattagagtggtagatccaaaatctgagtcccaaagttcaccaaggtgaaacacttttaaaacctcagagtggtcgtcaatttattaaaaatttagttataagatagatgactacatccatgattaggaagattaagggacaatttagtgcttctatggtcattttatctataagctttcttttgacccaagctctcctttacagcaatgaaatacaatatgaataatattcacttgtgaagtccacaaaagattttgtcttttctcatgccatacaggtggcccaaaccaaattcatggttctccctcaaatcaccactatcctcccagtgactcagacttttaatttccttgatattctgtttagttaacaatgaaaattagtgttttaattatacaggtttaaaaatgataatacggctgatcgaagtataaagagataaaaatcacttgaaattagaccatcttgaaataaatactgtaaacattttggtgatcatttattcatgcacatctttatatgtttaaatcaccatcttcatataatactttctttttgtcttggacgtattttacttttttatggcattacccctctctcattcctcatcacatgcatcaatatctccaaatcaccagatatacaatgttaacagcaagatgtgtatccttccataatattcttcatcaaatgaatatatgttcatatacagctttttcattgtcttgtgtttatttaaaaacaaagaatatattcagaactctaaaacccagtaataaggtaacaaacaacccaattaaaaaatggacaaaaaattagaacagatactgaagaaggtactaaatagatgacaaataagcacatgaaagagatgctcaatatcattagtcattatggaaatataaagaaaaatcacaattatatacttactagaatgatcaaaattggaaacaatgactacaagggtgctgacaataatgtggaggaactgaaactctaatccacagtctgtggaaatataaattggtacaatcacattggaaaacagtttaacagcttcctataaagttaaacatccactgac

SEQ ID NO: 48674 - DNA, 1747 bp, Homo sapiens
tccttacctcacaccatatacaaaactaacatgtcagatccactcttaatttatcattttcctttataatccatgagccatatatcatcaggaaagtatgtatgcaggtgtgtatgtatgtatgtatgtatctatcatctgtctatctctctgtttatatattaaatataaactttgatgtcagagagccctatgttcaaattccagatctattaactttccttgtataaactaggaaaagttatttaagacctttaacctagttctttcaactgtatagagggataataatgcttatatcacgtgatgtttgggaagattaagtaatataacatggctaaattgtaactggttttggcagagaaattacaatcaacaaaaatcatttcactctacctctttcctaggatagcttaatcaattgtaaattacttatcatatctgtccatttctttgtattattaggatattgctcatgagaagttctccttttaattccaacagcttctagtgtctttgcctctggtgtcatactgataactaccccaagacaatctcctaatgcagacatatgttgatctgagtttctgggcaaacctttatttcttgcttctttgtccccttccgtgacaccaaaaccttcaagaatatagaaactgaggatctcccacattccaaaaagaataaaagaagcagctacattttattttctcttaaacctcaaattgtgctgactcaagaaaacgagatgtacactgaggcttctgatataagattccagtgagcagaggtcaggactgtacccaccttactgctcatgttgttgccaaaagcattattcaactcacttttggttccaaaaggcatacaataaaataagtttcaacaagtttgaactcttcaaattaggcaatgtttgagcatgtcatttctcaacagctaagttaatattttcttgccctgaaattaaaaaaaaaaacaactttccactgatctaaaatactaacatagactcaactttctcatcatcataatcagagtaaattggtgcaagcttaaacaaggtacaaagcacattggtttaataaccatattttcaccttaggataataaatgtgaattgctgggaatgaggacattatttatacaccacacttcttaagagtgttagaagcttgtgcagctcaggaagaatttcagtggaaattgtcaatgctacttataaggccctgaccgattattgtttcagagaggatcaaatcatgggtttggtctggtaactgctttttagacatgctttgttaaactggaataaggttccttaaaaatcatttaagaatctttgacagagaaaagagagattatctgtagccggaggctgtgtttcctagcctgcttatcagtaggaaagtaaaaatgtttatagaaaaatatcagcaaagtggtcttcttcaaaatacttgcttcatttttattctactttatgatttgtgtagaaagaatgaggcttcagttcagcttggtacagagaaaagtgcagttcatttttacttcctggctgaaggatcaagggctaatgcattttgtggcatcttctttctcctgcaagctcttggaggtacagaaataaagcttccttgcccctgtgtctctgcgtgtatccaatgcggagcagaaatcctcgcctagcctacaatgggcttgtggaaagagcaagaaataaacctttcattttgtaacccccagg

SEQ ID NO: 48675 - DNA, 1234 bp, Homo sapiens
ggtcacaatgccactgaacgtgatacacctatcctatgtactaccagtaatgcactaactccttccccagaagcagaggtaaagccctgagtgatgtttattcttctccttggtattctataacttaaattttataatgtaaattaacaatatttaaatactacaatacgaaataaatacatcttatgttacaaggcaacaagataagacagaataaaagatacacatacatatgcataaaaacatactcagaacaaagtaaggagaaagtgcttgtgacaattgcagtcatgagtcatttttctgtaactggtcatgtgtttgtagctggtatttataactaccttcttccactatccattctgtattccctttgactttagcaagcacctcagccaattgtggttctttacctggtaggatgacccaaaccttcattcctgaagggtctgggccattagatggcctgaatatattagctttttgtggttttccattgactttaatcacaggacatggtaatattaagagatgctctaagtattccagacatactctacctccactagggagtagtagttcagtgtccccttggtaatctggatcagtcatgccagccaacacagtaaattcttggcctgttgactcagaagggagatcccaaaggtggtggatggcactcttaacttcctgtttaatgaaatcatgattttgtcttctggtgggaacatttctttttccaggatgaagacttctaggtcagcagagcataaagtcatggaagcaggaagaaaacattttgctaatgggacactaggggaagtcatgagtagtgtcacttcaattttgaaccttgatttctggacctaagaattttggctatcagacaaacagcaccaaatattggatgctgattcagaacatagtcttctggagaacactgcctcaaccctcaaggtattatcacctagctggtcctgtaaccaagacttcaaatggccattcaaccattctatcaagatggctacttcaggatagtgggggatgtggtaagactagtgagttcctgaacatgagaccattgccacatttcttaagctattaagtgagttccttgatcagaagcagtgctgtatggaaaaacatgatggtggaataacatgaagacaggattttgccccaaagtgctaaagccctaaagacagttgaggcattctgtgagtccaccaaaggt

SEQ ID NO: 48676 - DNA, 1003 bp, Homo sapiens
ctactgacaggcagtccctactccccaggtgtcctttgtggccttttaaaagacttccagacacgtgtttccccgtggttcctgtgatgtgctctacatgtcatgtgggatcctgtacaagtctcttgcagcacaattgacctgagcacatactgttctataatacataacaattacaaaaacccacaacagaagaagaaagaggagaaattgccatggaaaggcttctccttctttatataccaattctcctccccaagagccatgccaccttggactgggagtccatccacccttgaacttcaaagttcagctatttcacaagtggtcaactctttcttgggaaaatcccaaacaacctcagaggggataggtaaatggagtttgttttccaagagtcatgtggtttcctctgagtctgtctttgatttatttaatgattcaaaagataccttaagtctaacttgctgtggagagatatttatttctatttccccctccctcatctacaaaagccctagtttgtaccttcctcagcataaaaccatacattctgataactgagaattttcttgaaaaattaccatatgttatatacaatttttatttctcagttacacctcaataaagccaaggaaaataaattttaaaataacttttaaaaatatagcctgatgttataaagacagtagtatgtgcaaaataaatattataaaagtagattctagttagtaatgtttagaaatgatactttgaaactgaaaccattagcaaacttaaaaaaatgaaacctgctgacctaaacaagtggatgcgtcattcttttctgggtggcagtgttgcagagcctgcattagcaccacgtgggcgagagccttgtctttcttctgcagcaggtgaagcaggcagcgctctcaggcggtactaaatctagagtccttcgggacccacccagaggtgccatttggagatggttggttcggggatgagacaaaggaagtgg

SEQ ID NO: 48677 - DNA, 1063 bp, Homo sapiens
agagtaatgtaacaaatgtttttaaaatttacatagcttcttcccaaactgcatttccaattagtaattaaaatcaaattattttatctctcctaatactttatcttccacctgactttaaatatgaaaaataaaagcataaatatcttatttttaaaaaggaaaaatattctatagatattgaatattttcaatagaaaaagatctttacatttaaaaaatagaagaaatcacaaaagataataattctatactttaacacatcaaagttaaaaagtaatatataaactttcagtttctagtctattaaaatagagagaagcttagaagccaccactcatacccacacaactagaactaagctgaacaaactgaaaatcaataatgtttttcagatccgtcagataatagaggccatagggcactgctgcctggaaaactggagaggcaggtaccaagaatcatagcctgctggggcagaggcccaggagcagaggcccacagctgagctaatacttgaactgcaattagcaaatactggtgacccaaagtggactagcttgaaagttaaaaacaccaagggatcgaatattagagggatccacactctttcttgcgtgttacctccaggagccccaccaggttctcagaattattacagaaaaattccctcaagcttccagcagaggggaggaaaagtaaccattttgaaatatgcttaaagaactcttttttccttaataaagtccagcccacaggcaaactatttcactcaagaccagctgacttgggtcttattgccttaccaatgtggggaaataaaaatatccaactcaacccctgctagcttttgacttgggaaaaggaaaggaaaatactaaaatctagccatttctagccttcttttcctacctaaatggaggcgggagggagctaggaagtaattctaaaggtcacagcccagaggcacagtctcactaagagactaagattgaatgatggtattacaggagacacccccctcgccacctccacatcagttagccttctgtataataacagg

SEQ ID NO: 48678 - DNA, 986 bp, Homo sapiens
ccctaaagtgaaaaagcagaatgcaaaaacagctagcaagcaaataaatcttggaatatattggtaaggctaaaaaatattgatgaaaaatatgtgtttatgtgtgtaaaattataatgcagagtgtgtttaaagccagtctttctgccatgggagatactgccttcccagggctgctgcggtgatggccgtcattcacttttgctttctaggaacctgggaacatttctctgatgccaacaaccatggatgtctggcattattttctgccctaatgatgaaattaaatgatgtttaattttgtaattattaccaaataacatacgatatattacagcagtgcctcatggaaaacctgttccccgaggatgagtttaagaataacttattttgagtttaaatatgagtttaagaataacttattttgggctcattaagcacttggggcagttccaggggattttgaggcacagcttgtgaccagcagtaaatcagtggctaggtcaaatgagagagtttaaagaaatccaactaatttataagaagaaaccaatttgagtaaaatgacggtatttaattttaaattttctttagaagttataggagaaaacaaaactaatggtaataataactataaatgaatgttcattggaactctgcttaaatttatttggatttactttaggaaacttctggtttcactccaaagctactggaatgtcaggcatttacagaaaatcttcacagaagcagcttacagatgtgggttctcagctcattgcctgcacgtcccatcgaaaatggatccagatactggaaacaagacacgtgaaaagaataaaaatgagcagaaaacagtgttatccaggcagtattgcataaggctttgagttaaatcaattggtacacatcaataacctccacttttacccttaacattaccgaatttatacactcattacacattgccaaaatgtgtgtaaaat

SEQ ID NO: 48679 - DNA, 1657 bp, Homo sapiens
gctctttggcaatatggatggggggcacttaagcacctcaaaaagaatgtgagcaggtatcaagacattcgtcttgaatgtgtttcaatagattgaaatactagtaatttgagctttactctttattgattattggtaacaatttatttaggacatacctgaggacaaaggactcagaaaactcttgtcctggtgggcagagttgtccacccacagtgggccaggagatgccgtttaatttggcaccgcttttaagcaaagattaaaaatgctttgaggacagagagagaaaaagagcaaaccaaagtatctaaacacaggaccaaggaatttcttcttaaaaagcggggtcactcaaccctcagtagccctaatcccaagttaaagactggctaatgcaggtgaatcaactctagcttgttttagcctctcagtgctcaggggctggtttgctgttttcccataaactgcaactacccagttgagggctaaaggttagtgagctttggccagcagccatttcttagcagctaaatcacaagtgtctagaaaacttatcttgctctgtatttgtttcccatgggccccagggactctgactccaaggtcaaacatgacaaagtcaatcctgcaactggtttccttgacccagaggatatctttatatcctcaaaatatggactaggaactctgaactgacaagccagacttctaaccccatcccggaccccattagtagtggcagaggccaagtggcctccccaaagtgctgtgggctctggtcttcagctgctgatagcagttgcatggtactaagctcagtccccttgttacatataccacaatgcatgcccgtgtttctgtatgtgtgtacctcactactcatggacttgcttttactgtgacacatggaagctcaaaacgctaaagtgcaaaggtcacaggtgactagataaatgataagcaaacaatgtggttctaattttaatttctgcaaatactctcaggtgtaccatcaaattaaatttactgtaagtactgaagtagatttcctagaaaccaagcttaaaagtctatataaaattaatgttattttaaatactattttagttcctccttttctttttaaaatatcaaacatatatgatttggcaggcctccctgtgaggatatctcattttgagatatggctgaaaaaaaatctgattttcagatgttcaagctagtaaatacccagagatggctgtccagagtcacctccctatgcagacctggctttcctgcagcttgcttttctctatccatcaggcaccattccaggctgctcatcctcccgacgttttctgatctcatggctgacctgctgtccaggtttctagctttccagggtgatgcagacctcaacacctctctatttttactatagctgaataaagcccaggatttttttctgaataaggtttctattgctgtaaaatattcagcctgtggacaagagcaaacaaatgagtgatgctagaaatgtgagacatgagtctggacctctagagttctcacaggcagtgagttcttgccagtggctggctgctctcttaggcagtgcctggaagtccctctatccctcccttttctccatgattcctgagggcagagctgg

SEQ ID NO: 48680 - DNA, 694 bp, Homo sapiens
gatcttcaaaactttctcttcacccagggcaggttgcattccctgatggagcccgactcacacctgggcaggtggcatcaagcaagtactttcatccaattggccttgatacctagttggtagtggtttcagaataccattcctctgaaggaagatgccttccaaataaattttattcagaggagctgtaggagccaccctggggaggagagaagggcaagaaggagggttttcatgttcctgctgtcaaccttcagccacagtcccagtggttggggatatctcattatatcttatttaaagaaggagatttcataacccaaaacttgaaaactactaaattgcacaatcctgtaaaggtccctttacctctgtcatctcaactttgttaagtacttatgtcatcattatttaacttctcttggaaaatgtaagcgattatctaatcaagtcattgaatatctgttcttccttttttctttcccttttcctttctcccttccttccttatttccttcctttcttctttcctccttgcttttcatgctgtcctgcctttcattttttctctctttaaatttagaggtttcaaagtgtttgttagaaattaatattttgtgcttttataaattattaaatattggctttcaaaagaagtttacccattccatggaccaaatgataaataataatc

SEQ ID NO: 48681 - DNA, 1847 bp, Homo sapiens
aaaatatttttatagaaaacatctaaaaattaacgatgaaattaatttatggtgtcttttacaagttttggagcacaaataaggaaatatttaacaactgaattttaaatttaccaaagcactttgcaaaggatttggttatttagggaattttttttctaactttgtaacaacaaaataaatgtggatgaaattcagaaaccttaggcaacatccattgtttcacaataactatgggcaccagagtccccacaggtcacaccatgtgtaaataataacaccagctatactgggaagttgaaatgcttccatgtgtaacagtgctgggggcgcttctctgaaaacggaacactcgacatggaaactttttattccctaaattgttccagatagttggtgacagatttaaagtataattgtttaacatggacaagtaaaaacatttttcagaaagacaaaatgttgtggcagtatttttttcttcttctgatagaatctttattttaatcagatacctactcccccagtcaacctgtttgcctccgggaaagcataaactctttcttagacccctgggcacaatgaatttaactacagtcacaacctgtcccccatcagtgggtcttagcaatgggcttgtagaacaattaaggccaaatgaaagcatgaagatatttccctgtggcctctagaaaaattatcttttggttctcatcctctctccctcttcccttctttctcctctcttttctacccccacttcttttttctcttcctcctcctcctcttcctcctcttcttgttcttcttgttctttttcttctcctctttctcctcctcctcctcctccttctccttctcctcctctctctctctccatgttttaatgcaaagatgtgaaatactgagaatggaggacagagatatgaatgggcaatggccagaccagacataaaaataaaactctgacccacaatctgtggcaaactgcccagaaagccaactcatacactacagtaccagcccaggaaaccagcctgagatctatgagtcagactcataggaagccagaccactctaacaactggttcaggaggctaaacaataacccctgtaataattagtcccaaagggctaagacatgattgataactggcagcttccctgatattgtccctgctttcaactaaggaccaaccagagaaagccaaatatgcttccctaaccaatcacgtaggcagcctctcttctagtgagccgcctcagctttccaaggcaggctgtctgaactgcaacagggctcacctgtttcccactgtgaagcttcccctctcctctgcctgcctgtgattcttggccaaatgcggtgatggtggctggcccccttgctagagcagctctgggtgaatggcctttgcctgttctcattgggagatcttcatttagatgatactaaacagatcatctctctgctagtacaggcttaaatggatgtgcataagagagcatcccagagaatcagaagtgggccctgactgagcacatcctgaggcctccctgtctcagatccccaagtggcaaactcataaatgtctttcattattagtgccaatttccctttgtgtttctatcactgattttaagtcaacatagaacttaaaattgggagcgctaacataatagactaaaatgtcaagctaactgagggaagggcagcaaggacccccatctgctaggttgggaaatggattaaagcactgtgttatgggccaaacagtactgctgcatttgggaatatggcaggaaaccagacatttaggagaggactgtattcaggcaattgtgaa

SEQ ID NO: 48682 - DNA, 1499 bp, Homo sapiens
atatctacatcgtgctggacaaaaatataaatggttccttgtgtggctttggaacccagattctcctgcatcatcattctacattggtgccatgagggccagacactctcacaacactgcccttcttgctgaaaatatcagtaatctccttcaaacagataacttgacttcaccagacttttttcagcacttggcagctatataaactttttattagtccatttattgtttattttgcactgttttgttttaagcataaaggggtgaagtactaaaatatgtttagggcccatatcccattaaatcacagatactcagtatggctgagcaaatgtttacttcccagggtcagcctaaacaaaacgaaaacagcagtcccaaatatttcctttgcagaataatcacaaaggctgtctctcctgaaatcttaatcctaatcttaaatatttgctgtcctaaaatgaggaaagtcctgtcagtaattgtattatctgttcttcttcatgctcatcataaatgccaaagggtaattcttcctagaaaaatcaatctttagtgataacacgcaatgtgtttttaattaatgaagctgcttgatgctggcagactggaagtatcttatcatcacatgctggggaattcacacagggtcctgtctgtgcatgccgatccctggagccaaagaaaaatctcctgtcattaaatcctctgctgaactagcctacatactaaataggcagaggatcacgccagccatcatgctggataagtgtatcaagatataacgcatgccagaagctgatgaaatactttggcaagagcagtgaccagttttgttataataagttgtggtttatctccagtgtggaggggagaaaactcatttatgattgctcaatattcttgagcaaaatacgactgtcatctgaatccagagtagaagagaggatttttgtttctttgtttctacgtttattttgtttttaagaggaaaagcagcttctcagttgatgggcagtgggaacaacactggatttgtgaagagggctcactgtgattgagtcacttcacttttttccttgctcctatacttggtacaagtcccctaccctctccaagactcatttcctcctttctaaaatgaggacaagagcacccacttcaggatgaacacacaagttaaagcgttgaagcacattgtaggctatacagataaagacattgttattctttctagaaataataattatttgtttcttacagactccactaaagtgagagttggaactaaacattctccaacattccttttaaaaaattatcaaattattagtttttaattccaaaattttaggttttagtttgtaggcctgattaacaaaagctacttttatttatttatttatttttttccgtgtgtagccaaaattgaatgtaggcatgaaatgcagggaatttttggataatgggacagagaggtatttattgtttcagaaagc

SEQ ID NO: 48683 - DNA, 537 bp, Homo sapiens
cttttccttacccatgaccaactctaaataggagcacctagtgtctgttgcagggccctggcggggagggggggtggcagcaagtgaggacaaagctgccaagggctagcagtaaccagtcaacgggtcctaccatctgagttcctatgacaagttccccacctacatggtgaggtgttttagagctgtggtcaaacgttttatataaacaagagctgagaccacaaactattaagtgcaacatgtcagttaataattatttagtgtccagagccaagaaagtacttctcacacagagtgtccttgaaaagagaaccatgatatttacaatgccaagaggacttttgtgaagcaaggctatgtgtgaagcaaggctatgtgtgaagcaagtatgcaaatgcagactgggctaggccaagtttggctccatttggaataaaagctttctttttctctgcttctactacatgcaacaactattttatttggttgctttattagcaagtaagtggagctgcagaaaagattaatacaaat

SEQ ID NO: 48684 - DNA, 556 bp, Homo sapiens
accctgaatgctacagctgcttcccaagtatgaagctgaacaaatgaattttctcaccaacttgctcacatgtctgacctgacagtgcacctgtacctcagctcctcctctctgcagtccgcctagggccctccccactacactaaagagaggcgttacctgtcctaggaatagcacactgttccctgctctccccccaccatgccccagcagcttcccaagcttggcattcctaccaattcatgtaagccaatcccaaaggactctatttatagttttcaaatattggcacatgagctgcttccagcctgccaggtactttctgagaaagaacacagtacagctctctcttgctcgctctgcctctctccctcctacctctctccttctgtgtgtgtctctctctctccccaaatgctgcttttaagcctatcagccccttcaccagggactgtgaacacaaagaccaatgcaaaaaacatcttcaactgaagccattccaaattggaaacaagccaccatccatggagagtttgggatggtttggaaaaaagta

SEQ ID NO: 48685 - DNA, 1113 bp, Homo sapiens
ccaggtcagaaggcctcctgtgtctccggggcagtgtggtcttctttcaggagagagtgagtcatcactgaaggagaacagagcgaaggctgcacagtccagcagtactgggcccagactctcagcccctttctggccctgccacgctaagataggatcatctccctcatggatgcagctgatgtgtgcgtgagcacacgcttgccaggcaactggccagcaccggctgtctctgcaacgcggaatttacaaatgcccttcccgtgaggaaggaagagtaacccgattgattctccgctaccaagcaagccctctgccactttacagtgcagtaactgcttacaatgattccccttctcgggaatcgcttttctagctcttcctctacagtcggggagctgagcccccagaagccagcagtcacactagtagggcagggcagagcccgcttgaccccttccttgggaggggggcctagcgccggggcgcgtttcctcttcgcgctgccctgtcctggcccgccactggagccggtagcccgcagggcagcgggggcggaggcgaccctgggggtggcctgtgggcccccctgcgagatctcgacggttcctatctattccattctccctccccgtctccctgagccccgcccctgggtcccttgctggagccgctcaccccctcccccgcaggcgttgtgctgggcccggggcaacttccccagaacgtccggccaccctgcgcggaagcacgcctggcagagctgctgagccaggctcaggtcgcggagtagcggcgctccggaccggcggaacacggcgtcctcggctcagcttcggaagcgcccccgccccgcccggcgagcccgggaatggcgcgcgcgccccctgccggccacaccgggaccagcggcacccacagagggcgcgcgggcagggcgcgaggcggcaggcccctctcttcctcccgaccctcgcaggctgagcacatcaaaaggcaggcttccttatgggtgctttcgttgaaattcagcattgtggccagtcttgaaagtacaaaaaaaaaagagggcaaatgtgctgcaccactttaacacaacttcagtgaccctgt

SEQ ID NO: 48686 - DNA, 1292 bp, Homo sapiens
tgaagattccttgccaggcaacatctgaatcacttaatgtgtactaactcatctgattctcaccacaatcttggcatgtaagcctgattgcttttcccatttgacaaatgggagaagctaaataacttgtcattgtactagagtgtatacaaggcagagccaagatttgaagccaggcaacgtggctccagcatccacatttctaaccactaaattttccatttcactagctttccattttgaacctagccactaacatatgcagccctcatctttgcaaataaagttttaaaatacggccttctgtagtaagtgacgctgcccaccagggggcaggactgccccacaatgctctcagtcactcccttcattcactacagtccctggcccactgaggttgtaaattgagctcaaacctttctgtgaaaatgcagggcaaagggcagaaagagggaaccactcaggggaaatggctcactggggacgtgtgtgcacagaagtcctctccgtgccatagcagaggacacaggctctggaatcccgtgggccaagttttcgcaacattctgtgctagttggctggatgcctctatacaaagaaattaaagcaaagagaaaagcagggggtaaaggggaccatagaagaaaaaattcttcatatttttctttgcctgtctcccgaccatagccaaatcactaaacttttctgaccctgaccttcatgatctgtaaaatggggatgggccagctgctatgtgacccctggagaagaaacgtcccgtcagcagggcccctcctgtcagggagaacctcagccgccttcaacagctcatttccaggcagctaaggtcacctcactcttcttgagcccttcagtgtggagctgccattgcagctctaacaagttaatcataagccacccctcatggcgccagggcgaggctgtttatagacttatcaactcatgacacacagggtggttcacgtgacttaagctttgagtcctatatcttggcccagatggcaggaaggatgctttgacccatgaccactctggtttgttcctgggttggacattccttgggctttcttcagtagagggaagcttgaatacataaaccatagctaacatgggaagtgcagacattgcgttctgcaagcagtaggcactcaaccaatgtctgctgtgctgtcctaatcggctgaatgtggcacaggaatccaggagagtcgatacggcctgggaaaccatgcagaatctccccaaggaggaggcacttctccatattcatt

SEQ ID NO: 48687 - DNA, 1160 bp, Homo sapiens
cttgctgagtgcccttttcatttgagacactaaaccttgaaataggtattttggtgcaggattgaaatacgagagcatcaagcattgggaccctgcccagggtcatctactggtcagtgtcaggggcactgaacgggtctgaccagcaaaacccacgttctgctttgtgctcatttttttcagcagatgaagggtgatgagctaaacctgcctaaactcacttattcctgaagctacagaggggaagatcctgccttcaacctcccaggtggtttgggcagatgaagaaaatgtcttgcttctagggacatgggcaccacagagaggcatgggggccctgctcggggagcatcctgggaaagcagccaggctggtctgagtgtcccctgccggcctgtctgctgtgatggctgctgccatcatgctgctgccacggttgatgccaacgtgcctcctcaaccacacaatacaaaataattgcatctgaaatgctctgttcctaggccacaggctgcactcagggatggcattctggagggagggagacaggaacagccctgtggctgctctgttccatgcttatgctgggcattcagtaaagatccacatggagaacatctgctccagcataactggctcagtaacagctcaggcgtaagtcatttgaaattggccaacggaaatagtacatatcaaggtcatacgctcacctgaaaggaaatgaccctctgttaaaacaataggttccaagatcattggactctgatcatagtatcagagtgtttttaaggaactgagttaaaagattttttgcatttgcaattatgtgtgtatgtgtgtaattttaaaacgccaaacgtctttttttattttattttactgatttctaagaaaaatagccttgcaaacaaatgctaagagttcctatgtggttcccaggacgtatttaatgacagaaaaatacctagacagaccctgggtgactcatgacctcaaagacggctaatgatttacctggatgactactcacactagggaagaacaagaggaacgtgacagccccgcccctgctggacggctcctgcctccctctaggcactcacttcctctgattgtctgtcagggtgatgccctgggctgacaccttgaagtgcacaact

SEQ ID NO: 48688 - DNA, 1286 bp, Homo sapiens
tgagttacaaccgcatatttggagggtaaaaagttagatagctaagccccataggtcaaagacttaagtcaggcagggccaacactaaccatgatttcttcacttggagctgaaaatgacttcagatgttcgcaatattgtaattcatgacctaaagcaattgaaaggtgggtaaatattggctgcaaacgaaaacacaaccaagtccactatgctgagatgacagcatggattaagacccagcccagtctaaaagggagaggaaaaggcaatcacaaaataatgctgtgatgcgtccaacagagatctgtagaaacctctcctggggcagagtctcaggagaacactttcattttccctggccttatgtaagtgccctcggtaagaaacaaccagcaacagcactatttgtttgtgaaaacttcttgagcaggcaacacctttgtttacaagtcgggtcactggagcgaggttctagagccagcaaccatgaacacaaaattcaagtggccgtggatttgtccaagcaggggcagcaagatgaagcatgtgtttacaaactgtggacctgagagccgagaccagggagggagcaagccggatcaggcccctggagccctgccagactcctgatgagcccgctgcccgcatgaattcctgaacagggttacataacgcctcggctgccctccccatggcactgtctgacaatgccatatttactaaacctcttgaggttctgcccttttgaaaggagcagacttaagaatctgaccttttgggaaaagcacactgcaaagatgggatgggtcaggtgtgcagctgggaggggccaagcagggatgggctggctgtgtcgaggcgaaggcagacggtgggtcaaggtcagctttgctgttgcctgcagcagctccatctgctagtaactgagtccagggagtggcaagtggggctctgttttcccaagtcactttctgcagttagacttgactctggcccttccttctctgtgaacttgaccactgtgatctttgccagtaagtcccagtgcagaggccctcatgaggaaagccaggcagatgtccctgcaggcaaggcagacaccagaaccacggaggggaaaactcaaagaggacaagaggccttttgaaggaggaggattaaggatggctaccccgcctgggaagccactttccgccttcaaaagtacacagacagcctcagaaaacacccagactgagggcaccaagccatctgcagtcttcagggtgtaaatctatgcacat

SEQ ID NO: 48689 - DNA, 1258 bp, Homo sapiens
tttttaatagaggcaaggttccactctctaggtgttttgaaaagagagctgcctgctcacgtcctcagaagccttcccaagctgtggtttccttgtggaccctatcgccaatgtcaatcaaatccaagcccttagtgattagagtttccatgagatagaaacacaagttgcttcttttgttctcttgttttccagggtgaaaaaacccagacagcaaagcctcccacccagcctctgcccagcccatgcctccctcacctgtgtccctgttggcatgctcttatcacagccttcaacacccaaataagagaaagagaaaagggaggcccaggtagaatctgtggttaaggttaaacctgcaaaaggtaagcctgcaaagaccgccctgttccaggctgcctttttttttttttttttttttttttgagtctcactgtcgcccaggctggagtgcagtggcatgatcacggctgactgcagcctctcagtgacttctcgggctcagatcatcctcccacctcatcctctcaagtagctgggactacatgcatgtaccaccaaatacggctaatttttgttttttttttgtagagatgggggtctcgccatgttgtccaggctgctctgacgctcaagcaatccactggcctcggtctcccagagtgctgggatcacaggcatgagcttccgtgcccggccagactgctctttagaagcattttccttctacaggtcctggagctcatcctggccacgtgacaaactggccccatgggctcaatgaggtcaatgaggtcactaaactccctttctcttccggtaaaatgacagctgtggatcaaacacttggaggtcatcccagtcctggactccctgagtcagtgagtgaaaagtgaggagaggcattcctcagataaaaaattagatgcactgcctggagggtcattctggttccacatatgtttgtttgtttgtttgtttgtttgtttgtttgtttgtttttgagatggagtcttgctctgttgcccaggacagagcacttcctagtgtgtcacagcagtgggcgagagcagactaagcggcaggaaggcaaaaacacctcttttgggagaaagtagcctagccttatggcaaagcacacaggctccacatcaggcagtctgggtccaagttaagggtccaccgcttggcacctgcagcctcaggaaaggtcctccactcgcctaggcctcatctccctcctctttccaggactgtg

SEQ ID NO: 48690 - DNA, 4668 bp, Homo sapiens
gcagtgagccgagatggtgccactgcactccagcctgggcaacagagcgagactccatctccaataaataaataaatcaaaagaaacaaaagccacggataaatccacaaggaagcaggactatgaacagcccggtgacgagagacacagatcacagctgccgggccatgtgtgaggtgaggacaattaaacaggttgggctgagacacctctgcacattctgtttttgtttcaccaagcaaatggagaagaaataaatgtaaaatctttttcaaaggcaacaacctgaacaacattcagctggcaaatttcaaggcatttatttgttcatccttcattgattcctccaccacccagcacatacgacttgggggttcagcacacactctttgtaatactaatgcctgggtaggcagccagctctactgctcgagtaagccgtctgatcttgggaatttacttgccctctgtgtgactcagttttctcatctggaaaagggagacagaaacagcattcttggaaggattaaataaggaaacataaacatagggcttagaacagtgcctggccagtaataagtgccaaagaaatattagctacttattccatcatcttatttctgtgtcaggcctctgtgaggccctggaaatgcactttatccacaagttattaggatcccccttagatcacaaaaccagctgtgaccacaatgcccatttaacagtaggagaaacaatgctcagagagggtaagtgattttcccaaagccacacagttaataagacatttttttcccttccagaacaagaataccaggaaccaattaattgtcaggattgcccaacttgattttctgcttaatgcttttaaacataagcagcaatcgttaagaactgccagagaaagtacaccccatggagggtgggaaactaaaataaagtcatcttgtcattttaccttcatgttcaactatgagaaacaacagactaagattgtatctctatttatttgtaacgaaatagtcacaggatcctgcctccctggccaggagctcaggctggtttggaaccatatggaaggaggcagctcaggaagactggcagcagggagaggtaagcaacactcagggaggacacagagatgtcagcatttccaaagaagtcggaagctcccctttgctcttctcacaaataagtttcccaagaaggggcagatggggcggatggttcttaggacacaaggtcccaccgaacatctgcagcattgaagtgaaaggggaaaaatgacttggaaatgccccttcactgcaaagcagccagtaccggaggccacagaggagggtggccagggacagacaaagtgcccagtgccagcccagccgagaggcggcacgtggggagttgggaacttactgtgctgggcctgggcagggaccaccggccagggctgcttttcccttccagaaacagctcctcctacgtttcgctccttcccctgctttagtcaagcacacccctcttcgtgttaatgtctcggcagctctgggcataaaggaggcagctggaatagcccaccaggtgggagagcctggtgagtgtgggagtccccagaaccacagccaggagcagctggcaggtgtgcccggccccacggtgagcacgcaggcatggagctcacaggacaatgtccgcccggggctgagggccagcctgccgagggccagcctgccaagggcctgagggacaggaacaagaacagcgctctccgggagagccttctgaccaggaagctgagtggctgtgccttcctggggactagccactagggagaaccgcctctcaaaagttcccccaggaaaaacaaaacctacttcgagctgctgggagggcaggttactcacctctgtatcccaggtaacagatgcctgatgcccactggccttcctccctccctctttccttcctctcccccaaccccattctctcctttaccacttccttccttagttcatttttgctccacttcattccaaatagaatttgagatgactcatcgaatgaattcaacataactaaataaaatttttaaaataaaaaccaaaccaataaacaagcacaaaaacagggttaaagacaagagtggccaggccagagagaaggaaaggtatgcagcgaaacctcagttatgggaatgaggcaccagacggttctgagttacaaaacgggagatggaggccggatacacggcagatcttggtgacatagagtcccggacctgcccgaggcgggtttatttcctcacttagcactcagagctaagaggaagggtggccagcccgggccacatcgtgtcctcagctgttagactcacccaggcagctgtttaaactgatctcactgatctcatgactacatggtcagtcacgtccctttaactgacagggagatttgtgtgtgcttttttgtaacatcttacatgcacttacattcttttatttttatcacttatttcataacgaaaacatttcttcacatagaaaagtggaccaagggaggggaggtggggagggcctcattgggcccccagcataaccctatcagtgggcagggtgttctgggggcgcccattccactggaaaccacgtggtgtctccttccaggctgaacacaaacagggggccccagtttataactagccaggggtgcactgctcagaccaggctcagctccacaaggcagcctgcgcttcctgccacctgcccaccatttggcaggggcagacacagcagtgacggcagggggtcaaaataggaccacctgtccctttactggccacagtcatcagacccggagacactaaacaggactttaactcctccgagcattggtttccacctctgtgaaactagctgacaacaccaccagcctcccaggatctctgtggggactaagaagatgcctcaaggcaccaagcccaagccagcagcactcatcatcagccctgggggagagaggagggttgcatgtgttgtttccagtccaactcccgcattttacaatggaggaaaggccatggggaggggctgctctgggggggcaacagctgggcagggtgtggcaccctgaggacaggccagtttattccttacttcatggtgacagaaaacaggccgagccctagagagccagctctctcaaagtacccccaatgggagtgtcctcaactgcaggcagcggccagccaggcagagccaggcagggggctcccatccataggcgagcaagttagcaagggcggcctgggagggaagtgccttctctagaaggtgacaacattgttaatgagcccgtgttaatgtcagtcatctccggagtctgaaagtgccctgcagcaggtgggaggggttatgtatgctgagtccactctggagtatgccctgcagagctgcgttctgtcctgttagatgtcccacccaaactcacacagatccccctgcagagagcctggaaaccagcccctcagggcacagcacaggcatcccaaggacagccccaccaaacccccagcatacagatacctggtcctgtccacatgggatgtcgggggtgctgacgggggcaagacccacagatgctgaccaccatgggccacagagataggtctctggccctgcagccagctggttccatacaatagctcaatgtttgcaaggctgagggaagggcctaattcacccaccccagcctggccaactctgatgggcaaaggggctgcccagagaatgctgagaggatcaccccaactcagaccaggaccatacctgcctccacacccagaagggcacagcagggcttttgctttagaatgaagagctaatgaattgcactgacactgacagagcagccttaacctggagtttatcccacaataatcagattcatatggataaccctggaaacaacaagcagagagggctctgagcagccctgcttccctttcatatccacaaatgcaaacaagtatttgcaggagggctagcccatttcaggcactgcagggagaatgcaggtgtgacagaggggaaagaccaggatggactgaaaactgaatggatgagaatcctgtcctggaggtgctggataagtacacatttaagaccccataaaggagagagaaggcagtgccagaggtggcggcgatgggcacctgggagaagaagagctcgtctccagctctagaaaccacggccactttgcagatccatcagggcagctcttgggataggccaggatggctagaaagcatctgatacaaagtgggcgcctgtggcagaggtggggcaggaggagcaaattccttcagaggacagagtctgggcagagaaatggaggcacactgcgtgtggtgggtggggcagccaggagtgacacacgccatgctcacaggatgcatgagaaagaggctcaagcccgggctcaaggagcccaaatgccagatgatgaatccatgacgatgaaaggtgtcagaagtttctgcataggggagtgacacaatctcaattgtttttaacaaggtttagtggtagtagcagcagcaagattaatataaggggaacactgggcagtggacgacataggtggaaatgtcaggcccaagagcagacagct

SEQ ID NO: 48691 - DNA, 2030 bp, Homo sapiens
ggaagagaggggaggggaagggaggggaggggaggggaggggagaggcaaccacctcgatgtatcctctgtccattcctgtggcgtaaatactgccaccatggttcattctaagctagctgggtaattccactgaagatggagtggggatgtgtgagtgatctcactcaattcctcactaaaatgttctctttttataggtgtggaaatgatgcccttgatatctaattgacctgatcagtgctctaggccagggcctacagctcctccccacttccacacacgtcatggataggcaacctatctcagagacaggcccttctcactccaaatagcttcaacagcctccaagaggccactcctcctaatcactctccctttcatcttcccactttctccactaaattaacttcgttaccacttctgaaacccaagctatcaaaaacccatcaccaccatggtttcctgccactcaagcacctagaatgctccctatttctatagagctccaagtcagtcccctccaaccactacacactatggtgccctccatccatctaccaccactcatcctttctgcagaggcagagcgtattacagttgaaggaccatgggaaaggacttggaggcagggagcctgactcaaatcctagctctgccctacagacaggttactctgggtagtcagtgagccctgtcgcctcagtgtcctcatctgtaaaaacagggacaatgacagggacccagcactgtcctcaggtgcaccctgaacttgctcctagcagctcacaagcagaagcttgagcctatcaggagactctgggaagaggacatagtctgaggcaccaaaaaaaggaagtatatctgctcaggtcaatcctaaaacctattgagacagtacgtctcatgccaaaataatgtcaatatgccacatacatgacgtttacactacacagaaacatgggtgatcttactcaatttcttacaggtgaggaaataatgtccttggtatctaactgacccgttcaaggtcatctggttagtcagctgaggccacgtctgcccaggatgagtgctctaggccagggcccacgggctcctcccaactcccacacacacacgccatgggacagtcacctggggctctgccaaagggcagcttcactagctgagcacagggcatccatttcccttttaaacatggggacagatgtgtcctctaacctctgaggcttccatctggaagtgcctcatgagtcagtggctcacatttagaacagctgtgcctcctggatgccccaaccttttttctccctcatttctatcccagagagattagatgtcctgtacaaattggatctgaaaatgataataaaataaaatgtaatataaaacaagatgaaataaaatcagtctgcgctgggatgagctgtgaaaaacggggctgctcaagccacctcctgtgagcacaagccaaccacagacgaagccttctgcatgaggaacaagcagtccccccatcccttcccgcaggtgcaggcttgcagctcgggagtcagaccccaggcatgtaggtcccaggccatctgaggagcctgtgtagacccctgtggctgaagagcagggcctcactgcccttgagaggctagctctgagaaccagctttttaaataacaagtaccacctactttcattcttatgataaaagttacttggttatagaaaattcagaaagtagacatatacaaaaagaagcagacagaatcagcctctctctccctcccataccccaagataaccaactttagccagataggatggacccctaaataagtacgggcgactttcttccgcccatacttatttaaaagccaaatggtgctttatgtccatatcactatattttcttctgcactgcaatttttaacagtggcatagtacccaattatccagatggaacataatccctctttaacagcatgttttttggtctcaaatttcccactcttatgaatgatgctatgagaaaca

SEQ ID NO: 48692 - DNA, 793 bp, Homo sapiens
gggaaagagcatattcccgcctttgggaagcttacagtgagatgaggggacacaggcaggtgtaaacataagacagtgagccccgcattaagtgttgtatgtcaagaaatgagtacattggaagctgaaccaggctgagcaaagccacattcatgtgtgagtcttttctgcttactggttagaatgaaactgcatcttgccctccaaggaccacataaatgaggtcactccaaaaccacctctacaggcttcccaccaaccatggatctgctgtctccctgttcgttccatgagacaatatggaatgcatggcctgagccagctggctgggctccacaatggagcactagagaattggctgtccccgctcccactgaggggctcagtcagccaagactctagcagtgcagaagtaggaactagatgaagaccgaaggggcccagggccttcctcaccacccctgtccaggaacatcattgttactactgaggagccgggcactgcatgcccactgcatgcctgaagccagcaggctgggctctgcagtcccgcactgtgtttcttctgtcaattcaaaagctgaccaaatgaccactgcgtctgctcccaaccctgcaaatgccagttgtaccagttattgtaattgcagagcttaataaaatactgcagaaatcaatgaaatgtgagcaaaaaaggatttgttactgctgcaaacactgaagtttttgagagccttgcgtgaggcagtcagtaaaactcatcaaatttctgtagggcagctggggcagagtc

SEQ ID NO: 48693 - DNA, 1667 bp, Homo sapiens
tgccataaccctagacaaattaacacaggaacagaaaacaaaacaccacatgttctcacatgggaactgagcacactgagcacacgtgaacataaacatgggaacagtaaacactgggaactgcccaagtgaggagagtgggagagggacgtgaattgaaaaaccacctattgggtactatgctccttacctgggtccaacacacctgggtaacaatcatacacatgtacactctatatctaaaataaaagctgaagtttttaaactttaaaaacaactttaaaaatcttaaaataaataagtaaaatatgtgaccactctagaatctgtgccataaaagaaaagaaatcccactcaacctgatttttcttgtctgctgcagacgtccagtcatcagacttggcagcattcattcattcgaaacactgcttacaggtgagtccagggaccacacgacaatacttcagccaaaggtgcctttggtgcgtccagccctgacctggcccacctgtcactttaggaagagatccccagcgcagagaaatgcagcaaccctgaaccacagacgcaggtaatggtcagggctgatgggaatccagtgtctgtgagccacacacctgcagcccaggcctcctagccggagtgggtttttaatcattagccaaggctttgtgctcccgggtggatgtaagctgacaccagggttaatatgttccctgctgttgaccgttcacaattccctccacctgcagaggtgggacaatagcttcaggaacagtatccaacccaccactttcaaattccagctacaaagggagagcgcctgcttgtgtgaggctcacattgacgggtgtgttttgttttttgtttttttttaatgtgttgaaggtttttcgtctttctcagcaggtcagtgaactgagacctgtgggctcctgactgtggatgaggagtctgcctgaagggaaggccaaggctgctgggaagcctcctcactggggcgcagttcccagaaaccctttggaaatagccaaaggcctgtatgttattttaggcgtgagaggagacggtgaaatcaaaggaaaagtgtggatcaaagttcagcctgtggggagaaggggtgagggtgggggtgccacaaccacaggcatcagtcccagaagactgtgcccacagggtcatgatggcctcactaggcaattgtgcagatgctaaggggagcagctggaaacagaggccggggccaaggggcagggaccatcctggtaaccatctcaccgtctcgtctctgggaactgggctgagctctgaagggcagccgtcctgggtcccactcacccatggagtcattcaggatggaatggaagggggtcttcctttccaaccttggctcccactgacttagtgcctgactcctgcaggcagctccagggcacccgcgggccctgccagcctttcctggaagagccctggggtgacagaagcctcacaatcccgcccagttcgaatgacagttcatcaccagaagctcctcttttaaacacgttccactaacatcttctgctgtttatctgcccattctcaaagtctgctccatctgagcagaatgcggcagtttggagaaggggcctcagccaggcttgcccaggagccacctccccctcggg

SEQ ID NO: 48694 - DNA, 2008 bp, Homo sapiens
cttgttgctctggtcacttcctctgtctggctttctgagttcaagtaaaacatactgagcaagtctcaacacacacacacacacacacacacacacaacacacataaaaaaacctcacacacaacacctcacacaacacacaaaacagcacacaaaaaacacctcacacacaacacacacaaaacacctcacaaacaatacacatcacatacacaaaacacttcacacacaacacacacacataaacacacacagcacacacacctcacataacccacacaacacacacaaaacacctcacaacacacacaaaacacttcacacacaacacaacacatacacaaaataagcaacacatacacaaaacacaacacaaacaacacacactacacatacaacacacactgcaacacacacacaacacctcacacaatacacacaacacagacatgtacacacacacaacacaggcatgtacacacacaacacacttcagcacaacacacacagcacaacacacacacctcacaacacacacaagacacacctcacacacaaaacacctcacacacaacacttcacacacaacacacaccacaacacacacaaaaaacacctcacacacacaaaacacctcacacataatacacacaacacacacagcacagacatgtacacacacaacacacctcagcacaacacacaacacacaaagcacaacacacacacctcacacacaacacacaaagcacaacacacacacctcacacacaacacacacgacagacacacctcacacacaaaacacctcacacacaacacttcacacacaacacacacaccgcaacacacacaaaaaaaaacacctcacacacacaggtaacacctcacacaatacaacacatgcaacacacacaaaacactacacacactgcaacgcactcaaagcacctcacacgcaacacacaacacacacacctcacacaacagacaacagacaactcacacacaaaaacacacctcacgtacaacacacacactgcatcacacaacacacaaacacaacatacacacacaaaacacctcacacacaccacagaccacagacacacgcatcttgcacacagagctgtgcaaaggtggagtgtgagctccagcctcaggctgaaatgtgagccctgcagtcaccttggagggaactagcccactggcctcgggtgaggtgaaccaagagaagcaccgccctgatgactcagccactattcttacccaacccctcttccagggccacagaccacagtggccaaggccaagcaagaacaatcacagcgtgagtgcaggcagctggtgcgggctcgggacctgcccggagctggatcaggcactgccctgaaccctcccacaccagaggccgccaccagaaggcggagacaccggcctccttcaaggacagtggcccctctgtaaacaggcggcacttccccggggggggggccaggccctccctggactcaggctggctgtgggctgcccaggaggccgggcggggaagtgggtcccatacatggcctcggggtgtcctagtgaaggctgccctgcacctgagggcatcaagatttgctggtatgaatcaatcgcttgcagagtgtatgaaggtaaacacaggatggaaaaaaacaaggacactctgcccttgaacttcaatcaaaagctgtggggccaccattcggaccactgttaggccgcagcatcatgaaaagatcctgcaaacctgcaactaccaaggacagactcgcatgcgcccttgttctgaccgtggtgcctccaagtctgcaaatgcgggatcacaggaatcatctactgtgtctgtcatcggtgccctcaccctcaggaagcaggggacacgctctggaactcatcagactggttctctccatcaggagaaccagatcaacaatgaatggcacacagcaaaggctgtgggcaccagaagaaccgcactgccaac

SEQ ID NO: 48695 - DNA, 2300 bp, Homo sapiens
ttactgatagaaaggcagctcccgcaaaggcgcagcggatcctcttctctaaaaaaccatgcaaatggccagtgcagcatggtcaaaggacctcagatagagccttgtgaatgcaagctacaggtcaaagggagggcatggatcctagaggaagccaaaagatccccaaagagggagcagcttcaagaaaggacttagtcctttcttggatggaacaagggagccaaagaaatgcaaagggcttacctgttccagtcggacttgcacaccgcagggaatcaccacctttcaaagagagaagaaacagataagcaaatggattctccaggaaaaaattagcataataatcaagccaggctcccaaagactgaatgaaactgtctctaacctcactctggctacaaagctgtagcagatcaagactgacaagatttagagttaagagagtccagggttttgttcacttttggaaagtccctgtcatttttgctaatgtcatggaaaccatggggcctccccttccagaaaaatgcaaatcactcatagatacaaaatttagcccccactttcacaaagaactggtagacctcaaggatggaaacctctgagtcggtccgtgcttggggagcttgggagcggggcccagagaaggaggtggaaggctctgcctggtggtcttcaagaccccactcctcccatcctcacccaggggcatgcattctctacacaaggggccatcttttctagaactatttctacaagtagaactgaagagtctgaatgtggcaatgtcaacctggttattccattccgcacaagagacggggagaggagactttgactccaccatagtctctgaagaccgagagctccctgggaaagataaagaaagtaacggaggcaaggtggctcaaacacagtcaggagaggcagttagtaacaggcacagggagccaccagtcctgcagggcaaagaccccaccttgggcaggatctccaccacttactagccacaggaccttggcctttaatctctctgggcctcagtttccacatctgaaaactgcaggtaacaatagtgccttccgggcagggtcatggtgagaattaagagatggcgcgtgaggagctcagaagagtggcacagggcaggggctaagggagccaggcaggcattgcgctgctctggggggccgctcaggagccaggcgccagcaaacaggattcagttcctggtgagtgacctcactccttagctttctcctggcactgccccctccagatccctggcacctgccttctcaaagagttttctgaaaatgtgcaaccgaaggagaatcgtagagaatctcagagatctgactaattgtacttgtggtttggagtgggcggcggcgtaatcttggcttttaccaggataactatttatagcctcttgcttatcttacgcagtccagtcctcagggagtatgtgacacatggccgttcctgtgtctgggacacatcattactccaccatggctctgactcagacggatgtctggggcaggggtcctctctcagggcccctttaaagtttgatgaatggatgagagaataagtaaacaaataaatgtaaagcaaaacaaaacaaaaacagctttggaaacagaaggagtcacagacaaaaccttacaggatggcggaaacagccggacaaggagaccccatggttaacagagcggtgtgacttatctcccctcaagcatggtatctactcagtgcacacatgcatcttgttgcctcactccacatgtgacatgcaggcaagaaatgtgcgaagaatcagggcccctgcctttcaaactcactatcagcattcctgcaatggcatgtcaagcatgatgaaaaaaaaaatgagctatgaaggcaggaaaacacaaagaggaaacttaaatgcatattactaagtgaaagaagccactctgaaaaggccacatactgtatgatttcaactctgtgacattctggaaaaggcaaaactatgggacagtgaaaaggtcagtgaaagccagggattaggagggagagaggaacaggcagagcacagagactctttagggccatgaagctattctgcttgacactataaggatggacgcacgtcattctgcatttgtctaaacccacagaatgtacaacaccaggagagaatcctaatgtaaaccgagggctctggttactaagactgtatcaatattggctaatcaagtgtaacaaatgtaccacaggaatggaaaatgtttatatatgaagaggaa

SEQ ID NO: 48696 - DNA, 1258 bp, Homo sapiens
gttcttaacatgccagtctgacttattcagagagagcagccacccaacgctgcagggctgggagggtcccggtgcactgcatcccctgagaccgtcctgcagacgccaaccagaagcctctgagctgcgcctggccccatcagtgcacagccagcatggctgggatgtgtgcggtggcatggccaggagtctagatgggcacccgctggccttgtgctttgcctgctctgtaacatgatgctgagtgagctgcaggggcgtgaaaggatgagacaagaaccaggcagcgttccctgtgtcaaggcacactcctggggaggcccacggctcatccaatgtgtggactcgaatcagctggataaacacgaaacagtgccctgtctgtaggtctttctctgtagccctcacaataaggccagcgagcccccactctgtgtatgagaagctgcgtctcagagagggccagcgccagccacgggaactctcccagagatgactccagctggtgccccagctccaggctcctctcctgataggagctgcaccctctctcataatgagcagctccctcagggattagggtgacaagaggtgacaacagtgagacaaggaagggggcagagcagctcccgttagcagctacagaaggctggagagaaggcagtgggtcatgggctgtgggccaaaagccatgggctgtggcatccccgggatccgtccctcccatggtggaggcgagggcccctctgagaagcctgtttgggagcctctttattgccttctttcagctatcctgggatcctaatctactgttcccaaggaaaccacaaacaaacactgctgtgcctgccccacacctggctacgtgggtgcctgggtacactggcatcaataaccttgtccccaagccagcaggtccacaggacagaggggcagagggacaagtgcttgccaccaagtcatgactgtgtccttgggaatgtgagtgtgtgggtgagcgtatgtgtgtgtggatgagtgtgagtgtgggtgtgtgaatgtgggtgagtgtgggtgtgtgagtgtgggtgtgtggaggtgagtgtgtgtgggggtgagtgcaggtgtgtgagtgtgggtgtgtgggtgagtgtgtgtgtgtgagtgactacatgtggtggtgtctgtgtttgactaggtatattttactgtggatatctgcaaatatattcttttgtgtgaatgtgtgtaagtttgagagtgttgtgagtttgcatat

SEQ ID NO: 48697 - DNA, 2926 bp, Homo sapiens
gaggcactaattaagcccactaaatggaatttgtttgcttaaaagagcagaccccattctcagaagaaaatttagaaaatatatatactttcttgtcatttaacagttaataaataaaatgcatagtgatttatgctagcggtaggcaacatttcatgaaataaatctactagcgtcagtaccacaactgcagaaagagtagtttccagcaactgacactgtagacatctacagtgattcctaatacaatgatgcagattaaggtattaaaaggggaaaagagcactcctgcagaagccaccaggccctgtgcttggggagctgttgaattcagttctccgcagtcctcttagtaggggttaattcctgttttatagaggaagaaactgaagcccaaggtcacatgggtaagacaaagcagagtcaggatccagacccaggtctgttattcattcttctcttttatgagtcctcaaagtttcagaagctgcttctgagagctacacatgcaaatttccattttgtacttctgttctcccaaagaggccaggcaagagaaaataagtattcgcctagtacagagtttcacgtatggaacacacacacacacacacacacacacacacacacagagcaggaaatgttcaccgcgtgctcttttcttttgtttttgtttacactggagcgacgtgtgcccatggatgcctggccttgctgctctgtcccctgcccctcgagctatatggggctccctccaggaccgggctccccaccctggtctatctgacccagtcagggcagtcactcaaacattcattactgtcaccatgaaagtggcatctgttttgaattcaggggcctcatcttctctgggtgtcccactctgtcatcagagcctggctgcatgaggtcagctggccccttctctcctccgtgacacccctggtaaacagacacccaacaacatcccgcagggtggaggtggggagtgaaccttaaccaacagcacgcttgtccaaattatttctcaagtaatggaggttctgcagggagagcttctttctcaggttagaactggtcaaaagacacagaggtggggttcagaagaagatttccagggcacctcgaaagccctagtttaatcaataaaacacacttgcaggcacggggtgcccttgccaacagcctcctaccctcccatgtaaccacagtgccatggaaagttaccctcatttcacagatgccgagagtcaaggcagacaggcctggcctgagccacgtgcaggatgcagggacccacattctccctccggctgcaccttctagcctcctgcccaggacacagatacagatgctggctgcagagctgctaattaggttactggccacgtagttaaaatgatgtggcaaataggtgcagattcattccaggtatgtgttgtttcatctgttacaacacaatgtggaatgaaaactgatgattcagagaaaacacaggatacattttaaaattatattatttatttaaaacaaatatcttgtttcaaaagatcataattctcttttggcctctttttggggcagggctaggacttcctacacaaatatagcttacacttatgccgcactaaaaaacaaacctgccatcacagggcgagaacttcactcataaccagacagccaacatggtcccgtcagcccggccaaaggtcaccaccagtttcaaagacctgtttcctctggtgtaaagtggcgaactcagtgacttcccagcctgtggaatgccagcagggtcaccataaagccccgcagatgccgagacggtgcaaggagcagagccccacagggcaaggccccgagctgctggcagctggtgtcgcccagctgacgcacttcctcagttgacagtggcttggtcctgctggccaccttcgagtccaagaaaggcctagaagtccacaatgaatgcctctgattgaggctcagattactagggatttagaaaccttaattcttttgtacaaagtataattgtgctgacatgaaaagccaaatgtggcttgctgactttgagagtgagcctagagcccacatggtggccttggctgatgggattcacacagtggggccacttcccagactctgggagtcaggagtaatagttcccagtagaaaaagagacacaggtataaacatgcctctagtaaggtgttaatgtgtaaagtgactttctaattaaaatgagtcaaaaatgattggtgaggacagcctaccagaaaagggatcttacaggaaaaggaataaaagtgtcctcaaaaagagcagaatttaaggatgcttcatggttcttctgacagtagtgacaactagcaaaaaagaaagacatggaagccaccaatcagtacccaccttgagtaggtgaatggagggtaaactgtggcacatccagatgacagagtgttattcagctgaaaagaaatgagctatcaagccaagaaatgacagggaagaaatttaaatgcatattatcaagtgaaggaagcccatctgaaaaggctacacatgtatgattccaaccctatggcattctggaaaaggcaacactatgaagacagtgaaaaggtcagcggctgccggggtgcaggagagagaagcgcggcacagaggatttctagggcagcgaaactactccatacggtactgtcatggtggatgtcacttatcatgcacctgtccaaacccatggaatgtacaacacccagagtgagccctaacgtagactgtggactcatcaatactggctcatcaattctaacaaatgtgctgttctggtgcggcgatgctgacggcaggagagtgtgtgtctctgtgcgtgaatatgcatgcgtgtgtacatgtaagcacgtgtgtgtgagccctcggttct

SEQ ID NO: 48698 - DNA, 520 bp, Homo sapiens
ctctaaaaataacatcttctaattttaaaaaccattttaaaagctgtcaaacattaaaacacacacacacacgcacacacacacacacttggcaaacataggtggagacctgcaatcatctggcagaatcagactctcatttcgtcctgtggggctgcagacagaagctccctgtggacagcacgctgcatctgggtccagctctgtgcacggccgagagctaccctcaggaaatgtctgctgaactggctggcttaaaaattaactgcctccgcccttagagcaagaagtggggagggaggagaagggatgcccgtgtaaacatttactgagacggcagagagaggcagagcccgtgctggccgcgtgagctggggcaggaccatcgcaggctttagcaagagatgcaactgctcggtcccagccctgtcacctgtaagagggagcagaacaagcctcctcagacagaagtgtgacgagtaaatgacagagcatatctaaagcactcggcagggtcctg

SEQ ID NO: 48699 - DNA, 1157 bp, Homo sapiens
atactcaataccctacacaaagtgcaactctaaggagcaaatgtgtctgcaagtgggcagaggcggaagaggcatctcaccatgatgccaggctgcaggtttcaaggataggattcccatgcctccatctgcttgcctaagctccccttcatttccttcaggggggcaccacctgccaccctttcctcccccttctcccctccccaacatctgctttcctacaactgcttcatttctcctacttcttttttcactcttgccagtaagtcaagtgacagccaggaaaaaagcaagtcatgatgcccacacagctcatgtggctcacatgaataagcactgcattccaggaagcaaaacagttgaaatcccaaactttcaagtgattgtacatacattatgtgacttccctgaaacttaagtattaacataaccaacagctaagagaaagttatttttctgtttattacagaaacctattattcactttttttatgcaggaagaaagtgaggctcagggcctatctaagtccatgtgggctgctataacaaaatattgggaggcttataaacaacagaaatatacttcccaaggttctagggttgggaagtacaagatcaaggcaccagcagattcagtgtctggtgtgggcccttttcagggttcatagagggtgccttcttgccatgtatgctcatggcagaagaggtaagggatctctctggggtcccttttataaaggcactaatctcatttatagacactccaccctcgcgacctaatcatctccccaaaggcctccatttccagctaccatcaccttgggggtcaggtttcaacacaggaatctgggggagacacaaacatcaagaccatagcaagggggactagaaaggcttcaggagacaaaaagccccactgggatccaagtccaggtctctgcctccatccatccactgagctgcatggcctggcctgagaggacatactgtccaatggctcaagaagagagtgatagcagtcttttggcgcttctcaaaatgtcccaacgatggctctgcctccctgcctgaggcaggtccccagctgctgtctcggtccccatttctgcaggatggtttctccacattgtcagtgccacagaaggggctctgagggc

SEQ ID NO: 48700 - DNA, 3405 bp, Homo sapiens
gcctttaaatttgtgagaaagtcgtgcatctggatttcggaagtgcttccacttccggccaacctgagaactgactgtcagaataaattcatgtctaaattcctataggagaatccttccagaggggccattgtgtgaacggagcgagtcctgtgtcccttcggaggccctaacaatgcaatgcagagctggaaccaatgcggatttcacaggcccttctgcccagaggctgcagctgtgatcatgaggcataaacctccccacgagcaccacgggcatgctgcaggcaggccttgcaggacagggagagagaaatgaagcaacaacacctaataatcccaacacagcctcctgtgccagctccaagggaacgtcgggtacatgccctcccttcccccacgtttgccagcccacagggacagctgtgggaggagggaaagagacctgggttggggaacagtgaccaaagcctcctatccaggctctgcccctcaagctgggtctctgcttcctcccacggagctatcatgggtcaaatggaatccttcaagggaccctgctttgaaactagaaagcaatgtccacatgcagaagtgtgtgggacctgaagaccaaggcctcagaagtcagggagaggggccccacatcccagctctgcgtgtcaacaccccgtgaatttaatcaatgtctcactccccctcctgcactctgttttctatgatgtgtcaaagtcaaaaaggtttgtgtagggttgaatgaggatgaaacagataaggtcacttgcccactgcctggcaattattagaactccagtagttacagctaggttgttatctttgtatgatctatatttttgaattgctgaattgtcattctataccttgaggtttgtaagattattcacaaagacatgtatttatcctacaccttctgatgggcaaaacacacaaaggtgatcagtgattttcaaatcaagagagacttgccattgggaaacaaggggcttccacacaagattaaaagtccagacagaaaccatccccagcagaggccagcacaaaggactgagataaggagaagggcggtgggcaggcctctggcctctggctgagtgagagtcaggcaaagaattctgcccacacacgtctagcagcatgtcacaggaccacgacatcatgcagcggttagccttccagatggcctgggtgacctcgtctcttggcccccatgctggtgtatagccccctcccacagtgaatcagctgggctgtgtgacagtgcaacctggcagaggagatggtgtgtgacttttgtggctaaaagacatcgtgacttctgtcctggtctccaggatcactcattctgaggacagccagatgccatgttgtgaggacactcaagcagccctgtggagaggcccccatggagaggaactgaggcttcccacaaacagctggccccagcttcccagccacagaagtgtgccacctcggaagctggtctccaaccccaaccaagccttcagatggtgcagcctctccagagaccctgagccagaactgcccagtcacctgtgtcccaaattcctgatcactgacacagtgggagataacagatgcttactgctatgttaaggtactaactttggggatcatttgtcatgcaacacgccaactcaacacaaaaaaatggccctggtcagtgcaagggtggcagtggtatgatacattcatggtgggtggcctactcggccaccagacagccatcggcactgtagggcaaaatcattaaattcaattatcatagtgaaatcatataaactgcccatgagccaagactacaatcctgagaggcagggccattgtttctggtatgtagacaagtgaccctcaaagttttacaaatgtttggactaggacttcacactcgattgtcagcagcatggataatcctcagagtagcaagtccaccgtcaatctatccgtggcccagctctggtcagcaccgcaccaggcagtgtacaagatactttcccgtatgttactgcacttgctcctcgtaagcacctctcggggaggaactgtaagggtgactcagccaagggggcagccatggtccatgaaggtgggactccagcccgtctgtgcatcaaattcagtgtttgcatccagccatactctccctgcctttctgacatattacaaaatatgaatcaaacagtgcccaggcccagcttcctatcctgccgcccacaggagacagccccctgcctgccctacccctgcctgccctaaccctgcccataccaacctcacctcctcattcacgccatcctgcacccacctcctgggcccggctcagctgcctccgttcctgagttgacacccttctgtgccactgaaccatcatggcaggtcatcatggcttgtcatatcatgatgatctccctgtgtccatctctcccgatgggctgcaagctcctcaagggacagcgtctctgttgtgcatgaccagggtctcacaatagcagcactaacacgagtaacaggcagctaatacactcagcacctaaaagtttgaactgcatgcgtattgccaaatttccaccacaccctggaaagaagctacctatcttcgcctgttttactaatgtgagactggggtttgtggatgagactgaggattcacgtgctggacaactgtgtcccaatcttgacctgttccaggtctgctttcagaagcccatagccagcaggcccacaagctatggagacctcattacctgatcaccacttagggattcggggctgtgaaggtgctggccagaagggaggctgcaaaacagaagaagaacttcgcaccaaaatccatctctgaagcacacaggcccagaagacaaaacgtatgtgttcactttgaccctcagccaggcagacccgcctcctttttggaatagcagttgtgtgagctggcagctaaactagccaccttctcaggggatgtcatttttatttgaaagaactcctagcagacaaaatgcagttattcagactcgagtgcttgtcattttctcaaaaatgaagtgagtctgtcatcataaaccaatgtcaaaatttgagatttcaagtgaaaattagaattttaaaagactagtacccaggccaggtgcggtggctcacgcctgtaatctcaacactttgggaggctgaggcgggcagatcacttgaggtcaggagtttgagactagcctggccaacatagtgaaaccccatctctactaaaaatacaagaaattagctgggcatgatgatgcatgtctgtaatcccagctacttgggaggctgaggcacaagaatctcctgaacccaggaggcagaggttgcagtgagccgagatcgtgccctg

SEQ ID NO: 48701 - DNA, 3767 bp, Homo sapiens
gcctattaaaatgcctccttttccaagtagatatgtttatggggctagattgtctttgacgcttcaaaccaaacattgcagaagactgcatgcaagggtaaccagcctcttgattaaggctgcataacagaatcacaaaaaaaaatgcacctcctctcattttgttgttttgaaacatagttattttttattaagcttatgttcattttaacatgtaattggttcattaccattgcttttaactgacttaaatattttaaatactcatcagtttcccatttctaatagggtaaatcgtgatgaatacaaaccacactgacaagagccctttagggtcttctaggaccctagcagtgggtgcccgagacccgcagcgcgagggcaaccccgttcattctccttgcctgaggctctcagaatggggtaaggacccaactttgaccaacagaaaggtaagtgaattctcccaggggcttctggcgaaggccttcccactcctgtaaacgaagcaagggaaaatgcctcagcttctggaacctccccctctgagcacggagctggacccacaagaagaacctggagaacttgggttgcagaaccggggcccaggcacactgcccggagcctgccggccgctgcacctccccctgcagaagacacatgccctgctggctgggagaggctccttccatgcagccccgttattggctgccacggtgccttccacgaagctccatgtactttagacgccttgttccacctgttcccatggggaccagggagaaagtcacattctcactccgttgcacgaacagcaaactgcagcacagagcggaagctgcctgccctgggcgacagagcaggttaagcagtgacaccagctgccagcccagctctagatgggcagagcccacctcccagagctggactggaacacccagtgagctggtgtgcaaaggctcttctgtgcctggtgcaagaactggggctccacatgcatgagcccactaaagcaaacatctaccatgagctacacaccaggaccaggagcaggtgtccagggacctcaggagtctgaactcacatgctcactccagcccctctccaaggatccgtgccagtcatgtcccctctggcacacatttccccttctgtaattaggagtagaacagggtgatagccaagattcctctctgccatgaaaagaatagtttacctaagcaataaaaagataaaattacatatatatacaaacaaaatattaggtagctattgaaaaattatgatctcaaactatttcacatgtgagagttcttacaaaaggcaaggctaacagatatacagcactctgtgttgtatgaaataaactttgtgaccgacagacatgcgcggtggcctcatctataggagagaaaatgacactggagagagacctcacaactcagacagaaaggaggagccagacaacaaaactgggaaaactggttactccatgaaaaacatcatcataataataacagaaataccatgaatttcagatgcatcaatcatagaactgattcggaattggaaaagctgaaatgaattattagaataaaatatcagagaacatctttgtgactttggaaaagggcagacattctacaacaaggaacaagagtatgaactaaatgaaaagatgagtagatctgaacaaaccaaacattacaacttttgcgtgacaaacaggccacaaacaaacttagacaagcaactgactggaatgtttgcaatgtacaaagtggaaagataagaaactgaccttttctgaggacaaatgtcattagaaattggcaaaagttctgcctaatatcacagataagatttagtattcataatatagtgaagtctcagaaatttaaaaaaatgatttttaaatttattaattttcaaaatgttatttatttttttctttttagagatgaggtctcactgtcacccaggctggagtgcagtggcatgatcatagctcactgcagcctcaaatttacaggctgaagcaatcctcctgcctcagcctctagggtagctgggaccattggcgcgtgccactgtgcaggccaatttttaaattttttgtagaaatggggtcttgttttgttgcccaggctggtcttgaactcccggtttcgatcgattctcccgcctcggcgtcccaaaatgctgggattacaagcataagccacctcaccacgccctaaaataatctaatttttaaataagcaatgaacaaaggatttgaaaggctactttgctaagtaaacagaaatgctgcaggcagcttttttgtatctttttagatgttcaacctcatgtaatcaccagatgaatgaaaaacataataaaaaggagacatcacttttcatccatcaacttgcaaaaactgaaaagctgaaaaatctcaagtgagagggtcagtgacattccatgcaagtaggctccaccaaaagcgttttcctgtgaggagcctgaaccttctccagcccagcttaccctccggcgtctgagctggtgtgtggcaggccccttctcgtggctttgcctgaacactcggctccacagctgacagtctgcaaaccacacatcagttcccttgtcagacgaggtttccagactcatgtttaagaatcctggctcccgctgcagcagttacagcccagagctgtctggcttgcaaacgcccaacatttttatatgttgtcttggaactgctattcttcacaacgtctccacgagccttgggaatccaggccactgtcttacagggttgtcagaatcttttatacaacactcgaaacatattgaccaagttataaacaagcctgtgagtcaccctctgcttctcctagcatcaactgtcaagtttgccagcctctctgtgtcccagtaacaggctccacaaggcaggaggggactgattaacccacagcgggggaccgccagacaaggcctgcccaatgcccacattcactgctcaaccccatgaccccattgttgccttgttagttttaaataactaccatgttctcctgaagtcctaatactgcacctggcccaaagcaaaaaacacacacctaccgacctgcccgtctatctccaaacctttatctgtaatcacttagtgtattgctgactccgatggactcaaagacaggacacaaaactctcatctttctctcctagcaggtgcttaataatgttgggttaactgcgtggaacaacccattaccaaatctttcttacaaaactcccttcatcccactttccctctggtctcctttctcagctttctccttgcttcttttctcctttctccttgcttcctttctcaactctcatctcctttaggccttccctacagctgtctctcttgttgcagcacttctttattctgtgccatcctgtctcattccatgatagtctcgctgattccactattagatcccagaaaaccatctctcaaatggggagcatttatgcgtggtctgaccctggatcctccctggatctaccttcttccagggaccaagtcccacaaaacttgtaacttttggggccgaatctactcaattccagaatgccgagactcacccataacagcaccttcctctgtcctctgtgaaatacaaccattttgggatatcaatggcaactggaccatgttaggccacccaagggaactcagtgacatgtagtgagaacgggttgcctcagagtcctaactgatg

SEQ ID NO: 48702 - DNA, 5190 bp, Homo sapiens
aactacaaaaattagccaggcgtggtggtgggcgcctgtaatcccagctactcgggaagctgaggcaggagaatcacttgaacccaggaggcggaggttgcagtgagccaagaccacagcactgcactccagcctgggcaacaagagcaaaactccgtctcaaaaacaaacaaacaaaaatctagctcatgtgttgtatcccaattcagcctggtgtacttacacaggctctttttccttcacagtgtcatggggtgtgccaattctatggtcctactggaggctggccaatgttgactgaagacaagaacgcccaaccttgcaatagaaaccctgctgtgctgttttcctggatggtctccacaagccccgcttcaaatcacactcatcttaccagggctaccagccacagcgtcctgcagccccacgcttgacaaaagaaacctagaggaaaggtgtcattaccaatctttacccccgaaagccacccacagggcaagcctcagataagtctcgtcgggaaagggaaggggaagagctcacccgcagggaccttcaccacctccaacaaaccagatgtttgtaaagatacaaagctaaccacaagttaatactcaccaaactaaatacttctaccttttattccctccttaattccaccagtattcattaatacccacagctgaaacattttgtaagcctataaatatgtcctggacacctacaacagggcagaaactgatctggacctggatactattgggaacacaaaaaacattcatgaatgtacactgcagtgcaagaggaaaggaaaatcaacaggaaccgtggattcaatcaggatgacctgaggtacaggaaagtaactccaggaaggtgcagcgggagcctaaaggcggagggagggttccacagtcatttctgtatcgggggtcaagaaaagtctgaagagacaagaagaaaaatagcagcaaatgggtgagaaggtgacagggagctgggtcacacagcctgagggaggccaccacccaaaaggcactataaaattaattgttgagggcatcaaccaatcaataatcaatcaatcaagaatcagtcaacaataatcaatcaatcaagaatcagtcaaccaagatagtcactctcacaaactccagtatttgcacaggcctttgtggcaggttgactggggttgcagagagcccaaggctcttggctgcacccagcctgcctcccacagcaccatttcctcagccaggtgcctcccaaaagggaagttaaaccctccagaccaccctctgttgaacacaaactcaggaatggggataaggctcaagatgctcccattcgagacagagcagccctctctgtgcgcccgtgtggcacaggtaggattggatgtcgccgcaaggtccctccgccgatgtcatagggcggccatctccatgctcttatctatttgctgttctcactctcctcacagatcctcacctccccacgccagatctgcccaagaacactgcaacacacttcaagacaacagcccctaaaactcttgaagttttcatccccagatattcagttttactctttctctctttctttccacgtaatgattttcttttctcgaaaaataatcactggggccaggcacagaggccgacgcctgaattcccagcactttgggaggcaaagttggcaggcttatttgaggttatgagttggaaaacagcctgggcaacagtaagacccccatctctacaagaaagaatataaataaataagtaaataaataaataaatcattatccccctcaagggattcttatcgtatgggcatggttcacgtgctcagacatgaatctgatcctcacacaaccccttgatgagtatcagttattgtcctcatgtggcagaccgggaaactgaagcacagagaggcagtggagctaaggtctgaactcacatcagcctggctctggagatcacaggtttaacctttgagcctctcagaaatcaatcgaggtggacttaatcttcacaaataggacactgaatcagctgcggcactgactaatgttgatgaagcactcaagagctgacagagtccttttacgtcccttgactcacatgttcctccaaacagcctgtgagtagggccagccaggcctcactgcccacttcacagtccagagaatcaagcccagagtcagtgagacccactgaggccccgcctgctgcttcgtctcagggcgccagctcccatccctaacattacttacataatctatgtataggacgaaccttgttgtctctttaccttgttgttaacctgccccccatttaagatatccccccccaacacaaggcacgggtgcaaaggagaatgtctctgcatctccatcagatattcaaagggatcatattatacaatattgcagaatgaaaggaaagaaagaagatggtaccaatccctcaaaaacatcttaagtctaactcaggaaaccctcttagtaattgtctccttcaaatacacatttggaaggaaacaagtcccccacctcactcagtgtgtgagcagaccccagcggtggggccactcatcaccatgtaaaccaggagcaccctcccaagaaccccagtcccccacacacatgggtgtgactgtccaggacttctttgtccctcactagcccagcagcccggtggcagatgtccacctgtgtgtgggtggccagcacctaacacagtaggcacctcctagacccatgctagccacagtgagctggctggaggggcgagggtgataggggatcctgcctgtccatgctcaccctaggttaggggccgtctggctgagtcatgcagaggccaggcttcgactccatcctctggaacagagctcctcacatttctttttttttttttttttttttttttgagacggagtctcgctctgttgcccaggctggagtgcagtggcacaatctcggctcactgcaagctccgcctcccgggttcatgtcattctcctgcctcagtctcccgagtagctgggactacaggcgcccgccaccacacctgctaattttttgtgttttttttagtagagacggggtttcaccatgttatccaggatggtctcgatctcctgacctcgtgatccgcctgcctcagcctcccaaagtgctgggattacaggcttcagccaccatgcccggccgctcctcacatttcttaacacttcaggcctgccagtgtcccagggttgctgatacccacgtgggctccgtgaagcacagcactgcctcttccctggcttcgaggatgtggaatcagaagttgccacttggccttgcccccctgccacacctaggcagaccttgaacacccagagagtagcattacatccatctgaataaaccaacagaaaacaaccccacaacttaacataaaattccagatcacagttactgcaaaacaaatacttggatttatgagcttggctacactactcagtgagttttaaaaatcaaaatccaccagcacaatcaactaacacaacccagacgtccctggcatgcagaaacctcaaatcctgacaacccagaccgttgagaaacatctgggaggggtccaggccttcttcccagccacagagttagaaaacaggaaggatttcagacaaaatccacgagtaaagtccgtgtggaggcggctgagaaaggctttgtattgcaacagaggagcagaatttagaggcagggaagtgctgcttcccatcggataaccaccaccgaccagaaattattcagatgaaatttggcctgggtgcctccttcccctttgggagcttctgggagattctgtcgtgttgccacctctctggatggggcaagtctgatgggagggctgagctcagttccccggtagaagtcaaccccagggtggggctgggcttgccctcagggttgggggactcaccacctccaattgttctggaaagaactttggaaataacatctggagccatttcacatggatttgccagagaagagcggatcaatgagccaggtgtttatctgcacaaattcatctggattgtcatgcaacttacattccctgtgcacctactgggctctaggccctttgctgagactcaggatacccaagaaacagcagtgcatcgcatcatagtaggggcagtcggcccaggggagcagatagattcataaacaaatgatcagaacacagcagttcctccatcgtcctgacaatgcccacactccctgccccacccacctcccagaattgcctgtccctcctctgtgctcccaaggaggctgcaaatacctctgataaagcactcctcacacgggatcctgttcctgctcactactccagcccactagactccgagcccttcgaagccttggtcaccgtgggcatcgcaatgcaccagctgccgcacctgctcagtaaaagtgtgctggtgagggttcaccctgcaagacaagacagcactccactttgggacggaggtgtctgccctgtgcacaggcatctggtgaacaacacagagccagcccctcatgcctcctgggctccagctgagggcagagaatcactgccccagtgaacatccggatggctggctagtcactggccatggatagttctggagggaaaagggcagatgctaggggacacagcggcagggcagggaggcaccttcctgaggacctggtgcttgagctgaaacctaaaggatgagggtcagcaggcagagcagcacagtccagcaagaggtcaaaaatgagccctgtgcagccggcctctcaaagcacctgggggagtcaggagagaccaaataaggcaggcacagcctcaaagggccaccatgaggatgcaggcacaggttcttcccgctggatggtttacagtttcccagagccgttctctgagtacaaacaggagaggagcggagaggcaaacaggagactggatctcaagggcatcccagcctgggcagacaaagggccagacccagggaagctgggttaggaaggaggaatgggaggtctgcacggcgatggagaccggggcccagcctccaggaagaaggccagcaagggtggagcagcaggcagggctgggggccaaagcctggccaggggctctcccattcagt

SEQ ID NO: 48703 - DNA, 675 bp, Homo sapiens
tatgtgaccgtgtattctatcagtacttaatatccatatggattcagtgaggccattactcacccactggaataattaaatttatttgaaaagatgaaatggtatttagaatgtggaataaatggtacaactactttagaaaatggtttgacaatttcttataaacttaaacatacacctaacctatgactcagcaattccattcttatttacactaaagagaaataaaagcctatgtccacaagagaaagaaaggtcataacagctttatataacccaaatgtccatcataataactattctatatgctagaaagttaagtagagatctgaaaaacataaaaagatccaaatcaaacattcattgaggaaaatgtaagaatacagtgcaagatacactggatgcgattactggcagattagatcctgcagaagcacaggtgaatgaacttgaagacatcacagtacgaacctcccaacgcaaagcacacagagatgagacaacctaaataaacaaataaacaagcatcagtaagctgtgggagaactttaaccaacataacatatgtgtaatggagactgacggagaagggcagggaaggggggatatttgaaaaaataatggctgaaactttttcaaaccaggaggaaaactataaacccacagatccaagaa

SEQ ID NO: 48704 - DNA, 1704 bp, Homo sapiens
ttagggaaagggaggctgaacctagcggggagccaaccagcaccgctctgtttaattcagcaataacttagggaaagggaggctgaacctagcggggagccaaccagcaccgctctgtttaattcaaacaccgtgaaaggccgtcctgtggaccacagagcaccgctggaacccatgcggtccccagggaacctgtaaggattcctacatcccagcgcatcccccacttcattgcagagctaaaatgccctttacctttgcaagaaacacgcgagggatagcaggtctgcgcaatggccagtatcccaattccattgcagggaaatgaacccaagaagccttttcaagaggcagttgagttagaaagagctaagcctgaaccctcttccacgcttaccagaagacgcccccactaggcaaagctccactggccctctcgctccttgtcctgcgcgtgcacacacaagggtacacacgcacccacgaggactcaggcacggaccagcgtacacatgcctgcacacacagacgcgcgctcacaagcacacacgcgtggacgtgcagacggggtgcacacacactgacatacgcgcactgacaagggcacacgcatacacatgagcacaagcgggtacacaccagcacagcgtccacgggcaccagtgcacacccggcgcagcccacgtgcgtgcagccctgaaggcgcccgtgcctcgcgcccctggccatgcacaccagctccgggccgcactcacctggcgccggcgccggcgcgaccgggttccgcgcgcgaaccctcccggtggcccaggggtcagggcgcgcagcctcatggctgcccctgccgcccgcggggagccgggctcggccgggcgagggtggccgctgacccctccccagcggctatctggggggaggatgcctcccgagtcccctgcggacacaagtcccaggaaatggccaacacgggaggggccaagggctctccgtggccgccggcccaggtcccagccgcgcgccgcagcctccacggccactcctgcccgtcagaagtcagacgccgggaacaaaagccaggcgcgagcgcacggtcccgcacggcgtccctccatctgacacgaattagccctccctcccccgcccgccccaaccgcagctccgagcgagcgcggaggcacaggctgagccgccaaacactgggaaagtgggtgaggaaacgccttccaggcggggggagcaggatcttgcagccgccatctgattggaattaccgacgcgccgcgcttggcgcagggttcagctttactaggatttcaaacctctccgagaacgctggcgaggtgcttaaaagaatcaaaaccgggcaagctctggctttcggaatttctaaatcttgaatattatccagtcaactctgcatctgtaatgagcagtaatctacactaccctgataatctacactagcaaacagggcatttggagtggaaagcaggtaaacaccgaggcagaaaggctttttttctaatttgcttcttctactaaaaaactaggagcctggccttgcagagagggacacgcctaaccaggtaaggatttcaagcaaatatcaaagcacaggaccgcccggggccttgcacacctgggggctgggctgcacctccctatctcccagcctatccctccctcaccgcaccccccccaccc

SEQ ID NO: 48705 - DNA, 1373 bp, Homo sapiens
ctaaatatccatctttctgtttctgcagtagaagagcaaagctgctcttcaacttttaactacaaaggaaaaaacctcctcctagaacacaccattctgggttccaattcctcactaaatcatcacctggcagacaagcaggcattctcatttccccctgtccttcaaatgacaccattattcacctttttctatattcattccttcattcatttttctgtatacattcatcatttttttcctatagcatatccaaactttagtcttttcaaacatttttccctgagaacacatctgtatcgtattcattccagattgcttcacatctgacacaataccaggtacatagcagtgcctacaaacagctaagaacaggatatgctgctgtcatggtttacccagggcaaacacgcccagaggtcagctggatctaccaccgcccttaccatggtgcccacaggaaccggccaaagaaatctgaattcagcaatgaacagatagcccccagcaggataaaactcctccaacctgagtaccaggattcatactctctggggtccacccaggaacaacggccaggagcacaggccagcccactgcctatgcaagccagagtggaaggcaaatggttgaaggtggctttttattgcagggataccctgaatctgctcttacttatttaaaagagtagccattcagaaaactcccacacttcgttactagtaacaaatatcgtgcgtgtgataaacctccccagtgaggacaacaaactgatttttcactggcaagaaacagtgctcaatcctaaggcgaatccgcattcatcagcaggccgcctctccagcccctctccctgcccccgactctgacctcctcctgccaggcttgcaatctaggctcttacactccagggtccttctgctctgcgcccttgggctcacttggggcttctcccaaggcagtttcccattctcctttctggctgaaaaccgctgtcctgggctcagttgaagatccgccccccatctgacctcccagactggttaatcatcctccatggctgagccactcaaggatggttggggccctgaccctctagtgtggtcataagtcttgtacctccaataggaagtcctaaccttgtctgggattttccacacacagcaccaagcaggagcaataaacactggtgcaggaatgaaaacattctcctttgctgtatttccaccacatcaacaccggtgttcactgcctgtctcagaccacacccttctgagtcctcccagaagtaagctgtagctgagggtctggggatgcgaagggactcagaagccagggcacagactcctccaggcacagaccctcacctcaaa

SEQ ID NO: 48706 - DNA, 4597 bp, Homo sapiens
tgtgccggcatttccctctctcctcgtaagcaatcacttctagaatgttttcatctagatgtgtaactatcccctcccatagtgaagtgtgcccagtgagcaccggattgggaggccagcccctggctgtccagaggatggaatggaggctctgagtgatgtcacaccttggcaagtacacgtagctaactctaagctccttctaaagctcttatcattttttttctttctttttttttttaagcagcagcagccttcttgtccttggaggaattcagatttaatgaggacagagagatacaacgaaaattacacaacccaatcccacagaatgtgagcagatgaaggccatggctaactgggcctcagaacagagggccaggcctctggtagtcagcgtcccacctggaccactctggaagggacatagcctgggaaggactcaggaggcccacagctccactcccttctcagtcagtctgtcttggggggcccaacgtggaggaacttgggccaatctgaaaaacacttcttttggggtcagagctctcaaaagggtgaccaaccacagatgaaagaaaaggaatcgaaggctaacctggtttccactggaaagaacctcgggtacacagtgtcgacagctactcctaacagctcagtgaggtccgtgctatcaacacagttttcagcaccacttcagagaagtttggggaccatcccagggccacaaagagaacaagtggcagggacgagaaggggtgccacctgggttcctgcaaagcctgctccctttccgcttcacccccagggtaaacaggcaggacaacgcagccacaggctgcacccacgctggggacttcctcttgtttgctcaaagccatctggcagtatgggaaacggaaaagctggtgtccccagagctgacaagaggcgaaaccgtgcagaaaaaccagtgtgtacaaatgaaaggagaggcagtacctccagagggtcaaggggactccagacaatagcgatcacagtcggccaaaagcctctgtccgctcccactcattcgcccagctcatcttggcattgaaaacggaagccgggtctgtctggaaatcagctggaacctttttggctacaaagctgaactcagcaccaacagcccccagctggccgctcaccaagagtcctggtcacagactcacaggccaaggtcggcattaagcggcccagtgcgtgtctagccctgtcagcatgccgctggccacacagctgtgcttgccccgtgcgtggtgtcccagggaactatgctttggaagaactaacccagtctgtgaagagctagcctggcaggagccacagcacctcccactcctctcaccgccagggcccacaggtcctggcagccagccatcagggagaggaatgcaactccgcagggcatgaccacgcagaggggccacctcactgctaggtgtgaggctgcagagacctccccatgggctccgcacagacaaccagacacccgacaagctgagctgatgtggaatgggcatgttctaaaagaagcagcactgacaaacatcttttactcacaaatagcccggcagccgagggaccatttggagtaaggccatccctccagggcgttctgagaagtcactacagtcataaatgggagggtgacacccagagaccggcaacggcaacgcctaggtcgggatccaggtttgggagaaccattcgcgcggtagtcacacacacactatgcttctcacgcccactgctgcaaacaccttcgtgggaagaggaaaatgaatgatcgtgtgttctgttatcctgtgagaagagtgagcctttaaaaagtgaataaacaccattccagttgtcgcaaaatctctactaataataagcaaaatgccttaaaagcacagtatgctctcgatgacctatgttttggattattcctatttaatggaggtgggggtggggagttaaagagcaacacatgatcgggtgcagtggctaaggcctgtaatcccagcactttgggaggccgaggcgggcagatcgcctgaggtcaggagttcgagaccagcctggccaacatggtgaaacactgtctctactaaaaatacaaaaattagcggggcgtggtggcacacgtctgtagtcccagctatggaggctgaggcagaagaattatttgaacccgggatggggaggttgcagtgagctgagatcgtgcctgggcgacagaacgagactccgtctcaaaaaaaaaaaaaagagcaaaacatagcaactctgtgtgttgcgggttacctgtctcactcaaatttttcatcagaataatctggttacacctgaatccttgccagtggaaaatgagaaaggcctcacagggatatgtggggagttgccaccagggctgccccagaaatcaagggtcacgtgtggcccaggcttgggaaaacatttctcaaaccacgtggtcccaatgcaggctggatctccagaggtggggcccacccaccagtccttccctcggaaagagaccacggccccaaggactgaagcccaaccaagtaacttaactattcattatgctaatatgccctttgttgaggacccaggagccaacgccctgatacaagccagcagggcaatgccttcacccacctcacgagcaagcctattcttcccttatgggctgtgctcttggaaatttctgtgcagactctctccacctcccaccctggggacaccctgccgccctccacgctgcctcccaccagcccgctaggtcgctggggcattggtctcaaatctacaagcgccatggaaagttgtccagggctttgccacagttctccgaaagggtgaaacaccctaccttgtgtctttgtattcttctttgccttctgcaaatcccctttgctactccagaacacagcaggtggccctgcccagggcctctgcccacgctgcccctccatcgcgacgggtccttctgcaaagtcgcccaggatttagtccctcacctcccccagcccagcatcctcttggaaagaaacaccagttgactccagatagagcaacccaccaccccgtctctgggcctgcaggcctgcccggccagggacctcaagtaatccagaggagaaacattaggatgagtctgcctcctccttgagcccccaaatcccaccaattctgcaaatgcccacgttggaaaagatgccagtaattctggttcaacatgttccaaggaggggaaaacgacagcctgctgttgacattcctgatttggaattgtgaacacattcttagagggtaaaaattaaccaccatcagttggggaaggcattatggggagggcattatggctgcacttcaaggactgatcacaagaaccgcctcactccaactgcccagggcctgcatcgacgttttaacagagccaaaccagagcgagcccagttctggaccgttccctcagaaaagcagccgaggaaaccctgagtaattgcactcatagatcataggctctggcatgtggttcccagactgaaccatttatccaaattaaaaccattctccagaaacaaaatcagacccttttaattgaaaataaaaccaagcaaccccgaaggctcttttttttttaaatgaaagacattcttcctgctttctcatcccattaatcacagagtttacacaatctgtcaaaatagcttggtaagaagtctccctcttccttttcctgcaggcctggtttttaccctgggggtgataacctagccatgtttaaggacagcgggtggacaccgtgagaatccagccagcaccctatgtctcaactgcaatttgaccatatatactaaggagttccaaaaagcttgtgctcaccaaaaaaaaaatggaaagcagggacttatacacccatgtccatagcagcattattcacaacagccgaagggtagaagtaactgaagtgtatcaacagatgaatggataaacaaaatgtgctattcatacagacacacacacacacacacacacccccacacacacggtattattcagccttaaaaagagagaaatcgtgacacatgctacaacatggatgaaaccttgagtacagtattctaagtgaaataaacaaatcacaaaaaatacaaatactgtatgattccacttgtatgaggcacccgatgtagtccgtttcacagggacagaaagtagaatggtggttgccagggactggggggaggggaacatggggagttagtgcttaagggacaccgagtttcagttctgcaaaatggaaagagttctggagctggagggtggtgatggctgcacaacgtgaaggttcttaatgtcgcctaactgccgcagttaaacatgattaaaacgacaaagttcatgttatgcatgttttaccaaagcttaaaaaaaaagatgtttgtattctttgatgccaaagagtctgctagaaatcctttcaagagcatgactagctacgatctgcccaaagacctatgtgcaagcataacacaggatgtaaatgatcaatgaacaaatagtgaagtccaaatatcat

SEQ ID NO: 48707 - DNA, 1054 bp, Homo sapiens
cactacactccagcctgggtgacagagtgagactctgcctcaaaaaaaaaaaaaaaaaaaaaaagcagcaaaaatatgctcattacttgagagtcttctgctactctccgagtaatacagataaaaaatgtgcctccctcctgcgtgcaggacaagagagaaatgcattcttcacccacgtagagccctcctgtctcccttagcacctacccaagacatggacacaggccccctttcctccagccctgtccacccggctctgcaggtctttccagaggagacaaactggaaacacctgtccttgatctttggagaaaaactcatctctatcacgctggcctcccctgtgtcaaccacttagcacacagctccctcccagtggatcagattagcacctccaagaatgaggaagtggttctccagaaggaccacaaggtgcttttcaggcccctggggccatggaaattcagcaggaccaaagtacactgggcctggagcccaaaaggaggaaacaaaaccccacgtggctcccacccctgagctccggaaccagtggaggagcaaacctgtggaggaacgacaaccccaggctgcaggtgacaaatgacaaacacagtcacaataaccccaggacctctcaggacaaaggacagttctgccccaggtttgtgggatgccagagcctggcctatgtcactgcctcctgtgcgtacctttgatctacctcccaaatggccagtgatgaaaggggtaggcgcccagggacacctctaagaaaggtgatggattacaaggtggagaagaatgccaggaccaggcccctttgtttgcagagccagcccggcgctccagggaggaatgtgcacaggccaggacgcagatgcccctgctaatggcccagtgtgccccagggcccactctcctgcccgcctgccctgcacagccagatgtgggcctgtgccttttattgtgtggctccaagtgagtgaaatgttacacactgcagctgtgttccagggtgatggggagagcgcagattcctgaatcctccagc

SEQ ID NO: 48708 - DNA, 2754 bp, Homo sapiens
tgccctttatttccagagtcacatttgcaaacagctcactttcaaaacattaggtgccaaagagacactttgttaaaaaaaaaaaaatcaatttgcattcaggaataagtagtgccctggggctactagtttttctatcttggtagttttttaaagacataattcagctgagctgctgatagctatggcagcctcagctgaggaatcgctgtctggacatgcattagaattcagtcgacagacgcgcagcagcagccaggaacaggggtctgggaccctagagtcctgtcccagaatcccaggctgcactaccaccatgtttcatttcatctcggccaagttacttagccttcctttgcctcagtttactcgtctgtaaaatggggtaatcataatcccaactccctccaaggaatgtaatttgggtgaaatgaaatgaatgcatgcaaagcatttagcacaggcaaacactcaatcggtatgcctgttactttgtcttcggggtcaccattactattcctaaggtcaggagtcgggcttgctgccagttcctcctgtcaattccctgtgtacacaccccccaccccctgtgctaccacacccccaccaggacccagtgcacctccatctctgtgtaatggccttgcccctccaccctccagctgcagcgactccccaccccctccctggccctcaaggcctcagcacagaaaagcctttcttaatacttgttgattgatttgcaaatataacctcacaggccccaaagagagaagaaccagaatcaccagaacaagtaaacctcattcaaaagggaaagcatgaaagcaatttaaaaaattaatatgcacagaccaaagcctcaagaaaatctaaaatgtcaaagggttggttagttcagaagggccatgcaatattaatacaatgagttctgcattcatacttttcagtatattttcagagtcctccatgatcatgcattcaaatagtgaaaaaaatggggggaaagccaacccggaagatcaaagtgtgtgaatgcgccccaaggaagcctgggggcttcccagggggttgtgaccaccctcagtagtgctctctgctggccccacaccctgatggcgctttgagtttttcaaccacgctggagttcgggtcatctgctgacactgtctggagaatgcctgaggaacgcctgaatctcttcccgccacagacactcaaatcactccaagcaaaggacccgggactcacatgtcaggccgctgcacagcaccgacacagagacccctgggccgtccgggaccctccctcctcctgcttgtcagcgacagctcccgcgtgccaggaggcacatgccacacagctggcccccagcctgggacagcaccccccaccccagaatatccccccaccccgaggtcccgtccttcagggaaaaaaaggaagcgcgtaaagaccccctgcctcccacccaccaaagggaaagggaaagagacgcactggagagcttgcctagaaaaagtaggagaagggtcttgagcctgcccattgaagcccctagctgcgctctccacctggagtctcgagacggagtcctagggagcaaagtccgctcggtcccgacagcgactgcgacatagctgctccggtctctgccctcagtccagggcgcccgggcgccacgggtcccactcgagtggtcctgcgccccagccagtccccaaacccagccagtcagcgcccccgtccccggactccggcgaagctggcccgcgccccagcccctgtcctgggactcctgccgagcccccgccccccacgcgccgcaaaccccgtacccgcgcgcaccaaaccccttgcccgtgcgcccccaaccgggtccccgcgctccctaacctgggttctcccgtgaccccatccccgcgccctgagctcccgtaccccgcgctccccgaactctgtctccgcgctccccgaactcagtccccgcgccccagctccagatctctgtgctccccaagcctcgttcctgcgcccggagcgcgaaagcccgcgccgggcccgaaacaaagaggaccgcggcgcgtggccgcgtttcctccttccccggccccagtacctgggggagcctgaggcgcggtccggcagggcgatggccgcaacgaggctgggctccgagtagcgcgcgggcgggcccgtcctcctggctggctgccggcgcccgcggcagggccccctcgaggcggcgcgggcaatcgccacggccggcccccgcgcccgcgccccgagcctggcgggtcacctggcctcatcaccctaacaatgcagcgcgcctccaggcgcccttcaccggggtcccccgccctgccgaggtgcgccctgggacctcccttcgctggccgcagagaggacctggaattatcagacccattgagcagcccaggctccaagtggtctggaggcttgcaggttccgccgggccggtgttagagtacctggggaggcgggttcggatcctggttcctgcacaaccagttcattctttcattcagcgcctgtgattaaggtgctctccgggagcaagacctaccctccctcctgtagctcatagcctagtgggagtcgcgcatacataaaggagcacagccgctccggaaagcctagggtgccgtagaagcccctgaaatacccagctaatgaagggaggaggtcagggaagtctttagaagtcacatgacttcttaaaatgcgccg

SEQ ID NO: 48709 - DNA, 3597 bp, Homo sapiens
gtatattttacttcttgtctctgtaatctttggcactcaattctttccttgttataatacacatgtttaactcatgcattcttaaccttataaaacttgtttttttctctcatgcctagaaaccctcaaactccaaaccgtcaggcaaccggagcctcaaacgatggctcccctttgctaggaacccttagatagacctctgggaggagtctgactgccgttttccccaaaacaacgcccctgtcaacaggaaacagctaagaccggtcatcgtccatattctagtggcagttagatgtacctctttaaaggggggatatgataagggagtgctgggaagggaagagcgtggtccctttaaatgatacagaagcagagaggggaagagctgggtagaagaaggcgggttcctggctagggcttcacccccaaggacctaggtgaggacaggcacttctgctttcacgtccaaatgttgcaatttccaagaccaccctggcccaccaccacctggccccatcctgggcctataaaaactgagaccttaacaaggcagagacacacaagcgactggacattgtgaggaacacataggtggaagaagacacaagcggctgatcgtcgagagcacgcaggcagaagagcacattgacaggcaccggcatgcccgcaggccatcaactggtgtaatgacatggagtttggctggggcagtctgaggagagcctgggctgccgagctgcccaactccaggggaaaacaatttccctctggctcccctgtctgctgagagctacttccactcaataaaaccttgcactcattctgcaagcccatgtgtgatctgattcttctagtacaccaaggcaagaaacccagggatacagaaagccctctgtccttgagacaaggtagacggtctaattgagctgactaacacaagctgcctatggatggcaaactaaaagatcaccctgtaacacacgcccactggggcttcagaagttgtaaacattcacccctagacactgccatggcatcagagccccacaacctgcctgtctgtatgctcccctagaggtgtgagcaggggggcaccaaagaagtgagccacatccccatcacatgccctgtgaagaggacaagggaacttttcccgtttcaactgcattacagcaacataatgagatactgtctctttaaaaaagtctgaaaaccactaatctacggttctattggcgtgattcacagctgagaaaactggggctgcaggacagggtgctgagccaagacgggcactgagttctttctccgggtcagagcaagctccttcctcctccaccagtgtcttttctcctgacttgttttctgaccattcaccctgggttcagcttggagcagggcctgtgtatttactgctgaggccacattaactcttagcaatgattaaattttgacatctcaaaaccacacttccgaatgtccccttcagagggatgcaatgataactcctgcagaccttcagcaaagggatattacttttgtgcccccttggtcccagtgtaaaagtgttgactgaaattaaaaaggggaagtggttgtaattcaccagggcctttcctcttaagtgggtcttgactttaatttccaccctcaaggtgaagggcagaaggtttctctgcaatttcacattagtttaacaaatggtttaatgagcactaaaatcagtgctaccctatgttgcccaaccccaggaagagtgattcacattgaatagaatgtggatgctgcctgtccctgggatggtggggttcacagctttgcctaagaaatctgttcagtgtgtacattaacacaatgcacggggggaaggtgattcacaccaattcatgggggaaggtgattcacaccaatgcattggggaagacatcaaccaggggaggagacggccacataaggaaagaagcatattgtgatatggaaggtaaaacagaggtgcagggtggcctggaggaggaaatgactgacactgagaggggtttagggatgtcctcatggagatggtgacatctgagctgcattttgagacctctgccgaaatcagtcatgtcacactgtgtgattcagagccacctgtgtgattcagaagcagctggtgaaaaacaccgtgaagcttcccactatggagagaccctctgacgacaaactcaggcccaactgatggcagatcctgctcagcacacatttgacaaagcaaagttcaccttgttagaagttgacaccccccacctgctcctgtgcagaggtcctgcattcttacaccctggccagaagaggtgtcagagtggggcatggactctgtaagctgcaaaagaagctgcctgggaggagtcaggctggaggtcagcttctactttaaattctctatgggacactggtaaaactacagccaggattcaattccaagaaggttatcagagagacaatccaaggtttaggtgcaaagatgttcagggcagcattgtttataattatgagaaatataacaatcagaaaacatttcctgaggacactatggtcagggagcagtttctgtgttttaaaggaatagcctgctgtggttttgaatagttgtgtcccctctaaaactcatgttgaaacgtaatccccaatgcaacagtgttaagaggtgtggcctaattaggaggtgattgagtcatgaaggctctgacaacctgatgggattagatgcccttaggaaaagccctggtggagggagtaagttccctggttggcccctttggttcctcccaccttgtaaggacaccatgttcctccccttggtcgtatgcagcaataagacaccattttggaagagcagaccaggctgtccccaggcactgaacctgctgcgaccttaatcttggacttttcagcctctagaactgttgataaaatacatttctgctctttataaattattcagtctctggtttcttgttatagcagcacaaacagtcaaagacatagcctattgagacaggaattataattgttcccatttcccaggcagcaaaacaggaactctaagagggcaggtttgaactcaacctgcatgggattggcaaggtgaaaatgatggcttcaggccgggagcagtggctcacgcctgtaatcacaacaatttgggaggccaaggtgggcggatcacctgaggttaggaattcgagactagcctggccaacatggtgaaaccccttctctactaaaaaaaaaaaaaaaaaaaaatacaaagattagccgggcatggtagtgcacacctgtagtcccagctactcaggaggctgagacaggagaatctcttgaaccctggagggggaggttgcagtgagcagagatcgtgccactgcactccagcttgggcgacagagcgataatctgtctcaggaaaaaataaataaaataaaatgatggcttcaaaaaattttcttagaagattttgctcaaacaatctaaagttatgcagaaaagacatgcttacatagataaaaacatgcttagaaggaaccttgggcagtgggcatggtggctcacacc

SEQ ID NO: 48710 - DNA, 3732 bp, Homo sapiens
gctgtagaagctttgttcttttgctcttcacaataaatcttgctgctgttcattctttgggtccacactacctttatgagctgtaacactcaccatgagggtctgtggcttcattcctgaagtcagtgagaccacgaacccaccaagaggaacaaacaactctggacacgccaccgttaagagttgtaacactcactgcgaaggtccgtggcttcacttctgaggtcagtgagaccacgaacccaccagaaggaagaaactccggacacatctgaacatctgaaggaacaaacttcggacacatctttaagagctgtaacactcactgcaagggtctgcagcttcattcttgaagtcatagagaccaagaacccaccagaaagaataaattctggacacatggagatcgtgccattgcactccagcctggaggcagagggagactctgtctcgaaaaaaaaaaaaaggaaccttgcaagaagtaaacatgttaatggtgacaaccaggattgtcccttgggggtaggattactggcaattgttaaggcaccttagacttttccttcattttctagtttcccactgtggggttacattactttcatgatgtgaaaaacccatgctacttgccaatgacttaaattatatattcgactgggcacagtggctcacacctctaatcccaacactttgggaggctgtggtgggcagatagtttgagcccaggagttcaagaccaacctgggcaatacagtgagaccccatctctacaaaaaatgtagaaacatcatccacaaaatatgtagagacatcctcatgccggtagcccaagctactcaggaagctgggacaagaggttcacttgagcctgggaggcagaggttactgtgagccaagatcgcaccactgctctccagcctgagtgatagagcaagactctgtctccaataaatgagtgaatgatatgttcttgcagtattggacctgttggcatctaaatatctcacctcaaagattatagaagtgctgttctggatgttgctatccctgtgaaaccttctccaacccccgccctccctccttggcttaattgcggatactgtttccaagtaaagcaaatttcatttctccaaattaaagtgacatgaagcaggtttttcaccctggtcagcccttgccacatagttgggatgccagaattctttcaaatagcatggaaagtcccaaagaccaaactagagttcaacctctaagtaaataacttctcttgccaacattcctttctggggtgagccttccaatttttttcatgcaagtcagtctgtaaactctgcacagccagcctggtgaggccctacagtaaacagcgcacctccactccatatacgtgattaaggagctggggtccagacctcaaagtgtcctcaacatgcgttcaggaagagccatttgttacctatggtagactgctgaagctgatggtgacttacttagaaagtaatgaaacaggacaggcgcagtggctcacgcctgtaatcccagcactttgggaggccaaggcaggtggatctcctgagttcaggagttcgaggccaacctgaccaacatggtgaaaccccgtctttactaaaaatacaaaaattagccaggcatggtggcaggcacctgtaatcccagctactcgggagggtgagacatgagaatagcttgaacctgggaggcgaaggttgattgcgccattgcactccagcctgggcaacacagcaagactctgtctcaaaaaaaataaaaaataaaaacaaaagtaatgaaacaggccaggtgcagtggctcaggcctataatcccggcagtttgggagaccgaggcaggtggatcacgaggtcaggagattgagaccatcctggccaacatgacttttttttgagacaaagaaagagagagagagagagagggaggcagggagggagggagggagaaagaaagaaatgaaagaaaagaaagagaaagaaagagaaagtaatgaaatagcagaggcaaagtgatgtctccagcaatggggttctcattccctttcctactgatgcctgtactactctggttaaaaagagtaaactcactcacaaccctgggccctccatcctgtgtgctgcaatggagtgaaagtttggaaattccaactaagaaattaaacattgagcaaagagtctgctttctccagtattgggtataaagtcaaatggcattagggctgagggcctcgtatggcatctttgcctgggtggactggctggtgcagtgagttcagggtacagaaggcactgaggagccaatgcaatctggggtctggggtcagtaggacagggcttgtcaaaagtacgaacattaagagggttctgtggcaggggtggggtaagggaagactccgaaggctggagcagaagcattggcagcagcgccgtgactgggccagtcagctttattctctgctggctgttggtactctggctgaatatgaacaagcctgggacactggtgctgactggtcacagttgcgatggtcagacagtcaatacctgcgggtaaagcctgtctctgattaagatggagactgctaggctaggattcctccccaggctcctcttgtctgtcatctgcttatgaactttctaaatttggcccggcacagtggctcacgcctgtaatcccagcactttgggaggccaaggcgggtggatcatgaagtcaggagttcgagaccagcctggccaacatggcgaaacctcgtctctgctaaaaatacaaaaattagccagctgtggtggcaggcgcccgtaatcccggctactccagaggctgaggcaggagaactgcttgagcctgggaggtggaggttgcagtgagcagagattgcgccactgcactccagccttggtgacagaccaaactctatctcaaaaacaaacaaacaaaaaaaatttctacatttataaatggtgttttaaaaagaaaaagaaacctggaacattgctatgggctgagttgcgcctcctaaaatcccaaggttgatgtcccaaccacagtgccttagtgtgtgactgaatgtgagataggatctttaaagaggtaattaaggccaggcttggtggctcacgcctgtaatcccagcattttgggaggctgaggcaggcagatcatgaggtcaggagattgagaccagcctgaccaacatggtgaaaccccgtgtctactaaaatacaaaaaattagccaggcgtggtggggtgtgcctgtagtcccagctactccggaggctgaggcaggggaattgcttgaacccgggaggtggaggttgcagtgagctgagattgctccactgcactccagcctggcgacagagtgagactctgtctcaaaaaataaataaataaataaaaataaggaggtaattaaagtttaatgaggtcattagggtgggccctaatgtaatatgactggtgtctttaaaacaagaggacattaggacacagatacacacagagggacaacacctggggaaggtggcatctacaagcccaggagacaggccccagaagaaaccaactcggcccatacctggatctcagactttcagcttccaaaactgagaataaacttatactgttcaagcttccctgtctgcagtatttcctttttttttttttttttttgagacagagtctcactgtgtcgcc

SEQ ID NO: 48711 - DNA, 1824 bp, Homo sapiens
cctctcactgtgaccccacattgtcaatggagaaacaaacgccgagaccaagaacctcaccgggcgtgctggctggcgtctatagtcccaactactcaggaggctgaggcaggggaatcgcttgaacccaggaggcgtaggttgcagttagctgagattgcgccactgcactccagcctggcaacaaggcaagactctgtctcaaaaaaaaaaaaggccctggagtggacagtggcagaactggggtatgatgctggagattgacgctgagcgacaagtcaccacatcccccacctaccttccctccacacatttcctaacttgccccacgtcaaagagttatcagtaactataccacagttgttttgatgattgcaaagagcaagaatgggaataaatcccttcttgatgtctcagccctcatgtggatttggcggaggccaagagctggcttcatcagcttctgtttatgagcagagcttccaaggcctgtctgtgcagagagagcttgaatacatcccaggaaagaccacgagtgaggcgctcattcagcagaagggttttacagaatggcttggaatatgtgaaggcccacggagctggagcggagggagccaggcatcagttgccctgtctgaaccttcaagaaggctgagggctctgccttccttgttcatctaactctgcaagttttggggacagggaaaaagtgttactatttccacagctgatccagttcttacaaagcctcgagcttggaaagaaagagagggagaaaaccttcagccctatcactgatttcagagtgcagagcaggctgccaggggctctccaggcaaaggcagcggcagtggcctccctattgccctgctgggagcaggctcatccctcaccatccctcctcttctcatttctacccccaggagctcagttagttgctgctggctcgtttctatttacacaactggaaaagtaatgtgtggtctctcccaaacagttgggcgatctgtgtaattatgcaacagtagaaaacagcagctctgtttggaaagcagggttatgatctcctagctggggattgtttatggagatgaatctcatggcaggctcaatttccttaagcagctcctctccctgccaggtcaggtccttccctggtcacagactgcactgtcttctggagtcttggctgtcctggacataagccatttctagtgagtggtatgtaccaccttccattctgcagttctaaggaggaatctggaagcattcacagctaatcgtctctatgggtgcccccactaccgtgcccctctgccccgggaacacacagctattgccatttgcctcacaccagccctcttccagttccaaaacgttcaaagtgattgctcggcaagagaaaggttgcctatcctgcacgaggcgctgtgtttctccagctctataatatactggtggtttacaatgtcaccatcaggaacaattcccggcagagggtaatcggccaaaaggacaagtcaaatcaacacaggcaaacagccaagcccaggtggcagggtcggtctgcagaggaggctgagcatttatatggaggcctgaaggtttgtccttgaaaaggcaaattgtctagatatcaggttagcatctggtgggtgtgttgaagaattacaagctggtagttaaagggcaattgcttttccttgagacaaaaatggcctaagtggttagatggaaagggcaagggagatattggaatggtgagcccatgaaagacacagacttgggtcctggagacgggccccactcctgtgagccagggca

SEQ ID NO: 48712 - DNA, 904 bp, Homo sapiens
tcgtggtgcgctggacgaacctgtgctgctgcagctggtggcgggtgtacttctgggcgtgaacttcacgctcactgggagcagcccatgcaccggccccctcggtgcgctcaggtctcaggtgcctccgggaaagaggagaaggcagctgtctctgcgctgtccctgagcctgatgcctgtctggaatcctactgatgaactgtgaggaccaggctggcagcagccagctcattaggtcttgtcctctgagaaacgcctggcagagggcggggcagccggccaggagcagcgctgggaggagggtgtttgtttttgacacagaagagctggagaacactgccattcgtgagctgacctggaaatgctggcggccccttggcaagggagctgaaaagggcagccccctctgtggaaggtggtcgaggggtggtgctgggttgtctgagaagacatgggctgggcctaggtgagactgagcagagcgtgggagcccagggaaaggttcagggccaggacagggaaggagggaggggaagagggagggaagacaggagagagaggagagggaagcaggggggaaaggagagatgggggagaagagaggggagaaggaaagaagaggagggaggaaggaaaggagaagaggagtgaaggagggagaaaggagacaggaggagaggaagaagtgagggaaggagagaagggagtagggagaagaggggagaaggggagaagggaggaaagggaagacggaggggaaaagaggaagggaggaagcaggggcaccccagaaagggccagacactctccaaagttacagcatcctcacagcatgccccctgagaaggcagcattcatgccattttgtttaagtgaagaaacaggaatgagtgccagaaatg

SEQ ID NO: 48713 - DNA, 466 bp, Homo sapiens
aataataactgtagaacactgctgaaagggctgcttatcagagttgcctgatttaatgttagctaagggcattcaccttgccattcatgtgcttcaaactactctaatctagaggattgtgtaatctatttaaaatcttattttcatttaagaaaactgttaacttctctctctgttactttgccttgaaaaatatttttaaaatgtgtgctaccaaataactcatgagtcatccatcgtttcttacagtgacccatctggagagagtgacttttaaaatgtgtgaatgttccaggatcacgacaccctggaattcaggatggccaggactgcagcccccttttgtgaggtttccgaagcagacttgggcctgcaggccagatggacacagcaggcctttgctttctatgcaccaccagaaaatgcttgatgattcactggctttctttgaatcaaatgtagatta

SEQ ID NO: 48714 - DNA, 2319 bp, Homo sapiens
aaaaatacaagaaaaaaaaatagctgggcatggtggcaggcacctgtaatcccagctacttgggaggctaaggcagcagaatcgcttgaacccgggaggcagaggttgcagtgagccgagattgcgccattgcactccaggctgggcaacaagagtgaaactccatctcaaaaaaaaaattaataaatacataaaaaataataaaaaggggaaatttggacccagacatgcctggagggaagatgatgggaagagacacagagagaagatggttgtcctcaagccaaggagagaggcctgcaacagattctccttcagcctttagaaggaacaacactgccaacaccttgatcttagacttctgtcctccagaaattgtgagacaatgcatttttgttgtttaaggcaaccaatttgtggaactttgttctggcagccctagcaaatgaatacaacaaaatatatactgtattgagaaccttaatattggcaataccatttgcacaggaactccttgcctttggttgccacctaagaaatcatgcatatggacatggaattacacataaagtatatttagctagtttttcttcaacatgctattgcaggaggacaattcaaaaatctttccaactcccacctgatttctgaaggttctctgggagcctgcgcatcagccatcaaaacacacttgtcacatttttctttccttttggcctcctttagtgaagtcagctgcctgaggctgggcggaggtgctcagcactccctctggtttgtggggggctggggtgggtcacacttattctactggatatcactgttcctgggccctgccaccactctcagccctggtgctgtggattctgttcatgagaggggctgaagtcaagcctccctctcaggcccagatctgagtctacaggtcagccggggctggggcctcacggtagcaggtggtgacagaggacatgtcattgtcgcagtcactgaggacactggttctcatagcccagcctctgtgcctggacctcagctataggcctggccccattgtgctctccctgatgagaatctccaggccttgagctacctgactcttcccagttggccagacacatcccagtgaatgatcatcatcctgctctcatctcatagccagctgatcagtctgttcaccctccacctactcaagtacagagtgacacaccccaagcaacaatcgcatgagaaattctaccacctggggagggcagaactgggacagacttctttcattttctgatctgcttttgccagatgtcctctgtagcaagaggcaggacaaacagtgaggactgcaccaacactcaccgggtgacccctttgctttggaaacttactcagggtgaaaggaattccgattttaaacagcatctctttgtgtggcctgtttgaggcaccacacagagcttgctggagcagctctgttgaccgctgacccttggcctgctaactgaaacaaggtgagtatttctaaggctgtcgtggccacgggaggaccggagaataaatgtggacctatttacattctcttttccctgaaggtgataaatggcttcccccatccaaaccaggcccctctagggcctttatttgctattctggttttaaaaggcagacggagaatgtattgagttatctttcaactgtttactagcagaagggcaaagatcagattaccagctcagagtgattcatcttttctcccaaatcaaagccatatgtacacagagtctgtgtacacattagttcatttcattcattcatctaggtcaggagagggagacctgggacaaaggtcccgcagaaagagatggaggcatcaggccacagacagtgagcagcatgggtttttctctgcctccacattaggactttaatgttttttttttttgtttaaaaaaaacaaaactgcctgatttcctgtcaggccaactaatgatgttttttccccaggtttctggtatagaggatgttttaatttgagagaagtttccacctacaaaaacacatatttgtccgggcatggtggctcacgcctgtaatcccagcactttgggaggctgaggcaggaggatcatgaggtcaagagatctagaccatcctggccaacatggcgaaaccccgtctctactaaaaataaaaaaattagctgggcatggtggcgcatgactgtagtcccagctacttgggaggctgaggcaggagaatctcttgaaccccgagttcagagtcagtcagttgagatcgcgccactgcattttagcctggtgacag

SEQ ID NO: 48715 - DNA, 1599 bp, Homo sapiens
aaagcatttataaattaagatctacacagagtaaaaaagaagagtttgctaattttttgagtattttgttttagttttgtcagattagtgaaactaaatttttcaaaaagctagaattaatggaaaactataatactttcttcaaatatttacatttgcttaaatgtatttgttttgggttgaattgttcttcctccagaacaaaaaaggcactggtggatgtgaccttattttgctgatgatcaagctaagataaggtaattagggtcggtcctaatccaatatgattgtgttataaaaagagaaaatttggacacccagggagaatgccctgtaaaaaagagaactacactgccacaagccaaggagctaagggaagctggagagatgcctggaacagatccttcaccagggccttcagagggagcgtggccctgctgacaccctgaccttggacttctggcctccagactacaagagaataaatttctgtttgtggcactttgtcatggcagccctagcaaactaatgcagtattttacatattcttttgggaaataattgtagtttgcaagactccaattgaaatagaaacctcaaaaagaagccagccgacagtgtattttagtccttgagaattcaactttcttgaaccctgctaggagacaatttggcccaagtaaataaattatgtgttcacagtcatacagaagccctggtttatatccttagtgcctcgagtgccattctagcacacatctaaataaaagggattaacaataatatttcaacttcattggagctatgtctgccaggaaggaatgaatcagcagccacaaaaacattcctgcttgtgaagtcatcccgggaagacttagtataatccatgaaagcagagagaattcatttcagaaggctgtctgcttcaacatttctctttaggttttaagttattcccacttccaatatattaagtatttgtaagccatatctagttcttttaaatttaattagcttttcttgtgatgtccatcatgggaaaaattccaagacatacttagaaacatagaaaagcttagaaaaaataagaaccattaaaacaaatcatatctcacaactatgaccctatcattttgtcatctctttacttgagtaatacaatagcttcttttttttttgagacggagtttcactcttgttgcccaagctagagtgcaatggtgctatctcggctcactgcaacctccatctcccaggctcaagcaattctcctgcctcagcctcccaagtagctgggattacaggcgcccaccattatgcccgctaattttttgtatttttagtagaaacggggtttcaccatgttggccaggctggtctcgaactccttacctcaggtgatccgcccatctcagcctcccaaagtgctgggattacagacatgagccactgcgcccaacccacaatagcttctttttaaaagcgtttcacttggaaataattttaaacttaataagaaagttacaagagtaattcagaagtactcagctaccctttccagagccacctattagcattttcccatgcttgctttattag

SEQ ID NO: 48716 - DNA, 1055 bp, Homo sapiens
tcacctgtgacgggggctacgtaaacgcattgggaaaagctaagtattctaaatcttctcattattttacaaactggcaagttaaaggaagaagctgagagaaaattcaccctcttgatggcttcctgctcctaagtaacactgaccagcagagttcagagcacaaaccttgctgaaaagagtggctgtggactgtggcacgccagtcttcacagattgtgttggggaccccaaatgtgaaagggaatgcagattttccacagttataaaaaccatctcaccttcctcctggcaggtaggtgctaaggaattacactgaaaaaaataaaggcaaaaatcctctaggagagactctgtgccctgaggtcaggcgctcccctctggatgttcctgccttacgcaatggtattcacaaaagcaaatcaagaggaaaatatgtggaggaaaaacccttctgacatctctaaattgcatccactgactagtggcctagccagctcctgcaaagtggtgagtcatcgcagtagagaagaggcccgagcaaggagcagggcaagagctcggaggtccttctgcccaatcagcagcagcccccggctgggaggtctcttcggggtccaaggctacatagctgagaggccacagagtgccaagaaccgttaagggggccgagctggcaagggggagaaggtgggggctggcaactcaccgcattttgttgccatgagtcactttaaaaatacaaagaacaatatgatttgtaggtggttattgatagctccaggcatccaatccttctagtttataaagatacaaatcttaattattaatggttaagatgaagaaacaaataaatgccttgaagttaggaaattcaaacgaattgtttcctcagatcccctcacacaaaaaagggtctgttctgtaaagtccagcttgcttggcctattccaagaccaatgacattcctggttctttcccagggaggccagctaaactcatgttgcagaaacttgagttctgcaggcagaaacccacctgggagccaggtgaga

SEQ ID NO: 48717 - DNA, 1432 bp, Homo sapiens
ctcaatagccatgtgtggctagtggtgactattggacaacacggctataaacctcctgtggacagagtggaagggccgctttcttgcctccatctgattgagggatgccataaagccttctgagtaattgccattattatgactttcatttatggaacatctgctaggtgccaagctgttccaaggatatgtttgaatgtgcctgtacaaatacacacacacacacacacacacacacacacacacattcaaatcctagcaaaacccccaaggtatgtatcatagttctaccttattaagacttgaagaaagttaagaaacttgcccaatggcacatggtcaaagaggagctgggagtgagttttaggtctgctgattctaaagcctgtgcattttcattttcacacactcaaatcatagttctttaatcctgggtgttaaattccatcattagaaagtcatttgtgtttatcttgaagatgactcgttcttcctgcacctgggatgcagcctacattgaagttagagctaaattcctctaactgtctctacagagaataatttgacaaacagcacaacaggtgcccacagaagtggaattaggagggaaagccgtagtgtgggcagaggccaaggtgccagaacagagacgggtacatgagggcacctcagaagacaaacatggtctacactgcacatttctgaaaagctggccctgaacacacagcaacacagcaacagagctgaatggtgtgagatacaggttcctgccttgagcactcctgggtcaggacaatgtggaccatgtccttggagggccgttccattgcattatagttctgtgcttaggaatgcagttacccaggaccccaagaccagaggccaattccagtgcagctcctatatcaatgtgagtgaccttgagccagttgcttaacctttcagagcctcggtctagatgggtggcatactagtacctgtttcattagatggttggatagctcaacatacacgtgattatatagaatttatgcagtgcctggcaggagctaacctcaatacatgtcagctcttctcagaagctaattgaggaattggaaattggcatctgccctagaaaggatccccagggaagaggggctctccccaggtaagtttttctggcaggggcagggaacataatgagaaagataggacatcagtggggaaaagggatataaggatgaactcacttcccaaggtcagaagtcaggaggaggctatttactgcaagtcaccaggtcagtatgtagaccagattcatgtttgccctagtcatgcttctagaaaacctcccctgtccgcatcaggtgaaaagaacatcctacattcactctgccccctattcctgaggcccacacctgctggccaatcagtgactaatcagatgctc

SEQ ID NO: 48718 - DNA, 1304 bp, Homo sapiens
atttttgtacccttggctcataaaaaagtgcctagcagagagtagttacgtaatggagaatgaatgattgcattaatgcatttatcaataatttaatatggaagcaaaatattgggccattaccagtaagtttggatgtgctcctagcaatggcattagaaaaatttaagagtgtaacataagaaaatcaataaatggctatgaattgcactgctacggtatgatctggatatatttgcctcctagcaggaaatcacaaaatataatgtcttatggcttatttgttttttaaaaggaaatgactatttctgcttctaaatatgactaataattgtttatcctaatgaaaaggtaagggcaacaaaaaagaatgatctgagcctcttatagaattgttagtctgtcagctagatgacaaacaatttctaatttagtgacatgactcatatgcccagaaattcctgaggaggctgttcatgtttgcgcagagacttttcttgcctcagaaagcacaccttcaccaccaggctgtggagggtcctctgaagatgagggactctcagggcaacatgggggcatggtgagagctgagggtcccacctgcctgactacaaactgcgtactcaaaggatgtcagcacttctatgataagaaaactgacaggttcatctatcactcatccaccgactcatgtcttcaacagacacttactaaacacctcctccatgacagtcggtacgggaaggaggaatacgaggacagtctataaagcagcccttgctccttgggagcccatagagtgggagaaccaaggctgacacacgaactggctatgagagaactgacacaggctggagagttgtacaaaccaagagagctccagcttcttatggacaaggttcaggaaaggctctaggggttgggccaaatgcagaagacaaggcagtcatttactaaaaatctcagattctttctcaaatgtgtctatacctgcagttcactttttcaggagaagtccctggttgtggagagaaacgttcagatttccactctctcttgtcccaaaacaggcatcggatccactggaaatgtactgtatagttcactgccttagctaaatatctgtttggaggttttctgtcatagtcagcatccaataaggataaatagcctacactggcatctaaaaagagaaaacataaataaaaagtacaacctgaggtttgcagaaaggcattctccatttcaaacgcagacagagtaggcagataggtggggacaaggactacagatgagcaagaact

SEQ ID NO: 48719 - DNA, 1368 bp, Homo sapiens
atctgcagagtgtgcaggcctctcagaagcttttgctcacctgttccagctcacaccacatgctcactcctccattagccagcttgtcacaaaggatgaagttaagcttatcagggctgatgcggagggtgcaggttttggcaagcttggctatcatgttactgattcctaaagcaggggttaaaataaggaattactaaaatgcacattatgtatcctagagaccaacttattttgcagaatttcttgttcatcaacttctcggtggaaaaataaccacttaacgttggtatcacactggaaagtactttaatacccctgatgtcacgcaattctcccaacaaactaggggagatgtacagcacacatcatcagtgttcaaataagaaaacaggcacctaccagtcattcattcattcaacatggatttattgactactaggtactgcaatacacagttaaatgcaaggttaggcactgtcagggtggagggacgaatggggccttgaaggtatgtcaatgcctgataaagccgtctatgggagcagtggccgcttttttttaaagccacgtgatcggaatcaagtttcagaaacgtcccttgaaagccgccttcatccccacaagtgccctccgacccgccccgcgccctcccggccccaccctcccgcggcctacaccagcacccccatcccggccccatcctcccgcggccccttccggcgcccatccccgttctgatcctcctgcgcggtccccaccgcgcgctcactgcttccttccgttcctccctcgctcctctccggcctccctgctcacgtgtgaagtggttcagacaggccccgtccacgatcttggcccgaaacttcatggccgcggatggcgcagccgcggcgggcctctgtgggtaacagaaaagcgtcgcgccctgagtgtccccgcccggaaacacggcagcgcgaacagtggttccgcccggctcgggctacgcgactcttaccagggttatctccgggccacgccccggaggaggtggggctagggggtcacgccctagaggaggtggggtcacgggtcaaggatcacaggtcacgccccgggggaggtgggggtcccagtctccgggtatgcctccgcgctgccgggtaatggtgggatctacttttagtgaggcggaggcttcaagccccagattcggggaggttgttctgagaattcacgttttgaaagaattttgtgacacctatttcaagtgttattttaaaatatccaaataaaattaatcgtttataaaggttaaacaatattatcttaaatatacctaaggtagagcagctttaaaccctccagcctcagatgacggtactg

SEQ ID NO: 48720 - DNA, 869 bp, Homo sapiens
taattgaaggcataaacctatataaggcaaaagtgggagtagacagtaaaaccaaaaaacaaaacaaaacaaaacaaaacaaaccccaaaacaaacaaacagaaaaaccaaaaagtgaagatggccaaatggcgcctggagagaaagaacacaaactactcgggctgtacgtggacccagcagcgcaggacttaagcggcaggttcccaggaaggccggaggagggtgtccatgtggggagcgtgtgggtgaaagcgtgagggggagtgtgggggaaaggagcccaaatctgcggcttagctaacagtcatttcaaaaagcagttacaacgcctccacgcccctccagccccgcctggcccagcagagggctctcttcttcctcccatctctaagaccactgccggcgccgccccagaaccgcccacaagagcatggcctctgcacaaagtggtgaccccgcggccctcctctccccagcagctcatggtgtggtgggccaggctggcacctcctgtgcactgcaggagtcctctcagggtcagctctcctgatagcacacttgtgactcccgacgaaatggcccgaccagatgattcccgctgcaaactcacgacggatgagccccaccgtgcgcgcaaagcttcctgccggctttgcaccgcctagcaattcatgtgacaagcatcacagacatgggagaaaagtgttgtacaggaaacagagagacgctacccgcaagggggaaaagtggggctaggaaatccagacccggaagcgagcagaagaaaatgagacaagcctacagttaatatattcagaagcataagagaaggtactgccttcataaaagaaaaaaatataggctct

SEQ ID NO: 48721 - DNA, 5980 bp, Homo sapiens
tacaaaaattagctgggtgtggtggcgggcgcctgtagtcccagctactcgggaggctgaggcaggagaatggcatgaacctgggaggcggagctttcagtgagccgagatcgcgccactgcactccagcctgggtgagagtgtgagactccatctcaaaaaaaaaaaaaaaaaaaagagattaactaagtgtctagcaccttttattaaagatctgaataggaaacatttgtcatctattgtctctaagggcagccactataagacttcaaataccctgggtctccacaatcttttatcttaacctggacatttcctttctatcaatccaggtctttagacaaactcaaccaattgtaaaccagaaaatgtctaaatttacctatagccttgaaccctgccccctaccccgctttgagttgtcctgcctttctggaccaaaccaatgtatttcttaaatgtatttgattgctgtctcatgcattcctaaaacatataaaaccaagctgcaccctgaccgccttgggcacgtgtcctcagaacctcctgagggccgtttgctgtgtcacgggccatggtcattcacatttggcttaggataaatctcttcaaatattttacagagtttgactctctttgttgactactaggaccagcaacctgggaaagtgatggctcatcagactggactcagctgccaggggagtgggcctgccactgtgagcctatctgagctgggggtgggtcaggggactgagtagctctatatgatgagtgagagttggcgggaagaatctcactttttgtattttggcaagaatttgaaatctcaggggtctgagtcatgctgtagtctcaccacaggcctcaggggagtcaacttctgacctggaggcctggtctgggtttgtggtgtctgagtcatagttcgtgtgataaaagtacgtgctctggtgtggaaagcaggcagaggctttttcactccattctgtctcactgacaatgaaaatgctagctgtgacccaccacatgggtttcatgacccacgaatggaccaggcagctgtttagaaaacactgcggctcaatttctgccctctctgaggggtgttctagaaatctgtatggctgctggattggaaagaaaagagcaattgcatgaggaattgggaagtgaggacaaacagagaagaagcctcagctactatctctaaaatattatctgagaaagaaaacaaacaaacaaacaacaaacacatttcttttcctgaggaaggtgagcctttaaattatcaggcccagagaacatttagaacagaacagcagtcatggctcacttccccttcagctaagtggttacctcttgaagccacttgctatgtggctgtagaataactgaggccaattagccataagatgccatccaccctatagttcaacactgtgtgggcaatcactaaccaatgttatttctgtaaaccaatgaggattcctgacaactctgcaatcgccccatctcctgagttgttcttttttctttaaaaacttgagcctcctttttgttcttggagcactccccatggcaacttagaagtgtgtcctgggctacagtcctcaacctgggcacaaataaactctctatgttaattttgtctcatctttcttttaggtagacacattagctttgggagaatttcaaagagtttgaagttacttagatttgggaaacctgaagggcagtggtgtgtcactatctggtgtggcctggccttcagcctctcagccccttccctccccacctctcagagctcagggccaactgcatctctgaaagagcccaaagaccttgttgaggagcagggggatcctggctgagcctgcaagccctgggtctcttccagactttcctgcctctagcagctgctgctctaggtggccattggtgggctgcatttgctctctgcttgcaaacattgatgacacaggtattttgggtgtggtttagtagtggcccgacacaattttgtttccagtttgtcacactgacaaggttttaacctgacaaatgttaaacacaaattataggaggccattgttttagactaagctcttgcactaggccccaaaagacaagactaaaaataaaaataaagtcacccatgctaacgtttcaggtcaccaaacttactggaaaggcgtcctgatcctgagccctagagaaagttcttggatctcctacaagaaagaatttggggtgagtccacagagaacagtaaaaggaagtttattaagaaaggaagggaataaaagagtggctactccataggcagagcatccccaagggctgctggtgggtattttttatgattactcttgaatatgtgctaagcaaggggtggattattcctgagttttccaagaaaggggtgagttatttggttattcccccttcccttttacaagggaacccttaatcctaagggttgtagagtcaggaaatatgtcagcaggagtcgactcagagactcttcatcttgaataggagctgggtaaaatgaggctgagatctgctggagtgcattcccaggaggttaggcatccttagtcacaggatgaaatagaaggttggcaggtggtatcacaagatacaggttacaaagaccttgctgatgaaacaggatgcagtaaagaagccagccaaaactggccaaaacctgccaaaaaccagcaaggtgaggaaaactacctctggtcttcctcattgctcattattcgctaattacaatgcattctcatgctaaacgacactcctaccagcaccatgacagtttataaataccatggcaacatttagaagttaccctatatgttctaaaaggaagaattcctagaaaactcatgaataatccacccttatttagtatatgatcaagaaataaccataaaaatagccaaccagcagccctagaggctgccctgcccatggaattgccattcttttattcctttactttctcaataagcttgcttctttcactttactctgtggactcaccctggccccgaattctttcttgcacaagatccaagaacattctcttggggtctggattgggacccttttccggtaacaaaactaaaactaagttgttaatctaccttcagagagagagaatagcaacttcctaaccaggccagtttcagtcttcagtctgaggcagcaaaatagggtctggaggcagggaacataaggccgattcacactttagctatgacaggaaatagcctctgcgtaggccaagtaaatgactttgtaactttgcatcatccctttcatttacatagtgtgtgccccaagcggaggacattgaaactccccaaaattctggaatggggcctttgagcccctacgctcaggcccgctcccacactgtggagtgtactttcatttaccttttttttttgagatggcgtctcactgtgtcaccaaggctggaatgcagtggcatgatctcagctcactgcaacctctgccacccaggttcaagtggttctcctgcctcagcctcccaagtagctggaattacaggcacctgccactgtgaccggctaggtttttttttttgttttttttttttttttacttttagtagagacggggtttcaccatcttggttaggctggtcttgaactcctgactttgtaatccacccgcctcggcctcccaaagtgctgggattacaggtgtgagccactgcgcctggccgtactttcattttcaataaaacccttaattccttccttgatttgtttgtgtgtttcactcttgtcacccagtatggagtgcaatggcgcgatctcggctcactgcatccttcgctgggttcaagcaattctcctgcctcggcctgcctagtacctgggattacaggcacgcgacaccacgtccagctaattttttgtatttttagtagtgacggggtttcaccatgttgggcaggctggtctcgaactcctgacctcaggtgatccatccgcctcggccttccaaagtgctgggattacaggcgtgagccaccactcccggcccaaccccatgttttctcaggaactggagttccctttaggaagcaagtaacagaggtgctgggctgcccgggcctctaggtcgtcttctttcccaggctctgtgctctcaccagagtgcgcgttcgggaagcagggagaggaccaggaaagacgcctgagacggagagtgggcaccggccgggggcaggcaggtccggcccctgggggtcagagtgcagcgccggtttgaggcagttcggccacttagctgcgactcgaagtgaatgagtcacttcccctcctcgggcgagctcctggctttgccccagcaagcgggaactcccaggatcaggaaggtcccagagaaactccccaggggggaagccgaggccgtccagagagatccagggtacacacagtgacagtgccagctccacattcccgaccaccgggccagggctggttccacgctgtcatttctctccgctggccccagccgcggggccaccgccagacagacagaccggggatcctgcctggcggcgtgaccttgggttagtcctagagccgcttctagcccggtttcctccgccccaggttaggaccacgtgggtaagaagatttcctctgtagtaggggctgtttaatgagtaacagaactggctgctggttctttacaattgcccagctgctctgcagaggcgagaagcaattgcgggctgagcctcccgggaccttcgcgggagggtggagaggaggaaggcgggggaggcggggccagaggggcagaggaaggtgggggcgggcggggcttgtctgcgggatggcccaggatgcggtcagctgagttcgccggcccagggcaggcggggcccgagcctagcggtaacccccgggcagggcggggccgctcgcagactccatatgagattcacctcgcaggtggttccctcattcgagtgctccggcgcacagacccgcgccccgccgtctgcgagcctcccgagagccgtcccttcgtccggccctggagcattgcgtttgtcgccggtgtcgcagtgcgaggatggcgccgcgggtgtagcggctctctgcgcaggccgagtggtgagtcgcccgcggcccggctcccgccgttctctcttcccaggggtctagcccgtcccctgccttggccacgtgcccatttacctgtaggggcggtgacggaggctctggtgcaccttggctgtgagctgcagaggagcagagagcggcccggcgcggctgcgcggggaggcgggcgcgcggccgggaggttctggggctggtgtgtgcggagcgaggtgggcgtgggggaagcgcgcgggcgggatgtgcttcctcgggtccaccccgtgcctacctctcccacgtcccggcgacggagcgcgcggggctctgggcggggagcccaccgggccgaggcgcagcgagggtgaagccagagccggcagggtcaggtcccgcagggcgcaggcgggcgcttctcgcagcccaaacccgggcggggagtgcgggaacccctagaactatgctgggagccccagataagaggaaggagatggtgacttaagtgacgaagtgatgttttgtccccaccgccttttaaagggagaagggggtaaaatttcatttggaggatgattgttacgcgagctttcagagttcagatggcgtcaagtggccatcgagtcaacatttaacaaaatgttaccgcataaaatattgtcatcgagttatctggcagctccgcagagaaacttcacaggcatatgcgttatatgacataatttgcatggggaagggggtcccttcacgattcttttatatggcaacctgttcttggacctggcagggcccagagaagcgaggaactccgcagctcgtcgaca

SEQ ID NO: 48722 - DNA, 604 bp, Homo sapiens
tgcttgtgaaagagactgaggcctggagggattaatgactcaggaggttcgtacattagatggttaaagacctccggggtcgggtgctggggcctcagctcttgattcttaggacatgttgtttcagaaaaccagacaagtccctgctcaaatctctgtctagtaggtttttcctctatgtgccaatttcttaaacaaaatcccctgcttatcactcagctctgccttggttctgaattttaaatgccttcttatttctttgcagtttgtcatacttctggtatgcttggcatgacaccacttgtgtttaggcattgctagaaaagcaagaatttcttgtcttcattctgattcctatgtgaactttaatccgctgattattcttattttctcacccccccagttgtctcccacctctgctggggttacctgggcaggccttctgtcctgccgccatggcctctccccagtcttggtggcctctgaccttggcaccacccagggttgtggtgacctctggccccccttgctctggactcctggtcctttgttcctctgtaacttccctgagacctctctgaagtctcacatgtgacagctgcat

SEQ ID NO: 48723 - DNA, 692 bp, Homo sapiens
agtgtggccaggtgggcccgccacttcctaggaggacatctttgataaagcagagaaaaaaaaccacacagaaatagaatttaaggctaaagaggaggctgctattagtaagaaaagggctagtttgtttttgaggtgttttgtctctgcactgcctggaagtctgtctcgctgggggagctgtcacagagcctgtggcctgagcaccctcctccgggacaaggcagaaggtaaaatgacttctgaacatgagattctttctacaggtgtcaatggccaagctgcagctattggcactgcactgccctctgctggctatgtgaggtagtgcacatcagccacccccaggtggatctctgttgatctaatcgggcgacatccctgaccttacaggtgaactctataccccctgacacgcaggaaatgccggttgaacaacacatcttgttctgattgagtaaacatgaacttgttggattagtttatgtcggcctaaaaggaagaagctgaggcaaaattggtaaaagtagagaagtaactgggtccaagcttgaagactgcaacccaagaacatagattcaagttcccctgaatgaacactctgattagcagcacttacaagtggatttttaaaggtaaaagggacagggaatgggctgatacacagctgtctgccaggaattctcattggt

SEQ ID NO: 48724 - DNA, 1104 bp, Homo sapiens
gcacaaacaaagcaaggaaggaatgaagggttttattgaaaatgaaagtacactccacagtgtgggagtgggcctgagcatagaggttcagaatttttgggagtttcaatattctctacttggggtatgccctatgtaaatgaagaggatgaagtaaagttacaaagtcatttacttggcctatgccctacggagaggattgtgggagattggttatagtggtgggaaaaatgatagggaaagggcgcaaaccttctgaaaggtcggagattctgcagagcccatgggagaatagctgaaggcagctgttgtataaccctgatgcagggggcaaggagtaggtacaagggaatgcaggcgaatttatcataaacaggcttgtttacttatgttgaccaggaactgacctttgatcatctgcatgcctgacattctctgaaaggggaacaataaatgttaactacctacagcttgtgtttgctccaggcttttggcattatgcctgcactgaataaaagcaagcagctccagcttctctgggctgctctctggccactagagccaggcagtcacctagctgctcttacactgcatgcctgtgtgtgagcactcatttcatctgtcagccagggtctgcaggacagacctggcaggaggtgccctgtgtgaggaacactgcaacggatcacgacagaaccctcaaaaatgaaagtgaagtgactgtgcagtaaataattggtgcctgctggggattgatttccaagtttgaagggattttcaagctggggtttcatcatgggacaacagttatcagcttaacagcaacagtatatgaaagtgttgaaaccgctgattaaagctagcaaagccttgctctcagagtcccagttaagggacctaatgcaaactgttgttttccataatccatcattctcagaaggcacactagacttaaagctctgggaacaagtaggaaaaattcttaaataacattatgtacaacgacagtgagtcccagtaacatctttaacgttatgggccttagttagggctgctttggccctgctttacacagaagagcataaaaagggaggggaggaagag

SEQ ID NO: 48725 - DNA, 874 bp, Homo sapiens
cactacatatcgctctttgattggaaaggaataatactgattatactcatgtttgtcttatgttatttactggttctaggatgcaaagccggaacatgagctgtaactgccgcaccagtcaaacctgtcactgtgcacatcaacaaaacctgatgcagacaaaacgaaacaaatcaaaacaaaacaaaccagaaaagggggagatgtgggggaccagtcagagtggtgggaaaaactctagggaaaggacacaagccttctgaaaggtcggagtttctgcagagccccatggggagaatagttgaaggcagctgttctataaccctgatgcagagggcaaagagtaggtacaagggagtgtaggggaatttatcttaaacaggcttgtttacttatgttgaccaggaactgacctttgatcattcccctgaaaggggaacaataaatgttaattacttacgggttgcatttgctccaggcttttggcattatgcctacactgaataaacgcaagcagctccagcttctcagggctgctctctggccactagagccaggcagtcacctagctgctcttacactgcatacctatgtgtgagtgctcatttcatccagggtctgcgggacagacccagcagaggatatttcctgtcatagctgaagtgtgaataggccttatgttctcttcttctagaccctattttcctgcctcacaaccaccctgggcacatgttctcaggatctcctgagggctgtgtcacaggccatggtcattcatatttagctcataaggagctggacaactcgaatcaggtggtggggtctgggcaacttccaggctataggtaaatttaaacatttttttttttgagac

SEQ ID NO: 48726 - DNA, 1595 bp, Homo sapiens
ctgccagcagtgactgcaggaaaatctcttaatgtctttctgccggttttcacctataaaagaagcgcagcaacatcactgagctgacaaggtattttaattctgcaaagcactagacagaggactcagcacttagaaaatactctataaaatactgcttcttctgattcctcacgatgacccctgaaaggtatgagcccttctttctcatcacagagattaagagcttgcctgggtcacaggggaactgactgacccccgctgtgggcgcccagagccccgctgggcccagtaaatgcctgcggtaagcggccccgcccccggacaggctctgccaaaggaagccgcccgcagacctggccccgagcctgccgtccacgccgggccccagcttcctaatcctggatgagtctggttctgggctagcgggtcagccaccctcccgctaagacagaagcaaaagggcacagccactgcctggctcccgcctcccacggcctcccgcgaagtcaccgccccgcgacccccagcattccagaggcacacgcccgcctctcccctacgccccaaccctgatgctccacaggggtcagcagcgcccctgccccgcctcccgtcaccgcatcctacctgcggctggtgtgggacgctggcagcctccgaaaagcgcggggactgacgtgcgcctgcgcgctgctgtcgccctcggactcgcgccgtacgtgcgtgcgtgagtgcgtgagtgcgtgcgtgcgtgcgttcggcgcgcggggcgtgggcgcggcacctgggcccgggcaccgccacctaggccctagctccgaccagtggtgttctataaacgcttattacatcattgtgcataggcttcatttttaaaagtactcccaaataaatacaaggaggcgatggaaattgaatgaagattcgaaggattcccatagagcgtggctcacttcccctcaccgggacagcgagcggcggctcacctgggagagcaaagcgtggctctcctgcgcccacccgggagagcaaacaatggctcacctgcgcccacccgggagagcaagcgtggctcacctgcgcccactcgggaaagccagccgccatcctgtgctgcaggcagggagcgggcggcgggagaggagcggatccacttaggtcagcggttaaaacgtcgttacaagaggccaccccggcatcgcggggcctgtggctgcgccccctcttgaattcaggcctagcacatcacctccgcccctcgcaccctgcagtctgcgctccatacagcacgtgagcgggtgctcagcaatgttccctggctgaaagaaccgcatagagtagcatgcaaaaatgacatgcatgtttaagataaaataagggagaggacacctgttctgactgagtctggcaactcagatctccccgcagccaacatctacattcctttggacagctgtctgctgtgtagggacacctccctggaactttgaaaagcaccccatcattaccttccactttgttctggagcaaggtttcaaaagaagagtgccgtattttgattaatttagtgaattggattttcagacacaagt

SEQ ID NO: 48727 - DNA, 695 bp, Homo sapiens
aatcagtttctaatttgtcatgtctgttggatttctgaattaaggggtgcgggtgtggagtcagtggatattagaactgccctcccttggggtcttctcctctcttgtttctctttgaactgtggcacaccctcatgatgatcaaggggccacccagtgacacctgctcccctttttgtcttgggctttcctgcaggctccttggtgatgggcatgtggtcagcaacaatgagattctccaggtttagggagtattgctgtttgctggattttagagaggagacatgtgattccaggacaaatctttcatatcagctgttagttgtgtctagatcaatctgggactttcccaacactaagcaggaggggcctgttatcaggagataccagaggtcagtaaggaaacatctaattccagtgccagcagcactttgtgcactctttttgacactaacttgaatatgtatttaaataaagatgctctgtattgaccacagattagtctgaataatccaaaactttaaaaacttccccacattggatgtggggtctaggggccccctagggatggtctagggtccaagactttaccttggtaggcaaagatagggctttacccagaagagaataaatgtcttcactgccagttaccttcagaaatggttaatcctgggtagcagatggcatcttttgca

SEQ ID NO: 48728 - DNA, 1737 bp, Homo sapiens
gtctcacagcaggaccaacagggtggggagtacaggggctgatcaaaggatgctttgaaagtagggctggagcacaggttgctgatgcttgacctttccttaaccgaggccaatgcctttcattaagctagtagagataactagtagagataactagttgaagtaacagaaggacaaacgcttttcaaagaatgcttggcctatcaaggcagggtgaatggtgggctcaagtcttctggattagcagtgcggaaagggcctgaggtgctgaggagagtgaggctcagcactaaagacagaaggggacagaaagaccccatgagggtcagggactggtggtggagggagtaggatgaagaacctagggttgggaagaaggagtgagccctgaggactggaaggccctggatggagcagaagaacaggctggggaagcctcaggcaagccctgccaccttcgtggtcctgcaggcgggtgccagtacagatctgtgattcttggtgaacggtagaaactgtctgaggagatcatgttccctgagctgctagatgcgggcagagctgggctggtttttgtcttgggcaatgtaacataagccagcattgctggggattgtgccccaggcctttgaaagacagtgccaagtttatctaaaaggactttggttcccagaggacttgttagtcaatacggagtttttagcaaagcctatgttattttatgtgaaccagagatggtgttgtgcctttttttctaatgatatctaagctgggaaagagcaaaattaaaaaataataaaataaaaggcatgaagtgttcgtgcctgttaccccattttcagtctcatgctgcaggaagcagctcatcctcagcagaaagctggatgtgccagatgcccactgcatagtcatttaggaaagcaagggactttcccagggaagtagttaaataacagggaaataattataccatataacatgggattctgtgtagattttctgtacttactaaggctgtggaggagtggagaaggtattgcaattttagtttcagtgccatgagaaccagctgcaatgtcgtttgtacagcacgtggccctcatgcaacatgaagtctgagaaaggccacgaaccagaggaggagacagaaacacaggccacagaggcgcgaggatgaaaggtcagggtgagctggtcctcaggttatttttaatattattgtcatattttcccttcaataataactttccaaaagataagtcagattgacaatgggattatatgaaagttttaaatggcatcatccatggatcttcccagtgtgcccttatgtgcacacaccctggcctttctccctgggtgtagagctgggtggtcccaggcaaactttgccaaaactgtcctaggaccagccttgatggcttgggaaggtttactgctgcccccctgcctcctggctcacagctgtcacaggaagaaggcaagctacccatgcctttgaggggaagcccctgctgggtcattatcacaccggctgctgacaatgtttgctccaaacgcacttagacacacacctctgtcgggaaatggcagcctctgctttgatgatgtctggtgcccaccacacgtggacacaggtcattttttttttttttgagacagagtttcactctgtcacccaggctggagtgcagtggcatgatctcggctcactgcaacctctgcctcccaggttcc

SEQ ID NO: 48729 - DNA, 1982 bp, Homo sapiens
tagcaggagagggaaagtaggtaaaagggtgctgacttaattgttaaggtaccaccaacagttagtaatataacaccatcaataaaaatggaaatgttggccggacacagtgggttacgcctgtaattccatcacactgggaggctgaggcgggcatatcatctgaggtcaggagtctgagaccagcctggccaatatggtgaaaccccatctctaataaaaatacaaaaattagccaggcatgatggcatgtgcctgtgatcccagctactcagaaagctgaggcaggagaatcacttgaacccaggaggcagatgttgcagtgagctgagattgtgccactccagcctgggccacagagcaagactccatctcaaaaataaagaaaaaaaaaggaattgtcaaaactgacctcccctatgcattctgccaatggatgaaagggttttggcattcacccatgtcagctccttctgcacaaccccaaaagcaacctcagtgtttcaaaccaaacaaatcataaatcaagctctgtgcacagcctccagcctctacaaagaagagggggccccagatagcaggaaggcctgagctggatccatccaggggactgtgactggcaggtgacacacgctggctgtcatctccatggtccagcgggcagcccacacttggcccaggggacagcaggccatgtgggctctatccagcagaagacctcggccctttaaatccgatagccctagggaattacatcagccagctactggccaggacattcagttcttagcctgacatctgagtcagaggactccaagttgcttggctgagctgatgaaggtttgcagctgatgaggccaatgctgtggctgcagtcctgagtcagccagttctatcccttctccccagcccggggctgtgcacgaccacttcccgccagttgttcttacagctgtgtgccacagagcataaacggtggagcataaaccctgtgagagcgggtaagtctatgccacccacctcccagtagttcccagcactgcattccttgctgtgcagcaatgcactctacctttgggatggtgcattttccctgcattaatttatcctctgaataatcgtgtggggaaatcttgttattttatgagcacaagtggggtttttctcttcactttacagacagcataaatgaagctcagaatgtaagattcaggggtggatcctgggctgcaccctagcttccttgtcaccaatttcatgtctagctcacacaaaggcacctgcaccttcagcaccggccttccccagctgctgaccccaagaagggaggccaacgcccaggagaggagggtccactcctctgagtatggactatgggtgactcttgggttaggagaggtgagaactgtgcttggcttgtgcagactaaggaggaagccaattccctggtagctgttgtgggatctggcacaggccacaggtatgtgatctgaaggccccacttgggcagctccactcacagccgagcggtcagaacattcccatcctagagggacagagaaagggggagccccctgagccagtgtccctgccctacgagggttcttctgtccacagaagcagcttcaagacctgctgagttcccagagctacatgtcaaaggtgaaactctagaaacagagctgctcattcacattcaccttttgaaaacacagcatcctagtctcaatgagaaaacctaggatctctgaatgaggaagggaggaggtgagagtgaccaggaaaacatctgaagcacagattattccttggcgaaatccagtttcattgtgttgatttgctaaactaccttcagcaattttcttaactgcattcagtaattccaaaaaaaggtgaaaaagggatataccaaagaattaaattcaagtgtggacaattctcatatcaggtgtatgcacgacccacatatgaaggtggttact

SEQ ID NO: 48730 - DNA, 2424 bp, Homo sapiens
agaaggtggccatctgcaagcccaggagagaggccccaggagaaccaaccctgtggacactttgattttggacttgcagccttcgggactgtgagaaaagaaattcttcttcgatccacccagtcagtggtattttgttagggaacccctggcaaactaatggattcagggcctgctatgttatcccatttaagttgtaaaaataatcccatttttgtgttttatcatcttcaggtggggaaacagatgtgcagagaggttcactaacttgccccaaatcagcagctaggtagggcacggttaggagtgagcccacgcctgcgctttttagggtgccatgggcctagaaaggtaggggcagcgagcaccttccctcttaagtaagtcgtagaagaaacccatctaccgaccagtatgaaaggacattagaaagggcaaataaaagaaggtaggttcttgttgactctgaaaaagtttataacatgataggtttttacagagaaatatataataaaataattaagtagaaatgctaacctctcttcttaacatttgatgctctcttcattgaccctgatttctcattttgactttgccttgacactacttttacttattcttttgagccaacccacatcctttggtgggacagtaatattgaaagataaatacatttattcatgtttctgtagcactaatggatgggttcaaatatacagatatatgcgtctcttaattcagcatctaaaatgggtactttatttccttcaggctatattttcatgagcaatgattttagacattgttttaggccaggtttacaaaccttggccagaggagagagaaggggagaaaccaattttggctggcaaagctaaatcagccatcccaggaaacccaggctccctgagagcaggcattgtaccttacttacacttctcctatgtaccccatcattcctgtccctgatttcctcctgtccccctatctgcccccacacacattttgtttgtcatgtcccacccattctcattggaaatgtaacatgaaaagcctggtggaaggcacaattccctgttctgatgcttgacaagcaggcgtgactgcagcttccccggctaaattctaccctctgcttgaagcgttggaacgcaggtgttcattctctgaacattctaatgaaatgagtcaccatgaatcacctgaatcaccatgacaactcattatggcttttctctggggggggatgggggagcttagttcatgtcctaagagaaaattcaccttcttaagtcaacaaaatgatgttttaaaagcctgaaggagcaaatcgtcagtagcacatctagaaccacaccaccccgatgccaccagggtggcctggtggcctcaagcatgatgtcaggtggagctctctgcactttgctggcagcagatcttcgcggagagaagcacggggagggtgacatgtggtacagagcaggaacgatggctctgtgcgatagcagcagacaaaggttgccatggcaagcctgctcaggaggtaggaggggatgctggtaaggtctgacgcttctggctgctgatgccgtgagcagaaatgtcctttcatcttcagtttttttcgaagcaaaaaattgtcttttcttccacaagaactttaaaacccaattaagagaccattttcccagaccacatttgtccagcctcacaacaacagtttgccatttgactcagacacgcatcactgcgctgacgcccacagctgtgattacagctctgaggggatcaataatgcaggctggctcacaggctgtcaccaggctcctgtgctctttggggcctcaccaattacagacaatcagccttgtctgctgagaagggtgagcttccggtggcaaacacagatcccatttcttcctttcatccagaaaaaaactgagtggattgggctcacaggaagattgtgttaaagcgggggctgagagatgccaggaatattcctacccaaatgctaaagacttgtatggtctctcaaaaatgaggttgtctttaatgaaacgaaaatgcagcccatagtagcatgcacatctctggacaccaacccaagcctatggtcagggatgagctggtgtaacagtcataactctggttgtctttcctactagccttggctttaattcacttttgctgctatgcatgttctactaactttctgggactcaatatcctcatccatgaaaaagattgtccataatccaatcaatcttcataaatactttgaggatgaagacaataacacaaagcacaagacataggctaaaacatagccaagctcataattgctattcaatgaaaagtagctcttattataatagacacagcttatattatgagggattgataagatttttttgaggagta

SEQ ID NO: 48731 - DNA, 1507 bp, Homo sapiens
agtttctcccaccactctgaccgatctcctacagctcacacctgtaatcctagcactttgggaggccgaggtgggtggatcacctgaggtcaggagtttgagaccagcctgggcaaaatggcaaaaccctgtctctactacaaatacaaaaattatccaggcatggtgatgggtgccttgtaatcccagcttcttgggaagctgaggcaggagaatggcttgaaccgggaggcagtggttgcagtgagctgagatcgtgccactgcactccagcctgggcgacaagaatgagacttcgtctaaaaacaagacaaaataaaaaaaaaaaatgagaggaacaaatggaaaagaaatggaaaagtagaccttgtcccgtgtataaaactaaaagaaaaagtaagtcggccaccaacatcgaggcctcttgtaaagggttagaccatgcatgcccttgcctggaatcaaaaccacgccctctgcaggcacgcagctgtcccactgggtcgctgagtgctgctgccctctgtcccctggagaatcaggactgatgttccagaggccagaaagccatctggccctcaccaaggcaaagtgcagctgacagagcactggctgcggacagtgtgcagtagctccctcccctcgctggaagggcacctgtgacagcctatccttgctgtgatcttggccaaggaggcttctccagctgcatactcactgaccagaagaaaattgtgctgggactgaagcatgattcatttgctgaatcattgctgagtcattgttgctgctacgtagaatggtatggttcacagcaacgtattgaagctttgcttacaacatagctgacgttttcttttctttcttttttttttttcttgatggagtttccctctcgtcaaccaggctggagtgcaatggcaaggtcttggctcacggcaacctctgcctcccaggttcaagcaattctcctcccaagtagctgggattataggtgcccgccaccacacctggataatttttgtatttttagtagagacagggtttcaccatgttggccaggctggtctcagactcctgacctcaggtgatctgcctgccttggcctcacaaagtgctgggattacaggcgtgagccactatgcctgacatttcattttcctcagctccccatttaatatcacttatgtctgatggaaaaagagataaccaaagaatgcgaaggaggagcacgtggagggatgactctgagcctggccacagggcctgtgggtcatggagaaggcagtcatcagtcccggcatgtggcctattcaggaatctgggtgtcatccggatgaattagcgttcacattttttggcccagagtctaggaataggcattacaagcaagttccctccatgactctgaagcacactggatgtggtaggcacattaatgcaccctcattcccagagatttcaggtcttggtccccagaatctgtgactgtttcccttccagggaa

SEQ ID NO: 48732 - DNA, 760 bp, Homo sapiens
agtccctttgggctactataaaaagtactatagactgggcagcttataaacaacagacaatgatttcttagagttctgaggctggaagtccaagattaaggccccggcagatttggtatctggtgaggcttgtttctcatagacatagccttctctctatgtcctcacatggtgaaaggggtgatgggtctctctagggtctcttttataaggttactcattccattcatgagggctctgacttcatgacctaatcatctctcaaagttcctatttcctaatacattgcaggcaaggatttcaacataggaatgttgggagaaacacacacgtccactccattgcagctccacttgcaatctgtaccatggccatcatcctaggcaccacacaaaaccatgaagagagtacaagataattacaaagtagatgctcgaagcatagcatttcactctccacacctgtgcaaattcaggaggaatcaaatccatcatctcaagggagtttctgtccagaaaggaactcctgtaagggactttgcactgggtcctaagtcccactccgcccagctggcctccttggcgagattggtctgcgttggaaaatggaactgccacaatcaagtggagctaagctttcagcactacaattccacaggacagtcctcctcctcctcctcctcatgaagaatagaaagaatggtggatttgcattcagagaaaacagcttgagcccatagctctgcggcaagaggcatgca

SEQ ID NO: 48733 - DNA, 729 bp, Homo sapiens
tccactcacttagttatgttgctgtcatggctctaggaatgtggcctaaaaagcaatccaaagtttcagattctctgcctgacctgttgcttgcagatagcacaaaaaagcaagccgacctaggttggtgcctattttcttgaaaagttcctgtaaaccctgtgtcacctgcacacactgaatgctcagctgtccctgtcagccgaacctccttcctcctgcaggaggagaattcagcacagctagaatcaaccggcaaacctcccaccccaaaccccagggtcacggccatccagagagctggacgcgtgagccatgaggacaaagagcagtactcacaggcagccgggagtgacttgctctctgtcctctctctctcctctccacagtgacagttaagaggcacagaagatgtgattgccatttatgtagacagagtgtctgcctccccgaagccaatcagagctgccggctctgcattatttactgagcagcatccctccaccctcccaccacctcctgcccccactctgcccccagggggagagagccatcctagcaggatggagaggagcatcagggcctgctgggactggcgagaggccaaggaaaaaatgggccctgtgttcccaggcactgtgtaggatgcagatttggggccagggctcctgggactctcccagcaactttgagaacgaccaggctccactccaagggtgaggaagggac

SEQ ID NO: 48734 - DNA, 1867 bp, Homo sapiens
acttatttagtaatttttaagagtctgaaaattatgatttaaatattaagcagcaccaacatgtccctggtttcaaaaatgtcacatatccactttgccaggacttccagggtagagttctatagggtcatcttcatcctacaccgcatccagataagcacagggagcaaggctgaatgctggagggacttaccccagccatgggagcagcgcttgtcgccctggacctacacactggattgcttggctgcccgacagcaccaagtgcaaacgggctacattcacatttcgtctctgccagctgcaagatcttatgccatcctcctcccctcctctggctgtttgctcacttgtgaaatggggatgtgactggaggtgaagaaggcaaaccttctagacagagcccaatgtaaactgaccactcagaagtaatggttttaactcacgcatgatggagagcaatgatttccatcgattaagctttgattcttatatacttccgacaacagacttaaaaccaggagaacttcgactccttgaagtcgataaccgaacaattctcccaatagaaattcctatccgcatatgttttcagatgggaattgtactcagcatggcaagttggtgggaaagatcttctaattctcctcaaatcacactgcataggtagacaccaaattgacctctaagtaaactataacatacaccaaaaggagagagccctgacggagcctcagatgttataaagggaagggcagagttcacatttactaatcacctccataaaatcatgggatttaatcctcacaaggtagatactaagaaaatcctcatttacagaagaaacagaggctgggggaataaaatacccaacaccatccctggtggtgcatggaaaaaatagaatcacatctggcccgcatttgctactgagccagtcatgaaatcattcccagcacctatcaaacatgtgtcactggagtgactgtgtgtgcatggagagccaccaagtgcacagcccccactgaacaaaaacccctgccagcctgcagcagaagagaaagcaccacacaagctccctcaagtgagttaacctttaagcaaatgttcagtaacatggggccagagagtcaaggtacatgttgctgttttccactactacaatctgagtaggtataaaatcagagacttacatgctggaaattcgaattccttacagggctactctccttgatgggattctccaactttggggactgaagagcatgtggagaagctgctgaggcactcggcactgagacagtcactcttcttgaaactccaagccacacgtttccctcttcttgcatttccagccacatgtgccagttaaacattaattcctgatggtgacaaaggtcaaggaaatcttgagaaatagctcgcctctgggaatcctgagagcacattctgaagagactgtttcattccaaatcctggaagcttggatctttcttatgtaattctacatacatcccatcttttactaagcagccctgatttcaagtttggagcccattaagtcatctgatatgttccagccctgcaccaggtgatgcctgcattgcacacagcctcctgcccctgaaggcagccccaaagtaagcctgcacttcccggtgcagcactcagcaatatgggtaagatttccaggttcagatatcagcagaacccaggaactcaccttccttccccaaacccatcaaaatcatagttgagatgcatgaaacaatactctgagtggaatttggacaaatttataaaaaaaccccaaagtcgatagaattttatgagagcacaaagcagggctgagaaagccacattgaga

SEQ ID NO: 48735 - DNA, 1251 bp, Homo sapiens
ggactgatagcagcaagtgtacaataaatgtttttacaggaatggataaatccagtgtgaaactatgtttctgttgaagacaatagaagcaacaatcaagtgctgggcaagagaagaagtcagtctcctgtgggctgctgagcatgcgcgccgtctgtggacagctcgtgggtacctttatgcagagcccgtggtctgtaggggcgttgtactgcttcctgccagcgatcagggagaagatgttgctgtcctccaggtcggccagcagctgcaggtgtctgggttcctgtgacaacactggccaggttaaagtctcaagcacagcaaagagcaaatgtgttcacctctggtagacagagggcagtctctgcacacttacaagcactttccccgatgacactatacatattacatatgattattacgcgaggtgtaataagtgctaaactaaaaccaaattcacccagtctcacccaaaacacccacttccccagttctcagacacacaaggctgttggaacgtatttgatacttctggcaaatcaaagccccatgaccggatattcaagataaaaagcaggagaaaatctataacccaaaggtcagagttaagagcacagggcctgtctgcctttggtttgttgtgagtccagagtccaaccgtactttgggttttcccactggtagcttgcttgtcccacccttctcctcctcaactctccagcccagctctgtttcctgctctacgaaataccctcccaacttcagcacacacgaggacagtgagcgggccacacagcagagctgggaggtcaggaagctaccatgccctgtgtcagttcaaagcccctctctgcagacgccccttctctctggcccaggtgtcggcagctgctgacttcccagagccggccccaacaccttcccagagccggttcccagatgctcaacacctgtgctggggtcccgccagctccctttcacctctgctggccagagcaaaagagaccacagccctcagatggtaagtgctcagccaggtattgggtggacaaggctcctgccacagggtatatgtggacagcacaagaagagagcagacaagagtgtacatgggagcaaaggagcctccggcctaagctctcttttgagggcctgcagctgttttccatctcccaccttcttctcactggggatacatgcaagcctgcagtttatttcatgaaatatctatgatacataaagttacac

SEQ ID NO: 48736 - DNA, 700 bp, Homo sapiens
gcagtctccagggctacctgctgggctaagcatcccagttgctcctcctactgaagagactctgttgcgcaggaaaggcaactgtgctgcacactagagggttgtcccagtggcctgagaggtgtccctagacccccgccaaggttggtgcttgtacctgccctggagagcctggtcacgggcttgccagacccagccatacccagctctgccgcccccagccagggtggtggcagagtgcaggacgggatccctgggaatcccgcccatggccagggaaaccctggtatttccccacatcaacaaaggccaaaaattccactgctattattgcaactgcctctcaactgcaagcgccacctactggcctgtagggtgaactgcataactcaaagtaattcctgctgacagtatacagcggtgggggatgagataagcctcctgaaacctccacctccccatttctctgtaggagacagtgagtctgaccactggtccagcacactgttactacaacctacaaacaactagcatttgagaaaaccactacactaaagctatctataaccaagtaattcataaaagccttggccccctaaaactacagagaagccaagacaaaggaacttaaccaacatacagaacagtcacatcctcaaggtgggggagggaagaaaaaataccaagcaaatgaaagtaa

SEQ ID NO: 48737 - DNA, 753 bp, Homo sapiens
actgttacaatactgtttttgtgccagttcaatggtcagagtcaaaagggcagtcacacttaggctccaaggttaaatgaagaagaaagcaatgttgcttcccacttcctcgagtgtctgtgatgttcccgcggctcctggcatggcaacactgcttctcattcccttccaggattctgcagagagaccagggactgtgtgagcggaaacactacccgtgaacaaaaagagaggaatgtgcgccggtacatggtgttcccatttaaatcttttcggggatttcctcatataaataaatctgaagatgccagggttctataaatagggctagaaactactgccctgattctagagaatctctgttgtaagatgacagcgaagatgctattttagggcaaagtaaaagataaaccatgttagtcattagcatttggttctctcagggaccaaaaaataaaaatcaccagcagagggtatgtacttgtaaaccttcccacacagggactatgtctgtgctctctttcctagaaatgtccagacttggcaccaacagcagagggaggatgtttaccaaattctcttgtgaattttttggattttcaaaacactttcacttggtttcctccactaattcttttttttttcttttttacatttttattactcaaactacttgtccttcagccagttaagagactgaggcgagagcctaaggaaagaaaaacagaaaagacatggaggaaaagagatggc

SEQ ID NO: 48738 - DNA, 1220 bp, Homo sapiens
cctcccgttgccttcttcatgaatctgctatttaatagtgaacataatgacatgaatgaggaagtttccaatcacctcactatcccattaccttccatagatttcgttatgctttcttcttttcctacgttaactgagttcttccctgtgagcaaagccactttatgtatcgggtccactttgtcaatttttctactacttcagaatccttgactagaccttggtctcagcattacttcctctgacttgaatgaagggaagaagaacatcagatttctcttttcctcaagcaaggggcaaggaatggagccaaagctctttgcccagcaccatcccccaccgtgatcctagatccaaagccctgggaagtggctggaggttgtccagcacttgctaccgactgcactgagaaaacacacttttcatgagatcagaagtcaacaccaagtacagataaagaaatatcccttcaagcaagtcgggaaaaaaaaaaaaagaacaaagaacaaggactttctacaagtagttctagttctgagtgagaaacatccttcctggtcgtttctgtgggcttgaggacacgagtgacacagacaccaatgccacgttctcatggggaacaagctctgatcccaagaaaaacaccagcaggcaaaattccccggtttccttgttctgcttacaaatttggacaatccctgggggtggaggccaattttcttgccaaaggctgagagagccagataatattttcatggtcttattttagaatgggtagctctgtaaacaacctcagtgacaaaacccacagacagcttgtctggatccttatttgaagcagaaggtcaccagcgaggtagacatcccagatgcactttagacatgtgacaaagtgcacaagcccagccagtgctggctcccagatgagggacacttacctcaccttctaagttttgatagtgccataatgcagcctgctccgggggcctgaggtcagaacgggacccacacttgggagccagcgggtattggaaaaaggtctctctctcaagaggacagaccttgcatggcacaggacaggcagatttgcagagaaagggatggctggcctgtcttgcttgagaacagcaaaggtagggaagtgagagcaagtagggagaagagatgattcaagtagaagggcaaaatgacttctaaatatgcatttagcagaaggaaag

SEQ ID NO: 48739 - DNA, 1279 bp, Homo sapiens
tcacgctcaagatcctggtgaagacagacagatagaagggaggggtgaggacagaagggaggctgctgaaatggcagcgatgagatcactgaggcctggccagcacagcccttgctggaagaacagaggccacattcaaaccagggccaggggagagggcaggggctggggagcatcaggctggaagaggaaggttgccttagaaaaacaggggtcagatggatccgaagatgcggactgggtgaaatcagcagctgagacgcagcaagcagggccctgtgtgcccaggatctgtgtggaaggagggaagaagagagatgttgccatggttcaggttgtgagtggtcaaatattaatcctggccagatattaaaaggacaaagtgctgaatcaataattaataattactgcataatcaataattaatcacaaggaagaacactcagagtcagcaggcgaactcttgctcatagctggggtgaggtggggtggggaagagttggttggcaaaaaatcaggacccctggaggggcaggcatgtacctgcctgagctacccgaggcccagaaggcttgtggcctcagggagaggagagcctcactgccaactgctggagcgaaaattgcagtccagagaactctgcctgccaaagacaagacctcagttctgtatttattgagactgctgcatccatcttgaggaaaagttatagtggagaccacgaatctggggcttcaggaaagttctagaacgtatgcatcacgcacccactcatctcctacactcctatttagctgacagggaatagctgcttaattgaagctctgcaaaacaattagcacgagcgccactcttaacttaccgtattaacagctcaatatttctatctcagtgggccatctaaaagtcaatactggccaaaacacaaagttcactgttaagtatagtcagtcttgggtgatgcaggttggtctcaatgccacacacgtgcacacgtgcgaacatgtccacacacatgcacacacttgcacacacatacacgtgtgctgtggggccactctgccaattcaatgccaggcttttaatcctgctttggaaataaaaacagtggtacagttcctactctgagactgttctcttctaggaaaataacatgttttcattccctctggggaattttcatgtgcagttatttctctctatgcattcctaacagccccttggctgtgctccccaggcaagcagcccccggggtctcctgtccttttcctgctaagcc

SEQ ID NO: 48740 - DNA, 785 bp, Homo sapiens
agaatttctgactctgggtgtgtcagtgctgagcagaggagtctctgagccccgggttgatgaatcctgagtgtgtcaggtgatccttagaagaaacagagcaggagatggtagggggctttgctttccttggctggaggcagccctgctacccactcaacccaatgtttctgttgccccccagcactggccaccttgggaaccaagatattgggaagggacctgaagggcataagggaatccagagactcttgagaagggatcgtagctcacctcagaacgcctggagcagttggctaaacacagcaattttaggagcccctgacccctttgtccagagtgtggtgagtcactccagtgaggaagagagtttggcaggtggcagcctgccttggcatctgtttgggtagattgctaggctctgctcattttggcctacacctctgctgacgttttccccaggctctgggatttaggtgggaaaagtcattaacgtgccctcaggcagggtcagagccatgatatctgctatttggtgtttttgggtaagtgtgtgaaaaggattggtaaccgtatttgaaaatcaatgatcatgtcggctcaacatcacccgaacaaagggatgaccctcatttttgctttttatctttcaggcctttagtatttccagttaagtatttgacaagttaaaaaccaatatatatactactttgtttctgtactttttggcttgtcactttatagcagtggtttgaaaagttttaaatcagaaatgagtatttaca

SEQ ID NO: 48741 - DNA, 975 bp, Homo sapiens
aagttacactaaacatagattcctcttcctagaaaaataagaattttcagtataaatgtgtatgcttccccaccaatcctgcagaacatggcaggtgggattttaaaaaactgtttatctttaatgacacatgcaaagtgccgccgccagtggaggctcattaaattaaacttataaaaatgtagaaagtctatctccttttacacacagctgggccaacagcccctcacccatttccccaggacaactggtagcaaaggctaaagtctaggacaaacttcagaatcaaatgcagatagcctggcggccagacaactgcaactcaatcatcaccaaaaaaaaaaaaaaaaaaaaaggtaaggtaataattaatcactctgtactttgattccagtgagattttttttttaattgtggtttagggagttgtacaataattatatttaaaaaaaataaggaaagcaattcatcttagcgatttcatcaaagacctggcatccaatgttcagtgagcatcccctagaaaagcatgtaaagtttccttttccttggtttcatcctgctacactgctgcaaggaagcacctgggcattactaagatcccgtcaggccctttatgactgcctggactctgcaccatagagcctatacaacacaggaaaacaaattttccactaccaaaacattacagcctgcccagcaagaaccaaaaacctaagctaaaactgcatttaatatgcacagattcagctaagcaatttctatctgtactactcaaaagacacttcgggagtgacagagaaacatacccacaaaatattactcaaaaagagcaaaggattaactgtatctttcccaagtcttccttagccatttgatctgtttcctctcaggctttttatttcaattcctaactcttctattacatcacaagtcacggagaagcagaagtacaagaaactatataaataactt

SEQ ID NO: 48742 - DNA, 922 bp, Homo sapiens
ccaggaatctctgcttgggttatgagcagtaacaacaatcagacaaaatttgcctaaaactgagaggccaaacttctaaaaataaaacttcacatctcaaaaatattgttaaggaaaaaactaaatatagcattaccctacaatccagcaattccacttctagatacataccccaaggatttgaaagcaggaactcagacccttgtatgtcaatgttcacagcagcactattcccaacagccacaaggtggaggcaacccaagtgtccctccctcaacagatgatggaaaaataaaatgtggtccatccacacaatggaatattatttggccttcaaaaggaaggaaattctggcacatgctacaacatgggtgaaccctgaagacatgctgagcgaagccagttacaaaaggacaaatagtgtatggtcccacttacatgaggtactaagaacaggcaaatcaagtgacaggaagtagattagaggttaccagggactggggagaattattgcttaatgggtacagagtttctgtttggggtgataagagttttggaaacagataaatggtgatggttgcacaacactgttcacatgaccaatgccacttaatgtacacttatacaaacgactaaaatggttaattttgttttatatatttttaataaagaaaggttttttcaaaatcgtcaaaagtaattccagctattgcaaaaccaccccctttcaaagaaaagtacatccctctctgctgtgtgctgctaagaaatgtgggatgcatttttagcaactgtcacacaaaaataagctgcttacattagttaggaacaaggtaataaaacaggagcaataaatcctctttgccagatagcagtaacaggtcaaggaaagtcacagctaatcttttattctaaacatcag

SEQ ID NO: 48743 - DNA, 831 bp, Homo sapiens
gtccatggagacttcttcattcagaaagattttcttaaaaacaatattgaatttgagacctggccacacaaatgaacatcactggccagaaaccatgtgctactcagcctgctccacacaatcagcaggacattccattccggtccactccaccagtctactcctccagggccagtttgaagtagggggtcccagagggtcactgcctttgaaaagtggctcaactgttctccccaaaggtttgtcctgcttgttgattctggcaagatgcatagctccaggtcatttagaatgttcctcccctgcctcctgcataagccacacgaacagcgagagtcagaaggaaaatgtcatatgtccagtatttccagttcaaagtacagccagcaggacggactgcccccctggggttgccaacactcacaggtggccagagcttcaccatctgccctctccctgtgttaaaacaggagccaaaactaaacagcacacatcagcgcccaagattcgtgctactctcaactgatactgctcttggctatctgtgccattttgtttaaactggtagaagagaccagaacccgcagcccagtaggaatgaaccccaggcctccccacagcttcagggcaacgtcctcctctctctgcctgctgcaggattaccactctcaggattcagcacaatgcttaacaagaggaaagaggatctatttctgacctggcaacatgagacttactcttctaaacggggcatgggccttcatcatatctattgtttcaactcatgagtcaggatattacaaaggtagaaagttcttacctgtaggaagc

SEQ ID NO: 48744 - DNA, 889 bp, Homo sapiens
atgcttggggggcttaaaatctagatgacaggttgatagatgtagcaaaccaccatggtacacgtatacctatgtagcaaacctgcacgttctacacatgtatcccggaactaaagaaagaaaaaactagcctaatgaaataatcagcacaagaggggttctaactccaccccgaccccccaaaatttggaaccaccatagtctagccatcttcctcttaaagtgtcataatacattgtggcacacaaaattttctgaaatgttgtgccataaagaaaccaactttatctaatccaaagtttcctcacttatttggcaataaattattagctcctgtagtatctaaaaccttcaggaagcattaagttgcccaacatcaccaccagcctaggaagactgttaatgaaagatgacaaaggaatgggtccaaagtcccatggagcccatcaatgcatttactgatcaactagggcaggcacaaatacaaacattcaaaaatgtctttgctatccaaggaagaactttggtggtagaatttttcaaaaggtggcattaagtagaggtgatccacacagtggagccttatacacagaacagactcacagtgcaagcaagacaaaagctgctttaataccacctaccctgacagggaaataatgggacaacccaaccctacctccaagggtagggtcgggctaacgctgacagaaacaggcaagggccccagccagaagccccactgggacatctttattgcttctttctatggcttggaggccttccaggttccaggctgtgatgctgagacatgaaggcactgagcaaggaccttggaagaagtggggtgttagcatgcacaagctcaaagcagatacaattcctacattct

SEQ ID NO: 48745 - DNA, 2907 bp, Homo sapiens
gggcatgccaattaacctcctgagccttggttttcagacctgtaaaatggggatcaggaggttgtagaggggattaaaagcaacaaggcttttgaaagtgccttgtaaactgtgaaatgctacagaagtatcagtcgctacacttctcagttacaggagcaatgcctgctgggcgtgtaactctgtcctcaaattccctccctgtaatctggggattggcctgtgttgcccttctctttcaagtgctcccagtaaaactcaaatattacatgcagtgatcctagagttttgatttttaagagaaaaacctagacatctagaatcattcctggaaacatagttggttttcagtgcttttacttaaaatactctcctaaaagacacttcaccgctgtcacagccagaagtcccactgctgtagaaactcttgattctaactctttcctcctggaaagagaggaactcggggtcagctcgttaaaatattgccagcattgtgttgtaaaccctagtcaactccggttgctgcgctaacaacatgtgttcttggtaaaactgcttgaaactttaaatagaccaccatttctgaaactcgggggctccaaacggctgaatcagcattttcagaaacaaagtgttctaggcctggccttttaaacagcagcaacgagcaagttgtgcaataacgcatatttactcacgagctctccttgttttggtctttcccccctcccccccatctcttgaatgaaactgggcaccaagtttgcaagaaaatattctttcaaacgcattgtaaagatccaggaccctgtaaaaatcacctgtggctctcttacattacccaacgtttcggtgaaagcaaaccataaaaagttcgcgtttcttccaatcccaagaaaagacgcacacaataaaaagtaaaggataccctaatttccataacgcacatgctccaaggcagtcgtcaggcaggcgtttggagaggcaatcagcaaaggcgaagagttgcatcagaaatttccttctgcaaacggtaccgctcttatcacatttccacggctggcgggcggctaatccgcgagccctcaacttggtgttaggccccagcggcggctaacgggtcaccaacagaaccaaaaaaaaggtcctccgtacgaggctgggccggctcgggatttgggagtgtctggcaccactgtcccggacgcccggacgcccgggcgcgcgcgccgcggccccgccgcgcagtcggagcacccggggctgcagggacgcctgggcgcccaccctcccaggcggcggcccccaggagcgcggccttgaccgcagcccccgccacagcccgcgagccgccggcgtctgacaagatggttcaagaatgcaccgcttggactccacacctccccccaggggtcgggaacgcagcgcggagagccccgcggggcgcccggctgcctccgcctccgccgcgcgcccgcagccccagtcccgcctccgagcaccgcccgctgcgggcccggggcgccggagcccccggcccggaggcgacgcccttccgcccgccgcgcctccgcggggcccggcgtccccggccgcggccgcccagcgctcagacaatgacggcgcggggacccgcctggccgtcccgggccccgcggggacgccaaccacaaagtaacttgccgccgcgctccccgcccaactccgtacctgccgcgcgcggctccccgccgcctccgcgtggctgcgggcgacactcggcgtggccggcggcgggcgcgggtccccgcggggcgaggccggcgctcaagactgtcccgggcgccccgcgccgccggcgctgccgccacccaggggctgcgcggaaactttgggctccaccgggtctccgagcgccgagcccgcccggccgcagctcgcttccctctctgcctcctcccgacctccccaccccctcgatgggctttaaactcgcccggccccgcccgccctccccgcctctgccgccgccgccgcctccgcctccgcctcctcccccggctacttttcctgctcctcctcccgccgccgccgcccggaccgctcggcggccgccagcgcgggaggagccggggcctgggcgcagggcgtggcgcgggggcgcgggccgcgggccggacggccggggggccagaagctcccggaggttcctgccccgggctgctgagcgggttcccccctcctgctgtcctcgggactcgggcgcgggaccacgaccgccgcggctcaggaggcttcgccagtgaaaggacaaattggacctgtcccgaaagacaatttataagcgaactgtttgaaacgcacaaagtattaactgcgcagtccagatcctttatcctgggcgcagcaggacgggacggaagagctggggctgccccgtactctgtcgtgggctgaaggcacccggcctgggaaaaggaaacctgggtttgctcacagccagccaggtctggggcctcacctctttgagcctcagtttgccccatctgcgtatgagtatcgaagtgcgggtggagtgagaggcccttcattttttcttaatgctgccaagcctggtgtccttatctttacaatgggctaataacgcccgcctgagggttggtgtcctggggattaaatgaggtcatactgggaacataaagtgactgcgaaaaagactcccctaccccccaattgacggaagccattgtcgttagtgtgattcttaatatctctaccgagtcaaaactctaatacacatagcataacgataagtatgtcttttcctgggtcttggcgttctaaacgcagctgcgacaatatcttgccttcatagagcgtgcactttgtgcaaaaccttcatgaatccttgcatgtaacccccac

SEQ ID NO: 48746 - DNA, 664 bp, Homo sapiens
tccttggaaaagcaatttctcagtgcaagccccagacccagactactgaatcagaaactcaagcaggccatttacctggggcaatagttataagtagattttttatccctaccctaaactgtggaatattccctacctcccccacccctccagaggcaagggaatcatagccagggtcctgagaagataacccaaatgaaaatccagtcccaaagggccaacttgcagcaagcttaccagacccaatttgcctgtccatgcatcatgtagcatgcagtaatgggaactccaaggcccaggccctgcccacattccaggaaactcccagccttggccaggaaccaagatgacatcaggtcctgaggcctacacccttaggtgaccagaggccacttgttcatccttcaaaatgagaaaggaagcagcaacctcctggagcacagggttcccctcctgttttatgctacaaaaagaaatagacagccttacatatcaactgtagccttgtagaattcacaaagcccgtgaagtgaactcagcatcctgcacagagaagccactgctgtctctgagctcaggagctgcaggaagcttctgctctgctccctccaggtgtaggaaggccctgctctggccacagccaaggaatcttctcttccccatg

SEQ ID NO: 48747 - DNA, 560 bp, Homo sapiens
gctgcgtgcttcgcgatggaaacaggtgtgaacctgagatggcagtgatcacatgagtgggggcctgttgatgcaaatgttgagtcagctacttggacactgttcgtttttagcagggtattcctcacagcatgctaattgtcattattattcttgtcaatgtttttttggctaaggaaataacaaggaagcagattctgaaattggacacaggattggtaaaagtcctgtgcacattggcaggtacagcaatgggactttccaaacgctctttctacacaaattctcttgccagctcagcgctttgaataggacgtatcctgagggaatgtttcccagatccacagggagtggccctggtacgttctagtatatggagctagattgctccctttaaaatagttgttttgaattagaaatagccttatgtgctaacatgatactaatacctttgatatctctgtatttctgttactattttatttccagaaacataattcaaaccttttacttgtttagttttccactgcaatttactgataaagtatgctggctaaatt

SEQ ID NO: 48748 - DNA, 1231 bp, Homo sapiens
ttagcagggcatggtggcgcatggctataatcccagcgactcaggaggctgatgcaggagaatcgcttgaacccaggaggaggaggctgcagtaggctgagatcgcaccactgactgcactccagcctgggcgacagagcgagactccatctcaaaaaaaaaaaaaaaattgaatgacataattatttttgtaaaatgtagactcaaagacagtttagttaggcctgaaagaatcctacttgttttatttgttgtccctatcaagacttttaaagtctcataacatactgtatgagcagacagacagatttttggaagttgggtaaagccaaaacaaaaggaagcatctcaaaaaacaggcagatatccgtatctgagcaaaactgacagatatatttacaatgtatttggctatgcctacagtaatggcttggcagttcatgccttttaacatgaatttgacatgggttccagacttcttgagtttatgtatatttggagctggctagcctgatgaagttaaccccatttactaagtagttccatcaagggaacagagttctacagaacaagagccttgtatcccttgtcgctaacttgccagttttgcttaatttttttgacaagaggccatgtgtggaggtgaaccaattctttcattttctgccaggatgtttcaactgcagtaggactttctgcacaagcagaacaggctgctgagaaagagcaccatgaacagacagtgctaagaaaacactccagtgaaaaattcaaggaggctgtgaatgatggagcaggggtacatttttccttcaagaagatgcatacaattgtttttaaatctttgagttttgattctcaaccagcaaatgcatgacttccctgtcaatgacgagtaaatgagtcaaacattttcttcatttcagaatctctatgtctaacaagatcatgttgaagtgactcattgcagtgctacgccatgtgacagcaccatgccacctcctcacccacatcaccccaggcagaggctgcagagccacagtcaccctgcacccccctctgccaagtgttacacaactctcttggattgaatcagcatcaatgcatgatggctccatgcagaaaagacatcagacaggcccatattctgttgcttactggcagtagtagcagccctgggacctcactttccctttgtaaacctcagtgtcctcattggtaaaatgaagat

SEQ ID NO: 48749 - DNA, 590 bp, Homo sapiens
tgcgcagaatttagaaagcaatccacagaataatgtgggaggaaaacattgtgaagtattgagtcctttaaagtcctgactcatatcaatacgaagtcaaagggaaaaccaagagcttaatgcatgcagtctggagtcaaaacagcttggccccccctattatcccagtttccttggttgtctcctgctacaaagtggcaaagttcatgagggacaggccactgcttgcctgcaagagaggtttgatttcctgtccaagcttgtcaatatatacatgtttttaatatcaagttctttttttgtagggaagtgagtcatagctctcaccaaaggttggcaccaaaatccacagatgttggcagtcatgatcttatcaaattttctcaggagttgcaagtgcaaccagataaatcattaagaaaaagcaatgaataacagaaaagaaaactaagcaaacagaaccttctatctcaggcttcatgggacttaggttggtgggatttaaacttcctccaggccagctgctgtcattcaatggatagtcgaattcaatggcgcccaccaaagacaatgcaaaactctctgtgtcc

SEQ ID NO: 48750 - DNA, 2756 bp, Homo sapiens
aggggatgcctttctcaaacatctgtgcagatgtcatgtggttgagtctgagactcagatgcatgtggcagtttaaaaagagtaggccttctgcacaagtctaaagaggccatcagacctgggaccttgcccggctcctgctgggcacacccatcgcaggtgctcccggctggcagtgcacacaggctgggtaatccagctttccttcctctcaccccctccagtaggaggcagggcaggtccttgggactcagcagggaatgaatcacagcacacacaactcaagcttcctttgatctattcaggttgaaaaacctgggtgtgccctggcaggaactgtttataaaatgaaaaagtatatatatgaaaacatttctgccatttccaaggtcatcaaccatagctctaaatgattttagcttaaaaccatcacacatttactaagtttcaggatgacgcttgttaattcccacatcagctggaagctcccagctgggtttttattctgagagctcttcaacattcagcagaaggcttgaaatccactcactgaaagtcagagggtcttaggtgacatggtgcagtgaatgcaaatcgcaggtgtgaggcccaggtagctgaattaaaacctaactctataggtgacagccactgcccagccaggctggtcaggctgaggtagacagggactgcatgctgaaaagggaaaattcatgcgtctctgtactttcccagaccctgagttcaaaagcactatgctttacatcttccatctttccagttggaaatgtcatctgtggacctgaaggtataacaatttcttactgtccaagaaaagtggactgggaaatccacagtgatgctgaggccagctgacctgaatggcacctctacaccatgggtgcctgtttaccatgttggctactctggctggctgctggcaaaccgcatgtgcttaaagggaatttcagagagaaaccaggcacacccggctctcctggctaagagagtctgtttatgctgcaggcagaagggagttgccattctctctccatgagattcttcagcaataggatgtttgcttcatcctgtttacaagcggtacataagctgcgtctggtttgtgtctggctatttatttgcagccacagttgtagacttccctctaccaagggaagaggaaccatgactttcttgttcatcactggtaagtgaagtgctgggcccagggaaggaattcggtcaccactgcgttgagtgagtgagtgagtgagtgagtaagtgagtgactaagtgagtgagtaagtgagtgagtgagggagtgagttgggattcagctgccaagtcagtgcccagttttctcagcaataataaaaagtcagaaagatgtccagaaacaaatgcccagaagacagctgagtgctaccgcagcctgcagaactggttaccaaagaggggaatgaggaatcctcgcatcctgtaccagctcccacatccctgagtccaacactaatctgatttaagccctcattttctaaacatgccatgatccagccaccatgccacactgtgtatgttcaatacccctggcaacttcatatgcaagtgtattctccccattttacagacagggtggctgagtatccaaccagttaagtaaccttctcacaatcacacagctggaaaagactggaattctagcccaggtctttctgagcctaggacaccacctacacactttgcaccgcctccagccttaattacttcttgaaaacaagcaccggggttcctggcagactgatgctaggatgtttggactccttgacacatactagaacgctggtgccctgcagtgccggctgatgagcggtgaggttagagaatactcttcagtgaaggtttccagcacacagttgtagagacgccccctttactctgatgtggggtctggacaagccttatttgcaaactgagttgggcctccaagaacttccttcagtgctcaaggttccacgaggctcagatggacgcatggggactgtgttcaactgcctcaggagacagaggaagactggagtcacagggagatggaaggacgtgccccggcatgacatgaggtaggtggcagagctggaacagaccccagattagtctcaagcatccctgaatacacctttagggtcaggtacttctttgagtatctgatgaaggccatggaccttcttccaggcaagatgcactccagcctgcttgccaccagccaggagcacctgctatgggtgtgcccagcaggagctagaaaagatcccagctctgatgacttccttagacttgtgcagagaccctgctctttttaaactgccacatgcccctgagtctcagactcctaagcctcttccttgtacattatttctgcaaaccaccctgatgaccagggactccagattaagaatccatgtaataccttttcttggagctcagcacctcccaagctcagggcaatgttcctgtgaagacaagaattccttctaatagaggagaagagctatcagaggaaaatcccatcaaagctttccccactgtcttggcccctgcaaacaaaacggaaagccagaaaaacagtcaacagaagatccagataagtaagggctgaaatatgtgtctatgaaacaatcacactgcagcccacagaattgtggcataaaaacaataaatatcacactggagcaataagccagggagaaacgactttaccc

SEQ ID NO: 48751 - DNA, 1037 bp, Homo sapiens
atggaacttttgaacccatttgtgaatctcttgtctctcagaactcctgtgtatcagatccagatgaatggtgttcaaggcaaggctatctgtgacctgtggtgagtgagggggcccccatccagggaactatccattaggtgacatgaggacgtgcaaccccaaaacagaatccttgaaagggaaggcaatgaggtgaacacaacaaacagacacagaaaatctattgcttaaccctaagcatgaaacattcctggaaatctctcatcatccttcccacaggacatatgcctggaaaggtgagcgtgaaaccattctcacaggatgagtcatgtctgagatgagggcagagcatggaatccagaaatggacatgtcttcctaaatccttcaaagatagattagacaaggaaagattccaatgtcactccttctaattacatttttattaacataataaattttgtaacttctcttctccaagcagagaatacccacatttcttcgtaatcacctttgttctgatttgacaccttccttttacttttgctcctcaataaaagctttatttttccactttcaccaccctacaattcttctgttgatcagaataacaactggattaccagacaatgctgccaggagccaccagacctaaactgggcacagaggctcacattcaaaccctctgcagagctggctgtgaaaactgaaccaggaactggcttgaagaagaacatttttcaaacacctgtaatcccagcactttgagaggttgaggcgggcagatcatttgaggccaggagttcgagaccagcctggccaatgtggggaaaccctgtctctactaaaaatacaaaaattagccaggtgtggtggcgcttgcttgtaatcccagctactcaggaggctgaggcaggagaattactagaacccgggaggtggaggttacagtaagccaagatcgcaccactgcactccagcctgggcaacacagtgagactccatttcaaaaaaaaaaagaagaaagaaaataca

SEQ ID NO: 48752 - DNA, 628 bp, Homo sapiens
caggtattttgcttcctgtaaactacatagctattaactctaggagctcaaagaacaaaatatatccaacacgatattagctcataatattccaggggtgaaggctgaatgttaacaactttgtgttacagggaacttgttggtgagagaggattctgtgctgtcgtttcaggacgctgccagctatacaaaggtgtgacaacttaaaccacccatgtgtgatcattctcaaatgacctctgccgaatgactcatacaaagctgctcctagcttacaaaagtttagatttgcttagaatttatttctagcactagttatcaagatttagatccatatcaagatccttgaaggcagggatcatatctctaagttatattgcattctctatccttcagagattattgcctggcatggacatcaatgtttactgtccccactgcatgcccagatcacagtaccagacatacggtgtacactcaaccaatatctgtcagattgaacacacagtgatgagaagcaactgaaattttcaagcctaaaaaaatgttgaaagattggtacaatgaactaccctcaaactactccatgatccattttccctttctatgcatacttgcatgtgtatac

SEQ ID NO: 48753 - DNA, 683 bp, Homo sapiens
taggaggctggaggaaggaaatcagaagagcatttcagaagccctgcaaagtgctggcaagggcctgagctatgaaccaagacaataaaacagaaaaaaaagttctttttttttttcacacagtgggtggaggtccccactttggtggggaattatggagcccacacctgagtgcttttagttgaagctttagtacctgggaggatgaagagttcccaggcgtggctgtccagctcactggtgtcagcaccagcaggtctgattgttaagttcaagggctgcccagcaaggcctgggagacagaaccagccagactggttttattggattgtgctgctgataatgacacaatttttatgtcactgaacactttcttggcaactactaaatattttgatatgattcctatacaaaaacagttgacataaggactatgatccccatttcaaatgaggacaggagataactaaagttgatggaatgctaaccatgagtttggcactgtggtaggttcttagtgtcccaactagttttcatgacagctcacaagggaggtgctgttattccacttttatagaagatgaaactgaaacctagattatgtagctgtcaaaagacaacaaaactagtgaggaagagagccaggacgccggcccaggtctatctgagcttggtccccatga

SEQ ID NO: 48754 - DNA, 1116 bp, Homo sapiens
ctgctttacaagggtagtgccacatctgcatccacacctgcttttaaagacctgggaaagcaggtgggggttgggagttaaatagctgtggagaggggagaaccagaagaactgggttccagagaaacccagagcaggggctgttccccatccactgaccccagcacgcccagccacacccaccaggcaaaccgccaccaggcttagggcagaaggctccccaggctggatggggacaggctgcacctctgctctagcaaggtcacaggtcgaggtgaggcagggtgtttgcagccctaggaatagaacttatctcagttcaaagacccaaagcacatgtgcacagaggacagtgaaaaggagagcatgcccctcagccagggccacccacagaaccccaaccaggagaaagccctggatgatgtgatacctgaggtgcccagaggggaagaaggggcaggtaggtgggctggcttctccggacacctgtccctgccagggcagcctgtgcctgttcctctgcaaccctccctccctgccccggctctcaggcttctatgacaggctcaaagtccatgtggatcaactgtccacgtggactggcagatgttttgccacataaaatgtacatccactcacattctcaagaaacagtcatatgcgatttccattacacctctgaatttataatgaaagttacagccagatgtgatccagtggatcgatgtgatccagtgaattggcgtttccctaccatttttttttcaattcacaattcctttcacagtaatatacaaccttaaaagccccctgggattaacataatatttaataatattcattacacagaaaggcaaattctgatgttttaagtaattagtgacacatgctgctaaaacattttaattttgtaagaaacaatcacatgtgggcaaattaattacaaaacaataaattatctcatcttctgtatggacactaaatacatggtaaaatatagattgaaaactaattgtattataggcaaaagctgctgtcattaacttaatttctgactttttagttttgctttaaagagcaactgattgccaggtgcagtggctcaagcctataatc

SEQ ID NO: 48755 - DNA, 3439 bp, Homo sapiens
acaaagtgagaacaatagaagttaaaaataatatgtctacatttcttggacaaagatgttcggacaagtaaattagacactggatatgagtgagggaaagaactgaatgcatcaggaataatttcatgttttccatagcaaaaatccttagttttactttgcaattcaaatatgaaagccaatcagagctctgggaagccctgagaaggccagccctcgactacctcttgccacacagtaccaggctgaaaagagtgccacgctcttagggtaagtcctttcacttctatcattagactcccttcaaggatcttacagatactctttggatacagttttgccggccttttaaatgttctctctgtcttcatatttatttataaggtgatagtgacaaaataattcagtgtccttaaataggctcatttaataggctatgaaagccacagatttaaagatacctctgtttcacatttccctgttattttgggatgcctattaccatgaaaaaggatttcccacatttactttctttctggggaatttgtttgttcaaagagaattatataaccaccagtaagtgcactgcaaaaaaaaaaaaagagagagagaaagaaaacttctttttaacattcctcagcttcaggattatttgatttgctaacctggctcaccttttcctggcattaaaggaaaactttaaaattttaaaaagagcccgactgaaagtcttttacacacttgggcaacacgcccgcctatgggcacatgggcagggtgagtcagtgggacacaactgtaacagaaaaaaagatttgttgtccccaaagctgcctccttcaagtccagttgccatagcagaaagtgggcccattcagtaagcaggtgcagggctcaccccaaccctcattccatttgcaagactcatacacatttgctccaggcgagcgagcgagttcgaaggtccccggcgcgccgcgctgaaaactacaaagtccaccgggactgcgcgctaccccgcggcccagcctgcaccgctggccgggatgagcacggcgcacctggctcggggtctgaataatgagcagggctgctcgtcctgtttgagggaaattactctttctgagagtcaaatcctgaatgtgacgtgtaatccctgcacgcaaggtgtggggatagcaaacagaaaccgggagaggtttgggcaaaagcggaatcgcgaagacagggatgggccgccagactcgcgggtccgctacggatgtctgcgcctcaggcctggccccactaggacgccccttccactgccaggggagaccctggaataaaggcagggagggagagctgctgccatgaaaccctccgggcaatccgaacaccttccgagaacgcggggcccgggcggctgcgaagccggggagccctcccctccacgctgccgggagagccgatcctggggctgccgccgaggccgggagagggaagacttgatgggaaccggccaggggcaagcccgcagggaagaggccggagtcaaaggccgggcgtcccctcgctccccgctccacccctacggcaaacacttggggggcctgaggaaagctcggagctgagtgggggctgtgctggcggggacccccataaggacgcctgcatacaaaccaccccgcgcgaaaagtgcgctccggccccggcccgacacggttacctgggcaacgacccgggtgcccaaagtacacagcacgcaccaccacccaacaccagcacccaacaccagcaccgcaccacctgctccaccactaccaccagcacccgctggggcggcagagagggcgccctgcccgggagcgcgcggtgcggacgcgggcgtccgagcccagggaagccccctctccaccccgcccgaccgcggggccgcttacccggtcgggggcttggccgccgaggcgcgcggcgcgtccatggtgccgggggccgggacgcgggcggtgctccgggcccgccgagtcaggcgctggctaccgccgccaccgctgccgccctcattcactttttccgcgctgacccatcgtcctcccacgcgggccggcggaggacagcggcggagcgcggcggacggaaggggctggaatcgtctctagcgggcgggggcgccgggagcgcagggaggggctggcggcggcgcggggcgggggcgccgggagcaaggtgcgccgcgcccccgccccggctgctctgccgcgcccaccggagcgccgcccccgccccgccccgccccgcctgctcagagtcccgacccggcccgcggcgagcgtccggggaaggaatcctccggcacctgggccctgcaccgacacccgcgggtgcggcagagggcttctccccgtgctcctccacccctggggggagcgcgaccctctctgggcggagtgggggatcccggggccggcgcctcctggcggagttgggggaggggaaccacctggagcctggaggccgtgcgagggcgaggtgggcggaccagcccgggaggactgacgttggagggtgagaagtgagtgtccggcaccgctctctgacctttatccgtgcagcaaatgtctagtgcgtagggtcgcaaagtgggagtcccgaccgggagcgtcaggaacacctgggaacttgttagaaatgcagatttctggggcccaccaggtcccacggaatcagaaacagtgcgggctggagcgcggcctcgctttgctaacaactcactcgctctaggtgaatgctcgcttaagtttgccaacctgattcactgggcgctactgtggcacaaccctgccactccagtgcgggctggcgggcagatatgcaggtcctgccggccacgccggggcccagagcaagtcagccagaggtcccttatctgcccaacttcacctccactctctaagatcttggttggtatgatgggctgacctataaaagtggcagtttcatatggtttcaatgactcgaataaaagaccaacaagaggccagatcgggcgagcctgatagcgttgggggtgacgctccccttgcgatcttgtcattggatgaggtatccagaggcctgcgcagccttcctccctctgatcccctgctttctcattaactgaagggggggcagaccagtctatatgcaaaatgtgagtccttactcgtggctggcagatcttgggtgctccctgctcccacctagaaggtttcctaagtccccaggtggccctggggctcacttccctgcagcccagcctcccatgagtggagcgctttcccggctcagggcctctggctgggatgctgctccacagtgctcttcctcctccttttcatcccgtggtctccccaaggagcctttcctggcctctctgtctaaaagcaccctgcggagcacagtggcttacacctgtaac

SEQ ID NO: 48756 - DNA, 934 bp, Homo sapiens
agtgacccagtgtctcagatgctgagcacagatggcaacaggaagcccgaagcaggtggatggtgaagagtaagagagctcctcaacatccagaaaaacaatgagaaggaggtgacgtgccacctccaggccaagatgcaacttgctgttctaggaaaaaggcccaggtgaccctaggcctggacaacctcagatccttggaaggcccccagacatctactcagaaacccaacagggaccagtttccagaaatgaagtggagggttaagcctggttagagctgtcaggatgagacacagagtaaaggtcagacttctgccagagggaggagcttcacgctgtgacccagggcctgcaatctaaatgggccaggactgccgatcacttgtgtcaactgtggggaggggcacagagcctgggggggcaggcggggcctaggacctgatcagattctgtgcatattgccacccacacttccctgactgataagggccccaagagatgcaactgtggggagttgttttccaaaattgtatagttcaacagatatttctgagcatctactgtatgccagcctttgtctgcggtgtggatgtggccacctcatagggagggctaggcaaggaaatcagtaacagacagggctgagctcttccagacagacagtgagaaagaggaataggtgatgggctgaaagcaaagggctgagtggggccttgtagaggatgtcaccaagatcagcctaccacttgtcactgagcagaacgcactccttcctgtgcttactgacttcagcagagcaaatggcacaatcacacgctagggaaactcaaagggaaaggtgttctttatggactctttcctgcacatgcttttaaatgtccttattaaaactgtcacttttttttttttttttttgagagggagtcgttct

SEQ ID NO: 48757 - DNA, 2385 bp, Homo sapiens
gtcatccacccgccttggcctcccaaagtgctgggattataggcatgagccaccatgcccggccaatcattttatattttaaatgatctgaaaggtaggtactattgttgtccctttttaaaaattatattaaaattatacaactttataataaaaatataatgaaatataattatatttttattttatgtatatttattatatattataattatataataaaaatcagccttgtccccattttataagtgaaaaaaatcaagaattagggaacttaagtcacccaatgttacacagggcaaagattcataccaggcaaccttacctaagaccctgtattcttggccattgtacaaatgcatcactttaatctatgcctgtcacccagccctcccatgaagcattcaatgcagaagcagccccagcacctagcgtttgtcagcacatgcatgttgcgctctctgccaagtggcaaacgaaggagaatgtgtaggtttggctatcctgccactttgtcatgaagctcttatttaagccaccagctgtcataattttcctgctagtgcgagcacactgagagctatgcttcccgtcctgcactgtgtagggaggcatttcttcacctctttgcagagatgttcagcccatgatcttacgtaacattgcacccacgccctccacccacataaggattatgcaattgcgtgtaggattccttgcggtgttttctggaaatatgagcctcttcagaaaatgcatccacgtagttttgacgaaagaggattttctgacctgtgctgatgaatgttctgtctttatatataattttgccttggagaacttgtctggtttgaagtcaactgaaggttaagggcatattcatctacaaataagattatatccttcatacttattcagttttattcaattccgaagtcattccaaaaatcaaagatggctttagcagtattttatatcctcttttatactgcactatatattacaattctctattatttaacatggttcaagagtggaggggttggctgatggaatataactacaattctaaatttttgatttatgtttttggatatggtggcttttgatgccaatccatggcctccttcccagaattataatttgatctttttagtgagtttataggctacatttatcaaggagaagaaataaaaggaatggttctctattcctggcttcccaaatatttagcatttaggaaggctcccagctgacacctctcctgtgttactttctgcatcaggcttgtccaggcatgttggatggacagagaatgtaggctgccaggatattcacatctcatgaggagtgtggcgcctcctagaaggagctcatcctgggcgttgagggtggctgcgtaggagaagctcaaggatcagcgggtctctcattatcttgggtgggggatttgtggcctcacactgtgtcgagcagattgtgacctcctccaggccttcagagactcctgtggttccggcaggtccaagaaggagcagcactgagccatatcaccctgggtttttcttagttaaggcctcagggaggagttcatttacaatggattttgaagttgtaaaggaaggccttagtcataggggcaactgtcagcaccaccagccagacatagtattgtagtatcgctggcagcgacgagggacagatagctgaagaaaagggacctagggatgccaccaggtatgaaggaagcactaatttgtgtagtccaggaagaacttccttgcgggggtcccagaaccatcagtttcttggagttccttaaggtaatgggatagaggcaggagcattctcactcaccactatagttggacattatttttacttacaggctactgtagcctaggaaacctcagttatgtaacaaacatattctccagaaatattttctgagaccttcaagaatctgcagattcatgatgatggaaatttgggtacaggcttctcaatttctccagaataaatatttcaggagagaggcttctgcaaccttgtatgacaacattcacaacaaaagttcaatgtcccttgaattggcaaatcatcacccacaaacaacagacactaacacagctgtttttactccaaagagcatctgcatcatgcttactgagtcagaaacaccatagctgagtggagatggggctgctggaggtgatggtgtgtcctctccagccaaaagcttcccctggtgtgctcagtagaattacaccttccttcttgttgcagccttctgggctattttttaaattaaaaagtagaatgaaatatcagatctgtgaatgccatagggctactgtattccattttctaatatgattatatgat

SEQ ID NO: 48758 - DNA, 1265 bp, Homo sapiens
gaacacctgacctcaagtgatccacctgcctcggccttccaaagtgctgggattaacaggcgtgagccaccgcacctggcttgtactcaactgtttttatttcacttattgacacaaacacattctaccaacaggcgaagaaggaaggactggatggaaaaggaataaagttgccttattctcccctttccttctatgtcattattttcactgttaggtggctagctaatacataactatcttagcaaatgtaaatcagcagatgtttcaaaaaaggtgaaactcatggcttctacacttctcagtggggggatgggtcttctgggtcatcctagttactttactgccaagggactgtgggtgtatgggtgggtatgtggtatgtgcgtgtgtatgtgtgtgtgtgtgtgtgtgtgtgtgtgtgtgttgctcccatcacagcaagtagttggagtaggaggagtggtttgagtggatattggtcaaggtcactgataaaaagagcaaagtgatacaaaggttcagcatgggcctgttagtgtgggaggtgactaaatgtttatttttacatgtaaatgatcaacctatctactttagtcacacctggtaaatgtgtgtgtgtgtatgtgttgcataagagcttgaggagttgatttgagagggcagtgagacatggattatccttctacaaaatataatctctgtatagagtttgaagagattacagggaaagctcactaggccatgttgtgagttctagaaccaggaggaatggaagctcacctcccaggtggagatgtggcctctctgcactataggcagtatgtgttactatacacctagctagggatgaaacaaagtgtgtccagcacctgcccccaccaccccttgccctggcctatgctgactgtaagatggcttggctcagaatagcaactaatacacacaaaaatgagtctgttccaatatttatcatcccaaactgcatgcaaatatgctaaagaagtatactgggatatttcactgtggttagttactacatatagaaaagagaataaataatctaaaaattctgaattcccaaccagtgagggatctattctggacacctttcacctggcagctctagttggtgagaataaacagaaggatgatgttttgagacccaaggaaaaaaccccgaggccattcaaagccacttagtttaacctgcctgacctgcctaataccaaagaggcaactggagcaatgagcttatggccata

SEQ ID NO: 48759 - DNA, 774 bp, Homo sapiens
agggtgctggagataaagatgtccagtttagaagttattgttcctctaactataagtcaaatcgtgtaacccccaaatgaaagaacatgcaggaaggctggctctaaccgaagcatgctcttccactccatctgacctcccatcatattcctggactcacctgaacaatgatccctggtacagggctgataccctagctaaatacaagcgttaggtttaaactactttttaaaatatctactgtttactaaggaaatccactgtttactctttattaaggttcttatcaaagtccggacagccctctgtggtctacacacctcctgtgagctcagagagttccattccttatctcttagttggtaccaagctcacacttccttttgatttttcaggtatgctgtgcttagtatttatcacgctattcttttcatgctatttactaagaacgaacagatctgggattagatccaggtgagcttcttagtgtccctgagctccagcgtcctcagtgtaagatgaggacaacactcaaggtgcacacaaaaatgggaggtgcaaaggggagagtttcaggcagcgagtgtgcattctttagtgattagttggacaagtggaatgcctggtggttttcaaatcttgttatgtttaaaagtttcatatgaggccaggtgtggtggctcacacctgcaatcccagcactttgggagcctaaggcaggcggattcacctgaggccaggagttggaaaccagcctggccaacatgatgaaac

SEQ ID NO: 48760 - DNA, 1674 bp, Homo sapiens
gtgcaacaattccttgccttattgtctcttactgcaatacacactaatgaatcctcatagtactttttttaaacatatgaaatgatttaacatttcattaaatattagtccacaattataattttgcttatgatttccattatgaaacagctttgaacaagcaattgtttccagatagacacagtaagtttcaaggaggaaagtgaattgtgagtattaagtgcaactggccagaggtctataccaagagtagctatcaacagatctgagatacctagcataagagaacaggtgttcgtcagtgtttggacctgggcccagtattgcttaacagctttatcaatgacctgggtgagatggaatggaaagcatgcttcatacatttgcagctgacacagagccagatggagacaaatacggctgcaggagagatgtaattcaaatcgacttcagcaaatatggctcccacaattccgaaacatacattgactagattcatgggtagagaacagtttaagggaaagagagaatgataacaaaagaaaaagttttctgttcttcagcagtttgccaactgactgggaacaatgggcaagaacacaggcaaaaatggtagcccaagaaagcaagtgacgtctgtgtgtacagagctgacactgattgttaccagtggctttacagtgctcagagattcatgaagtgactgggctaatggaggggggtggggcaaggtgtggccagctcaacaatggaaatgagcatcttaaggttaatctgggaggagtgaatggcacagagggatattcagcaaaaatggcataattttctcaataccatggaaaatagatgacaaaagcaagcaaaaatcaatcattcaattatttaaggtcacggaaagtcaacgccaatacagataaaaagtaaaattataaatatagaaaatgttgagctaagtgtaagtaaaggaggaaaagccatagataggagttataatgtgtaggagaacccaaaattttgcattacgaaatggaagagaggtgaaaattttgtcattggtgtgagacaatctttatatgatatgcattgtatttcctttgaaagctaaacaggcaggaaatgtagataaatacctcatacttatatgaataaactatgtgtgtaggggtgagatcaccttctgtacatttaaaatagagatacaattcacatatcataaaagtcacccttttaaagtctttcttagcctatgtacgaggtggcagaaaaccactaaaataattaacaaactggatttgtttaacttggagagtagagaagtattgatccagaatgatggagagtgtattttcagagtagaacaaagttttcctgactgtaaaggttgttaaaggaggtaatgaaggttccctttgaaaagacttttgaaattaagataaattctgatctttctggcaaggtgtaaatgtggtctcacacgacggtaagactgtgcctttagatcttaaggcttcgtgtatgtgttatttggttctgatgtttttctgttctctgattgtgttatgttaaaagctgtaaactcagagagagagaaacaacccacaagtaggaaaacaaataatcattagtcatttggaccaatgtaaaatattttctcagattttgacaaaatagccc

SEQ ID NO: 48761 - DNA, 1529 bp, Homo sapiens
tccgggttactgagagagggcatgagagagggcatgggtgtcctgtgaggctcagagactgcatttgccctttccctccatttcaaaagtgtccaaaggtattggcggttttgtgacccctgtaaggtattggtggttttgtaaccccccatgggacgtgtagttcttaacaaagactggtgagcagggctgagcaggctgctattcgcagctggagggcagtgtctcagggctgagtggccaggctggacattctctctactcaggatgctgctcccacctggggcttgcataaatcaacctcatctcttcccgcccccaggcatactaaatcacactgtgatggcgagtcttctcccttttgccgcctgtgctaactcaggtggaacctgccccttaatgtgccacactgggttactcattccctgggcatggtgacctctgggttggaaactttctttggaaatgtgctgcccttcgtacgctctgcttgttttctttagcaaattgtaactaggtgaagagagcaccaaagggagccagggtcccttaggaacgccatgaccttaccacgccttttcccaaggacaaaagagctacgcttagccaagttcccttagtgttgactgatatgcatgttatgtcatgcggaagtgagagggaacagtttgcctgccatttgggcaaatatagtaagtaaagagtgggtccaacttgagtaaagaatgacctgctcactcattttgaatgtgccagctttcggcctccctaattgcagtggcctgacataaaccttgctgttgtggagatgccaacatcatcaaagtcagcctctaaacagctaatgccattctgggctggaacactcgactctttaccctggttttcttcatcattttatcagacttgctttaattccctctttttaaattaattaattaattaattatttttctgagactgagtcttgctctgttgcccaggctggagtgcagtggcacaatcttgactcactgcaacctccgccccccccgggttcaaataattctcctgcctcagcctcccaagtagctgggattacaggcttgtgcccccatgcgtggctaatttttgtattttttttttaatagagacggtgttttaccatgttggccaggctggtcccgaactcctgacctcgtgatccctccttgctttggccccccaaagtgctgggatgacagttgtgagccactattcccagcaattccctctttttgagactgttagatagcagaaaattaatgtatattgccctctagtgattaatgattacaaacacttaactaccaaaacatttactgatactcaattatgttaaaaatcccattgttttattctgcatataaaagtaatgcacacttgtgttgggaatgtaaagcatatctggacctctcttctgatattcaggtgcctttatccagacgactactctgcaggtccacgtgggtccctgttaggcacctccagctttagctcgtcctgaacct

SEQ ID NO: 48762 - DNA, 838 bp, Homo sapiens
agtacatgtccattcgcttagaaaatagctgtaataacaaaagaaatgaaattccatttggtcattagctatgggtaaacaatgctttcaatgtgattttaatcctcttcatgtgcctgtgatgtctttagataaggcttaaagatcatgaccttttcagagtgttgcatcaccctcaatcttttctatagtccactgagtgatctattgaaattcatttccagcagtttggctacttcttattcattaaaaaactcacttttgagcaccaagactgagtatctggggtttaaagagtaacgacatttatctctgaaagttgatggcgtctttgagatttcagagtgtaaaggccaaatgctggactttcagcttccagggactgctttcactttcagaggctgccgggaggtctctgtgtgtggcctcctcctctcacagcctggcggctagctttcttctaaagccagtaggacagcagctttctgtcctttcacaggttttgaaatggctccctaacaaagtcaggcccaaccagaagaatctccttttgatgaattcaaagttagtatcccaaccacgggagtaaaattgcatcatgttcacctgctctgcccacattcaaggggaggcaattatgctgatgaacaccagggggcggcatctcggggattccaagttagagtcttgcccaccactggctgattgtgctggtctctctacaactctaaattccttggataccgagaagaatttaatagtgcaaaagataaggtagtcttacagctggacaggatagctctatgctttcttctgggatgcctggacatctgatctt

SEQ ID NO: 48763 - DNA, 785 bp, Homo sapiens
cacaagatgttgatgtcaggaggaaatcttcttaagaaaaacagtaaacagtaaattttaaaagaaaatagggtttcaggaaactgtagaataaaaagtgtggctgccttttagtttgcaagtgaacaccgagtgcacgatgtattagtaatgcaagttgaatccagcatacagcctaatagaacaaaagcaacttgctttatctgactaattggggcataaataattataatgatcagccttgtagaaaataaaaaagactcattaaaggcagggtgtgaacaggagtgcaatgttaatttggttaacattcctaaacccatattgatttttaaattgccattctcgaatgtccaaagttcaagaatccagaaaaacttggcatagtcctcagcgtttacattccacaattaacaagcttgattcttttaaggaaattagacttcagtgaaagttaagtgaacttcagaggttaaaattaatgaggagcaaggaatttataatatctataggcaaagatccttgaggggaatatgaacacttgggaagcaaagtacaccagttaggatgtagggtgacccgacttggggtgtattcgaatgtctaaaaagacctcaagttgatttgacgactagaattccaccagggaaaaatagtccttatcttaaacttttcaagttggcttaagtgcaaatcactcctatcagtgatgtcacaaccattgcaccttggcaggctgaatttcatgctttctttgaactagtttgataagaagcaaacatttg

SEQ ID NO: 48764 - DNA, 800 bp, Homo sapiens
acattgctgtattttctttttgcttgataggtggcccaataataggttcttctctgttgttcccaccctcatctttgaggtttaaaagtccttaggtgtttcctatgaatgcaaataaaccagaatttgtctggacaggatgcatcccagtaacttcctgtgaaatattaactgattaaatttcaagtgcccaaccatctttttggtccattacctcttgggactaattcatggaaattgaatgatacattaacttacaggtcaaagtcaaatgtgctgccccaggcaggaatttttgttcaaatttccattttgcttgaaataaaactcctcttacacttcagtagcctgaatccaactttcaagctctgtggtgactgataagacatccgccaaatatttttttctggacagaatcctattctgacattcatttccccagaaaacacttgctgctttgagtgctgcctgtgacagcaatcaataagttacaaagagtttatccaaatcagggtcagataactggacttgggacagtttagttcatgtagatataacctctcctatcatgttaataccactatcctttctgaagttgcagtctacagaggtatgaaactatgaaataagaaggcaaacataggttaaccaaaactctcagtaaagataatactatattaaatcatcttttaatttagaagtagttaagatatatagcagatatattaaaagataataagaaatgttaaaataataaaattatagaaagggacccttgagcactcataacaataacaaaa

SEQ ID NO: 48765 - DNA, 2522 bp, Homo sapiens
aaactacgcagaagccagtgtcttgtacagtgaatgccaactacggtgctgcaagagcctagaatagaggcaaacgtgaatttcaaccttgatttttctaaaacgtgccaatacaacatacttttctaaagtataaagaatggctaaaggaagacgcaaattctgagaagctactagctaaatttcaaacttttcgatttgaacacatcttttaaggaaacagggctatatattttaccatacaggttcttttgaggaatctattacccaatagaaatgttatccgatcttagctttgagagccactgctatagtaagtaaagcagccagggtgttatttgtattttcctccatttccagtactcagaacagtggccaggtggtagttcaaatcactggctatggaatgtaaacctctgtaagccccagttgccttccttagtgtagggtgtggacaacgaaatgaaataatgtcaatgaaacaccaggaattctgcaacgttctgggggcaaaaacacagtaatgtctgttttctcagtatttcactcaactttgctcttgaaatccaaagggcttaaactttttgtaatcatagttgtcacgaaggaagctaagaattctttatccagaaaaacgcacgctacacacaataccgcactcaatgtcaggggtagagatccaaaaaccaactatgatctctcgaactagactctagaccaatgctctcactttaaaccacggaagcggcggcaggaccagagctgagtacagctcttcccagacaggactccacaacagcacacagagccaaccccgaagggatcgggcagcaggacatcatctttggctgcagcacagaagacgccggggcaggacgctaagccctggagccccgcgggccggccacccagctcgccgggagtccgcggccctgggtctgccttccgccagaggccgagttggtgggatgtcggcggccagaccccggccctgagccaggggaccacttaccgcccgccccgcgacggccgcccggggagacacgccggctcgcccacgcccgctgcccccaagagtcgcaaaggtgtggccgccccgttcgcccgtaccgaccggtgggaagaaactcacctacccaaccgacacctaaaatgccagggacacgtagcactggagcttgctgatggaggcccaccggaaccggaatccgggtttctgccaacagcccgcccactcctccgtcctattggttccttacgcgaaacctcagtgcgcaagcgcagcgcgacgtgcgcccggccacgcttcctggaagagatgcattgcggagctcgctagttggggcgttggccttccttaggagtgtgagtctagcgttatcccttttttccggctggatcccgggttaccccaccagcccgacctcaacccactcacgtccacagcacgagccccagcggccttgcgcggtgcttgctctctagtagcggctgactaggtaaatcctaagttgtggttttttttcctgcggtccagcttgatgtgtgtccttacggtacatactttttgtatgtatataatgttggtcgaaatgaagcttatgagcaatataatgttatggcctaattcaaaatagtatccccaccccaaactttgactttggctgtcattcacggtaatgaatgccgctgtaattgaggcctttgtcaaacgctaggtttggttacgggagtggtcataatgtacacacagctccccacttacccacaaggatgcattccaggaaccccccgccggatggctgaaaccgtcagtagagacggggtttcaccatattggccaggctggtcttgaactcctgacctcgcgatccacccgcctcggcctcccaaagtgctgggattacagacgtgagccaccgcgcccggccatgtttccttttagcaatggagcataacgggatctgaggaacaatataactcaggaagagctgatggaacattaagacgtgttacaactctcagtgcttcttaaacttcttcagtaactgaaatctcctgttaagttttttagtaaatgaaatttgtaaccccagaacctccagatattgattcagtgggtcagggttagaggtcacacacctccgtatatctgactgtaggtggtccatacacactacacataccttgccttagctttaagagtcacttttaaattctgaacagactgagatgcgtttgactagttcttcatccctgggacttcagcccatgtgtcatctccttagaggcctatagtgaccatctaaggcaatcctgtctatctcatgctcttttttcctttttcacaataccttcttcatttgctgcatagcatttgtattaacatttatttatttattcctcggtctgtctccctacactgtaaatccccttactagaccataagctccaagtgggtataatatagcatctagtaaagtgctaaacacagtaaatgctcaataaataattttcaaaaa

SEQ ID NO: 48766 - DNA, 1054 bp, Homo sapiens
ttccttttttaccagtaacattcatttaaataggaaataggaaactatagaaggaaatatgtgtgtgtgtgcgcgcatatgcgtgtgtgtgtgggtgggtgggtggaaggggtaaaacggaaacacagggacagagacagaaacagttgagaattcctgcctcaaaaaacccgatctgctggagtttgtatacattgtcttttccaagcttgaaaaaagttctccacagaagtaatgaccctggacttgcagaagagagcgctaaagctcagaaagtaaagtcagctctcaagaagacttcgctagtaactagcgaagtaggatcccacccagatctgcgttctccacctgctgtcacatgatgcagtgagtcaaacagtactgtcactgcatacctcattacgatgccacgctgactgtctcagctccacgacagtggttattggccattttgttcaatgacacctagcaatgcctgcttcctaccagttacttaacaatagttgttgaataaattgctccgttcacttatattcatggcatatggatgaataaagagcatgctcaccaaatatttggctagcaagtactcatgtatgtacaaaagaacagccatgtgtcgggcaacagaatcagggtcagaaactctcctgtcggggcagcgagcaatgtggtgggacaggggctgcctcaaagcctccttttgggttcaaaacccacaggaaaatgcagcagaagagtttaggaagagtactttctattttgtttggaggttggtttttttggtttctggctatttttaaaaattaacaccttgcattggtgtggtacctttgttacaaccaacaaaccaacgttagtacattactattagctaacatctgtaatttaaattagggtttacccttttgttatatagttggataatttgtattgtagagtttaatgagttttcacatatgccagtatcactcatccattatcatagcatcatacagaatattttcactgacctaacaatcccctgtgcttaacctatgtatgctcctccctg

SEQ ID NO: 48767 - DNA, 680 bp, Homo sapiens
ctgactcgggtcccacacactgcagtcattattttactgtgtcttataggctgtgctttgctttacgggcttagatctacatctaatttggttccccttcaatatttcaatcttcattcagggctctgcttccctgggtccacccacgccctgtgtccccagcttgacccgacagcttccatgagtaatcgggtctccaccctggggataccctcccatctgcaggctgcatctgcacttggcttgggacagccttggccagggctgcagggtgttccctcgtggccgcctgcctctgctccctgccctttgcctccctctggtgggcacagtggccatcctggcagcagggcttggtcagggcctttgaagtgacctgctgtgtcagactctttggggcttaatgtgggtcaaactcatctgcagagcttgttttgaacacacattgccaggccccagccccagagtgtttgattcagtcagcctggggtgcatcctgataatgtgcatttttaaacaggttcccaggtgatgctgatgctgcagcacactgaggaagccactgctgcagtcccaccagttcacggaaagtggctgcagtgtgcaaatgtttcagaactgctggggcagagaccaaggcccttgttccctgaaacattgattaagacgcctaggcttct

SEQ ID NO: 48768 - DNA, 2366 bp, Homo sapiens
atcttttatatgtcacctaagggcttccaaggcatgtgtcctcagagacaggaaaaagaggaaactctgactttttatgacctagccttggaagtcataaagtgtcatttctgctcaagtcccaggcccactagattcacccatttgcccatttatcttggcatttctatttatagagatgagtaagcatgatactcagaaaaataaagaaatttacccaaattatagacctaataaatgagagaacaatgattgaataactctgtctggtaatattcaataaatgctattaagatacttggtcacaacttttatataaaaacaaatttacaccctgcgagcgagaaacaaaaattccttctaggagataccaggagatagacaaatcatagtacggacaactcacacatttcaacaatgttatgtgatgtgtacaccccgctagtagaaatgcaatgtttcaagggaggctaagagatggagcaatttactcttccttgggggtgagagggactgcccggctgagaggtaacatttgagcagaaccttagaggatcttcagcgatagatagtctgtagttgaggaagagaggtcagagcccaggcccagagagcacagggccacggaactgacatggggggtgtggagattcagggaaggctgggcactaaagcataactgtgggatatggtgaagcccaggtgttgggggaggtggggtcaggagatgaggctggaaataggttaggccttgcttgtgaatgactttgaatgacatacttagaagttgctctttaacttatgactaatcaagagccacagcagtttataagtagagaagtgatacagtaaattccacatttagaaagaccacttcagtgattacatagagaaaaatgaagggatttaatactggggaataagacacaagacaggagagcaatgtaatagacggtgctctggtgttgagaatgacatcagaggcatatcttttgtgtttttattccaatactgttgtaaacttctgaagcttgaaggtctgtgcagcaaaaaaatctcagtgtaggtagaggtgtagcaggacaagcagcagacaaaacccctcagacaccgagttaaagaaggaagggctttattcggccaggagcttcggcaagactcacgtctccaaaaaccgagctccccaagtgagcaattcctgtctcctttaagggcttataactctaagggggtctgtgtgagacggtcgtgatcaactgagcaagcagggggtatgtgactgggggctgcatgcaccggcaatcacaacggaacagaacaggacagggattttcacagtgcttttccataaaatgtctggaatctatagataacataaccagttaggtcaggggtcaatctttaaccaggcccagggcacggcgccaggctgtctgcctgtggatttcatttctgccttttagtttttacttcttctttctttggaggcagaaattgggcataagccaatatgaggggtggtctcctcccttagaggtatcaactgttatttaattacattttagcaaaattttaagggtggtttttctagcagtaggaaagaggaaaaacaccaaaatttgactaagttatttggcttttattcaattcgttttgctcttttttttcctgtgacatgagtttgttcctgaagggcaaggtcaaaggagtttctgactaatgtatccctaaacttcgtgctgttttattactcttccattgaggccagcacaccttaatatgacattttaaaattcacaacgttttgttagcaaaatagttactttttttgcacttttattttttaaaacaattttttattaaaacaattatcttatcagaaccaatgacgatacccatcagccagtgttagtaatgccaaacaggcctctcagcttgcactatgttaattatattcaaaataagaatccacagaaagaactcaaataagtacaaatatttcttaatatatttttgggatggaattcctaatagagtctattccttgcctgaaacctgcaaatatacattacttttaatgttgttaagtatgagtcacaagtagaggtaagaggcagtgaacacaatgtttcttactgcaaatctttttttcccctctaaaaattggagttgtcttatactatagtcactgaggagagttacaataagaaccatcaaaattgttagttgcaacttgagataaataaaatacacataaatcctcccaagtggaaaaatattcactgtgtgtgtctttcattttcattcattaagacaaagttctgaaagccaagtactacatttgttgtttagttcccttttgcact

SEQ ID NO: 48769 - DNA, 1064 bp, Homo sapiens
attcacaagaaaacgtatgactgcaaaatttcatgtccacaccttagagctgggacataagcgcagtgcgcgctctgcagaaattctgcccgcctctccaggccctccttccagctcccggcagagcgggctggaagtaacggggaagagcggttatttgttggtttaatataatttgtttagtcacccaaggatgactaatttgcattttctctctctttttatattgatccgtagcacactctgttttccacctaatggatatttgggcactaacttgttagtgtcactttcctgtcctttcatgcagggttttcacgctgtgggttccctggcagccacctcccatcactatggtgtcctcgcttcagttttgacacgacatcattagcagctgcagacagtccttgttccggctgaataagagagcacagacggacttggcactgggcgcacaccaggagggtccgaggcggggccgcggggacctgctcttgggagcgcggacagagccccactgtccctctccccagggccgtgctcgtcaaagacggacaggcagtggctacacatgaagccacgaatgccttgaactcggctctggacctgatttcttatttaactgaaggacaaagaagaaaagaacaaaaacacccatcagcacgccgtggcgtcccctcggactcgcaatcactgcagcgggatttccaagctccccttcccagggcacaggcgggaggacctccgcgatggtgggggcggaggaggctccaccctgacagcttcctataaccccactgacccgtgccacatgggtcacagcattgcagaattacagctttgagaataatttaggaacagaaaatttgtgattataatatgctgagttttaaagctaagatataaaatcatattcacactgaataccactaacaaaatattcatatgcaaatcaggttaaaatatacgccaacaggattcatagaagttgtatgttaggtagtagaaagtgatagaaagattgttttgtagctatatcacacttaggctgaatgcaatttaaa

SEQ ID NO: 48770 - DNA, 1314 bp, Homo sapiens
taacatttctcaccatgacaaacagaggcattagcaagaagagaacaggagaggttctgataaatctctttcagagggatcattcaaatattgttatttttcttggaatgtttgaattttcatgatctctcagccctccaattaggatgggtctcctcaatgtagaaagtgataataatgaagaagttaggtaaggtgttcttttgaatgggaagatatgaaaactgcaaaacatcaagggcaaattcattcatcagcctccttagcaaatcggttcattccaaaacttgactcagctgctttgtcactaaacataccctcttgacctagccctcgagagagtaattttcagtattagggacatactcctgaacttacttcatttctaaagaacggagtattctcttgttactcattgacgtcgaatgagacaccagagcagaagctgcacatcagctgtaacttgggaaataagagactcacatgacacagtctgcttcctacaaaatccaaattaattccacatgcaaaaaaagaagactaaaatgtctcttgaggattgaggtcagggaagactgtcagagaatgatgagtacacagagtatttcacaactttagttgatggccatttcattctatcttgtataaactgggacttcttaataattgattcaaaatgtagcatcgtttttagtgtgtttctttgtatagacatgcccgttaattagttctgattttctatattctgtaatagaaaaccagtgttggttttgtcatctgtattgtttttttctttgaaaatatttctcctttgcctccgtctactagggaaaaaatggattttgatcaaatcgaagcaaacctttatgtgaagaaactgctacagtaagcaaacagccataaaaacagtaaagaaagtgaaagaaaaaataaaacaggtccctggtggaaagggatacccctaagtgttcttagcatgagaccaatgacctgatttatgatgaaactaaatgcctctatccaaattctgacctgattttttcctgctttatattagcatatttactgtttcgtttttcaccgttactttttcattgacattgatctcttgttattaaatataaaaagagtttatatttaataacaagagatcaatgtcaatgaaaaagtactacaataatgtttgggaaacaggaacgtaggtgagcctgactgacgccattttaaaatcaactccatcttaaaactagcaagtcacattctttgccagtcacaccccgtggtcataagatgtttacagctaaggaagcaatt

SEQ ID NO: 48771 - DNA, 1011 bp, Homo sapiens
cagagacattcaggaaatgaataagaaataaactagagcaatatcatattacttgaagacagactctgattatgtatactgtaaattctgtggcagccaatacaaaaattaaacacattatagattatgagtcaaaaggtgaagataaaataaaatcataaaatatgtccaatcaactcaaaagaaatcagaaagatgaaatttaaaaaaaaacaaaatagatggaacaaatagagatctagcaagatggcagatgttaatcaaaatgcaacaaatataattttagcagcataaacacaccaattcaaggacagagattgacagagtgtgtataaaagcaagacaaaactataggctgtcacaagacagccacctgcacatacaagagttcaaacagaaagaatgaagaaacagacaccctgaaacacaacacacaagtaacattatcaggtataaagagaaacaaatctttgtgtgtgtgtgcacctaacaactaacaatacattttaaaatatataaataaatctgatagaaatgaaaggtaaaacagacaagtccacaattatagtttaagatttcatcactcctttgtcaataattaatagaacaagtatttagaaagtcaaggagagtacagaaaagctgaacaacaccgtcaaccaactctatccaattgacacctgcctatggaagagtccactcacccacagaagagtacagagactcttccaatgtgcatggaacaatcactaacacaggccagactctgggctaaaaaacaaatctcaacatgtttaaataaatagaaatatacagtgtgctcagagattgtgatcgataattataatggaattaaactggaaaaaacctagcaaaaatatatctggaaaatttctccaaatatttggagataaaattgtgcatgactaaataacctgtgagtcaaagtagtttcagctaaaagtaaacattattttaaagtatagaggaaattaaatgtgacatcagaac

SEQ ID NO: 48772 - DNA, 1196 bp, Homo sapiens
gataaacaaactttgatgtattcatagcttcaacaaccagtatgtagcattgagaaggaaatgaaaagatctcatgcagtaacatgttgccttacaaaaaaaaaaaaaagagtgtatattgtatgattccatttacatgaagttctaaacaagttaatctacggcaaaacaccgaagtcagagcccttggagtggtggaacaggtgtggtggaaagtgaccgggatgtgatgtagccccagtcatcgcttttggcagagggagggagaaaggggaaatgaaataggttggagcattctgttcttaacgaggtcaaccctcaggaggaagtttcttactagaggcctaacctgcaggggtgtttttgtttgtttgttttttgagacaaggtcttactctgtcatgcaggccagagtgcagtggtgcaatcacagctcactgcagccttgacctcctgggctcatgcaaccctcccacctcagccgcccaagtagctgggactacaggcaggtgccaccatgctcggcttatttttggatttttttgtagagatggcatgtcaccatgttgctcaggctggtcctgaattcctgggctcaagtgatctgcccctgtcggcctcccaaagtactgggactccaggtgtgagccaccatgcctggcctgctgggtttttatcagagcctaaccaacctggggaaagagaaatacacaactccagcccattctagcagtctctttctcacctggaaaaactgagaagcacttgtaagtttaaagtccaaggacacaggcttaccagggactgagtcctactcacaggactctagaatgcttttccttaccccacacattaccactaaaggctaaagtcctttagcatgactaaaggactatttgtagcaattccttttacctgggacattatgtcctgccatcaagaaaaagttacaagacatactacaacataaaaacacagtttgaggagacagagcaagcatcagaaccagagtcagatacggcagggatgttggaatgatccagccaggagttcaaaacaactgtgattaacacgttaagggccctaatggatacagtacatggcacgcaagaacagatgggccttataagaagggagatgaaaattctgagcaagaactaaagagaaatgctaaaggccaaacttactataaatga

SEQ ID NO: 48773 - DNA, 1139 bp, Homo sapiens
gagatatctgcacttccgtgttcattgcagcactgttcacaatagctgagatttgaaagcaacctaagtgtccatcaacagacaaatggataaagaaaatatggtacatatacgcaatggggtactatgcagacataaaaagaatgagatcttgtcatttacaacggcataggtggaactggaggtcattatgttaggtgaaataagtcagacttggaaagtcaaatttcgcatgttctcatttatttgtgggtgctaaatatcaaagcaattgaactcatgcagatagagagtagaaggatgattaccagaggctaggaagggtagtgggggggtgaaggagggaagtgaggatggttaataggtacaaaacatacatatacatacatacatacatacatacatacatacatacatacatacatacatatatatataattagaatgaataagacagaatttgatagctcaacagggtgactatagtcaataatactttaattgtacattaaaaattaacttaggtcagcgcgagggagcccgggtggccgccattactgagcctggcgctgcggctggcgctgggagagcggggagggacggggccgcagctggtggcagagagggagggagggtgggtgagcaggctgcgggggccgtggggctcagggtttccgggcgtgtgtgtcggggagggcggagggaggtgcctgaagggacgcgccgctcggtgagcgcgccgggggagaggcgagcagagagtggaggaggaggcggcggcgggagcgctacccaggaatgttgctgccgcagccacagccagggccgctgtggttgaggaggagacagaggagaccgacgttgttaggaaaatgatctctatgatcttgaagatgtttctgcacagaaatgagggaaatacaaagaaccaaatacagttctgaaacttgggatctgtattttcagatgattttattttcagaatgagaagcatatctggtttcatatctacatttatgaatgtagaggcatgagaagagagttatgatggcaaaaaacaaagagccttgtcccccatcctatactatcagtgtagttggactctctgggactgaaaaagacaaaggtaactgtggagt

SEQ ID NO: 48774 - DNA, 1367 bp, Homo sapiens
gaacaagactgttcaaaatgtcaagtttacagattatcaaaactgtttctttaaatagtgtttggatgtcaagttttggaatggagcaaattaaatattcctttcacagtctttctcttccaattctaagatgccaagtttcagacaagtgcctgaattccaagtgacattccaacatagccctgttataaagtgcctttatgctcattcttctataaccttgatttagtccatttgttttttggaggaggagggtttcaccttcaatagctacgtgcgaagtctagagacacattcaagtttatgagaagtttgtactttgcattgtttatgattattctgactcaagctgaatggcccatttctctgtattgcgacagcccgggcaattgcacacctgagcatgtccttggaatgcgtgagacacaaacattccaaactgtagggatgccaactattccaactatgtatccagagttccccacacgtatcttagcaaacaagaacaaaacaactcgatcccattgcttgaacatgttgggccacctcatgttctcaggccaccatcctccacctcaggtcacgtggtgaacatccataagtaaggattattcagactgaaggctaacaaggaaataaataaatgacccaggataagccatggtatctagttcagggtttttttagagacagtggatagagcagtcattgggtctacttatgaccaggtcaatgatttcccgaagtctaaatacatccaacagatgtgacacagtagactgccatggtcttggtagccaaggaatttgctcccaagtggaagagaagggagcagtggtggttcttgatatcctgtgggcattctcagcccagaaaagggaggctcttatgaaccttctgaggaataatacattcttttaaacacagaagaatctagcagaagcttatacagggagaggactgcaagtgtgaaccaagacctagcacctggcaggccagtcaaataacctggccatacttggtggtggggagaaaggaagccggcccagtgttcctacaagcactgcccagctcgattcccaggcctgtggcaaagcaccacatgcggtcttcatttcactctggaagctgtcagtacagcccaggtgtttctgctgcaggctcgaaagggctgaaactgccggtggccatttggggttggggttgagagacagggactgacaattgcaaagccttgaaatacaaccgctactaatcacaaggaatgaaagtattgccatgttgactatgcaacatttagtaacaatagtacattttaaaattagtgtttgcttaattgttgctcaattacattgatgctgctatcc

SEQ ID NO: 48775 - DNA, 1310 bp, Homo sapiens
aatcaagataaaaataaatttcagttgttctaatttcactttagtttcttttaagttcaagtaaaattaaatgtaatataatttatttcaaaataacacatgtaatttgattttattgttctacaattatttctgcccattttttctttcttgatatctgcaactacacacagacactagacttagaaaattttgcacgtaatgccaagaatgattacttcttgttaatgggatttgatctaaatttttaaactttctttattatatttttaaacatctgatttttatcgtggatatgtgttatgtttaaccctaaataaacaacaaccaggaaacaaacaaaccaccaataaaaaagcaccctctgaccttgaggagatcattgtccagaatgatgacaagcatgtaaacaaagatttacaaggcaggtcaaagtcttcacaaacacacagagaaggaagaagctcaagctgcctggagtcaggagttaaagaaggctgcccagggctgatgaagcatttacaatactgttttttaaaacagtcactcttggtaattttacaagttctggctggaaaatcacaccatagtaaaaatggtttcaagtcagactttctgctatgaaatccattttggctagttttgatgatttattgacacaactttataaaaggtaaaaactgtaagtagaaaagcttggatttcaaggccaaaaagtgggcttttgtttgtaataaagaacagttttcataagcagagctttacttgaataagacacttttcaaaaattcatttctattatttcaactatcatttatttttatctttataaagatgctattaaggccaaacactgcagtatgctagtaacctactgttttcacttatacatacaataaatgagcttacagattattaattttcataattagttggcaatttttctaatcattaaatagcaggtattaatttgtccctttatcttcttaatctctgaatatacaattcacatatttttcctcaggacttgacaccacaccaaaagctcttgtactcacagggatacataatctaaatctttcaccaaatctatgtctaatatttgtacagttgactgagcatgtccccatctatttacaaggcctaattgtgtaataaggtaattggctatcataaaatcatggaggtggacattcatcagtccaatctcacccacagtcctagctctcctgaaacatggtccctcagctaccgagtaagcagtagagtagttttaggaaactagttcttcacaatctagacagaaatat

SEQ ID NO: 48776 - DNA, 4972 bp, Homo sapiens
cccaaaaaagctcagtttcttttggccaaagcttccgcgagtttccctggcatttctcctgcgggagctacaggggcagtgggacacttagcctctctaaaagcacctccacggctgtttgtgtcaagcctttattccaagagcttcacttttgcgaagtaatgtgcttcacacattggcttcaaagtacccatggctggttgcaataaacattaaggaggcctgtctctgcacccggagttgggtgccctcatttcagatgatttcgagggtgcttgacaagatctgaaggaccctcggactttagagcaccacctcggacgcctggcacccctgccgcgcgggcacggcgacctcctcagctgccaggccagcctctgatccccgagagggtcccgtagtgctgcaggggaggtggggacccgaataaaggagcagtttccccgtcggtgccattatccgacgctggctctaaggctcggccagtctgtctaaagctggtacaagtttgctttgtaaaacaaaagaagggaaagggggaaggggaccctggcacagatttggctcgacctggacataggctgggcctgcaagtccgcggggaccgggtccagaggggcagtgctgggaacgcccctctcggaaattaactcctcagggcacccgctcccctcccatgcgccgccccactcccgccggagactaggtcccgcgggggccaccgctgtccaccgcctccggcggccgctggccttgggtccccgctgctggttctcctccctcctcctcgcattctcctcctcctctgctcctcccgatccctcctccgccgcctggtccctcctcctcccgccctgcctccccgcgcctcggcccgcgcgagctagacgtccgggcagcccccggcgcagcgcggccgcagcagcctccgccccccgcacggtgtgagcgcccgacgcggccgaggcggccggagtcccgagctagccccggcggccgccgccgcccagaccggacgacaggccacctcgtcggcgtccgcccgagtccccgcctcgccgccaacgccacaaccaccgcgcacggccccctgactccgtccagtattgatcgggagagccggagcgagctcttcggggagcagcgatgcgaccctccgggacggccggggcagcgctcctggcgctgctggctgcgctctgcccggcgagtcgggctctggaggaaaagaaaggtaagggcgtgtctcgccggctcccgcgccgcccccggatcgcgccccggaccccgcagcccgcccaaccgcgcaccggcgcaccggctcggcgcccgcgcccccgcccgtcctttcctgtttccttgagatcagctgcgccgccgaccgggaccgcgggaggaacgggacgtttcgttcttcggccgggagagtctggggcgggcggaggaggagacgcgtgggacaccgggctgcaggccaggcggggaacggccgccgggacctccggcgccccgaaccgctcccaactttcttccctcactttccccgcccagctgcgcaggatcggcgtcagtgggcgaaagccgggtgctggtgggcgcctggggccggggtcccgcacgtgcgccccgcgctgtcttcccagggcgcgacggggtcctggcgcgcacccgaggggcgggcgctgcccacccgccgagactgcactgtttagggaagctgaggaaggaacccaaaaatacagcctcccctcggaccccgcgggacaggcggctttctgagaggacctccccgcctccgccctccgcgcaggtctcaaactgaagccggcgcccgccagcctggccccggcccctctccaggtccccgcgatcctcgttccccagtgtggagtcgcagcctcgacctgggagctgggagaactcgtctaccaccacctgcggctcccggggaggggtggtgctggcggcggttagtttcctcgttggcaaaaggcaggtggggtccgacccgccccttgggcgcagaccccggccgctcgcctcgcccggtgcgccctcgtcttgcctatccaagagtgccccccacctcccggggaccccagctccctcctgggcgcccgcgccgaaagccccaggctctccttcgatggccgcctcgcggagacgtccgggtctgctccacctgcagcccttcggtcgcgcctgggcttcgcggtggagcgggacgcggctgtccggccactgcagggggggatcgcgggactcttgagcggaagccccggaagcagagctcatcctggccaacaccatggtgtttcaaaatggggctcacagcaaacttctcctcaaaacccggagactttctttcttggatgtctctttttgctgtttgaagaatttgagccaaccaaaatattaaacctgtcttacacacacacacacacacacacacacacacacaccggattgctgtccctggttcaagtgtgccaagtgtgcagacagaacatgagcgagtctggcttcgtgactaccgaccataaacccacttgacaggggaaacatgccttggaaggtttaattgcacaattccaaccttgagctgcgcgggttccaagagccaggcccgtacttgctgttgatgtcattggcttggggagttggggtttggtgcccagcgcggtcgttgggggaggggcaaggcatagaacagtggttcccagaccttgctgcacattggaattacctgggattaaaaaaaaaaaaatcaaaacaaaaaccagtgtctggctcccgcccccagacattctgatttaattggcatggggcaagacctggacttgggattttttttaatgctcttcatgtgatctgttgggcagccagatttggggatcactagacggaagaaggattgttaaagtctccggagatgttacttgccaatgctaagagctctttgaggacatctggaattgttacaatattgccaaatataggaaagagggaaaaggtagagtgtgattccaataataaaggattccgcttttcattgaaggaactggtggaaaggtttcttctctgctgagcctgcaggcccgtcctgcctgcctggggtgcccgggagacgcgggcctgctccggagactgctgactgccggtcctgttagtcaggtgtcagccctgtctctgccgaagagactcttctctttattttaaattaaaccctcagagcaccaccaaagcatcacttttctccctccattggtgttctcattctttgatgttacttgtttgaacaccactattagtagttggagatttgttcctgagaaaaatataaataccacttaatttgcctgtttgtcccgcattcactcaaaacagaatgctcctgaagacaagagagagagtaggagaacagacgctattccattacagtaacataaaagactggattttcaggggcaaattattaaaataggagatgagctcttttaacagaaatttgtttaaggcctgtgtctatcaaattcagtggattttattcaagatgcactttgtttagtgggagttttgtttggttctgggacatgctaacttctagacttgctgctcttagaggtaatgactgccagacaccatttcatgagtcctaatccccacattaagcataagaggtgcacactctcctcctatgggggaaactgaggtacgaagaactaaagtgactttcccacagctggtgggaggcagacgggaaattcacaccaggggcttccaactccagatccctctctcaacttccaaactccactgccttgtccgagttctggtttcaggagatccaaatcaggtgtgtgcaaatgtctaatgtcagagctggcaaggggaaagggcccagggagccggctcatgacgatgagcctgtctgaagcttcaacgcgggctgtccggcagtctgcattcctgccgagttcctcagccctctgttgggtcaccttccatagaggcagcttagtcctcagttcagtgagcatggagtggagactgcttgaggggtgctgagcaaagccctgcctcttacaggatgaaggtgctctccagaagggacactggaaagtattccaaggcgagtcgaattcccaactgagggagctttgtggaaataagcccgcccagccccacttctggagacgttcccattcagtaggtccgagctgtcttaaagagaaaccaaagtggggatattaatggtatccaaagtgagatctaccccaccctccctcctcaaaggaggtcagatcaagaaagcccaagcccggcctggcaattgggacctttcttctcactccagcccagggtgaaggtggacaagtcactttgacccttcaggcttctgagctgttgtttctgaattcagtgaatatttactgagtgcatagaatatgctagatattctgggctaaaggttgaagggggggtgagttttaagggtttctgctcttgcttccagattgctttcaaatctggaaaggacaccagtggtttgtgtgttagacccacactgccgtagcacagaatacaagaaactggctgagagctccaataggcttttaacagtaatttctggcttcacgtatttagtttcataactcatgatttttcaaaaacttctggtttgaagacaccgattgccgaaagtccattgtgctgcataattacacttggtccacgtgacagcactaacatgttctgaaatgtttttagaagtagtctcagcaaagatgaaggattcctccctgtttgaaaagaaaatattctttgttttttctttgatctaagctctaagactagcagctagcatctgaaacttttttgacgagagtgacaaaccaactctaatattaaaggcaattgatgattatgggcactgaagggaaggtaaccccaggctggtgccccggaatag

SEQ ID NO: 48777 - DNA, 4073 bp, Homo sapiens
tggttcctttcccaggtttcttttttgttatgaagtagtttttagactcaagtctcttctgtatgtgttataactgcccattccataagatacagggcagtgaatttgtgagccttgaaaatatttactttagaaatgagaagtatgacttttcaacgttgtgtcatcaacttctgtaaattttccagacctataaatacttgcagaaaaaaaatgaaaggagaaggcaacttgatttagcagttgggtcagttagcaatgcctatggcaagctgtagtaattcccttacatagatttgtaagactcatttctatgatttaaatgaaggcatacacttaacctctttagggtgtgaaacagcttttacaaaaagagacaaacttaagaaacagtgtggccctccaagagtgttcattttccatatcataccatttgtaataagctattctggctgggatttacttgcaagcattggcttttaagaagagatggtttcacacatcaaattattcacttggaggcactttctgggttgaaggaatggaatggagagtgcggcagtgagtagatctctcagtgacggtgatgtgcctctcccagaagaaatttcaaaatgcagtgttcattttcctccacaagaaaggaagaaactgttttgttattgtttattcctaacatagtggaaacttttcagtactctggcagaaatttcccaaaagcaattttctatttcatgattataaagtagcaaaggaaaaagtcctgcactccagctgagcaatggatctccagttgttatctaggtgctgcaggtttagagaggattgccaggagaacacatcgatttttcaggcctgtgatgacgtatctcttgttgaataagtaaacccttccagtaaacagacagttagtatattgatttcagggtggctttagccactgaacctgtaagtcttgcaaaggttacttgggcaaaagcatcattattttaccttcagtcaacaaaaatctacctggccaaggcagaacagaaagttcagcaatttgatgaagtgggacaacatgaagaatcaggtgagttgcctactttttcacttcactttccacctttagagattcttgtttagatgcagagtagtgacgtgcctggtgtcagggagagagttgaatgagaaaagtcccagaagggcagaagacttgggtgattatctgagtccatctttccttatcacatgacagagttcttgaagtcttggctaggaattctaggcttttagattctttgggcaatggctactaaatgttcataatgttgctcagttgcaaaaacaagacattcaaactatagccagggagataagtagtcacgaactcaaggcctaaattctgctgatggagccgatgagaattgggtgctaaggcaaagagagttgccaatattatattcttcggggttttttgtttttattcgcattttggaaaaggaaaatattagcattcctctgacttaatattgagaagacattgggcactctttttcctcccacacttgtcttctttcactaggtgacaagggaagaggtagcatgaggtggtggtcacaggtgagaggggctgttgtgagcacaggcatgttgactgcacattggtcacctagtagaagttttgcaggcttggtgacttctgaacactgttttcaaggttgatttttagttgagagaacctctaggtaccacgtaatgttattaacagtagtactgatctcacaatcgccctatgtcccattcacaagatgttctgccaagccataaaaggcccagttaagtttaagagaagtctcaaaagtaacagatgataactaattaatacccagtgattttgaaatgtagacatcaaacataccaattcagtggtatcatccttagaggcagacagaggatgattaaatcattcagcccatctctgtctgaggacgcagcttagcacagcatggtggaggctaaatgggccttaagggaaaaaatgatatctgaagatgcaatttatttcaaaaagagtttgctcccgtgaattttcactctctatgtagaacggcaccagcacacacttttcctgagcctttgcatgtgtggcaggcagcggcctggcatcctggggaactgaatgaggacgcagatgacccggacgtgttcacagtttgacacatctgactcccagatcagggacagctagctttgctggctggttaagttgatgattccatctttgcctggttctctgactgtctcatgctttctgttattactattttgcagcagatatttctgctcatttttcaatcatatatgcatcctggatggcatagagttgattctcctaacaaatcagtgtccctttgtatttttttctggccataagatagaatatatatgtcatttattaaaaatggagaaaatgttcaggagtttcttgactcagagagggaaaagggatactcagggcactttttcagccaggaatttactacctttgcagggtaaaggggactcaccacgctggaagtcaaaataagccaccagtgccaagtgttcaaagcccttagaatcacaatgctcttaaagcaaagtcttcaacaatgcttgaaaacttccactggttctcagtatgtccaaaattgtcatgtctatgaatgattttctcaatctgaaaatttttatagcaggctaaagaatgagataggtcagtgtgattctagaactaatcattaacattcaatagatgactattttattctagaaaaagcagcaactttctatttactctctattttgagggtaaattctctgtaagtagaaaaagcaaaatgtggacatgggactaacatatgaatatacaaagcaaatgtaccgaaaaaatcttaagacctgccttgtggtgttttttgttttgttttgttttcattaaagtgacttgttagcctcttgctccctgtgaagcacagggaggtgacgtgatgtgcacagggcagactctgccatatgccctggccttgaactcagggccccctggggactgcaggggatgctggccatgctgagcaatgcctgtgggtgtcagtttcctcatctgcagaatgagggtaggcctggtgcttatttcatagggtcgcagaggggattcagtgacagggtggtgtagaggctggagcgtgccccatgtgtgcacgacagccttccaactaggggaggcgggcctgggctctcaccagagagcctgtgttctccatggctacatgactttgccccagacgtccttcccgtggtctggaccctgggaagtcgccaagagccagacaggagaaaggctccacttggctctcctctttggtgaccatcccttgcctccatggcgggactctcaggtgacatcccaccaaccctcactttgcttccctggtgggtctcactttccctcaagagtgttgcttttttgtttcctgcatagtcctgggccagttttgataaccctcttcatttcacttcagaaaccctgatgatttcttcctgtgctctttttaccttaggacttttactatgacgactgtgactggcccatttcttgttttttttctcttgctctgctttctcccccatcatcactaaagcagacatggcaatgatggccatgcacactttccaagggtccagctgtagatcttcatggttccccaggtgcctggaccatcttgtgaggagggaggcaaacacaccctgcctggagcacttggccctttcggcaatgttttggcttcctcaagtgagaaaagaatggatttgtattccccctctgcattattgtttttgttttgtttgtttgttttgttttgtattgagacagagtctcacttttttccccaggctggagtgcagtggcccgacctcggctcactgcaacctccaccttccgggttcaagtgattctcctgtctcagccccctgagtagctgggactacaggtgcccgccaccacacctgactaatttttgtatgttttgtagagacagggtttcacc

SEQ ID NO: 48778 - DNA, 1423 bp, Homo sapiens
acaaacaaacaaaaaaacactggggccaaagaactctgtgtgctgtatcacctaaccacatttcatgacacggctagagaagaatcatgcaaataaaaatttccaacatgttcgtaaactgggaaagtatttcactggggagtgagcagaaaagtaatactataacctctatatctagacaaatgtgaattcagtttcacatataaatatataagtgaaaaaatatataaatataaataatatgaaataatggttatctcaccactttctacatcttttgtgaatattttatagtgctcaaatatattagtgcactagtatatgtacattacattaaataactaatcatttattaggaggatgtgcttgttttttgctaataaagatgataataaaaaaatccttagaccccccctcggtttgttttcagttaggaattagggatatttataagaatatctttaaatgacacatgccttgctctgggacgaggcatctgcatgggtgacacatatgtgttgtgtgtacaggctcccagcatttccagggccctgctcagaatgtaggccttactgattcttacagagttacaagcgctggtgaggttggcgaagtttaggtaaacacagctgggaatgccccatggcctctgggtgactttggacatcactgaactttacccttagagatgcatacctgcatcttttttaccctgatagggccttccatgatgctttcaaagtgtttttgtctgcttttcggttaatagactttcacagtagccaattgaatatattggttaaatgcatctctttatacacagactggattcaaactgaggttgtgtctctccctggctgtgtgacgttgggtatgatccaagtgtcagattactcaacttcaaaatgaggacagagcctttcccttctagggctgccaggaacattgaatgagagagtgctggcagcttagtacaggtgttcattgctcttgtatggtactgtctgtggcacggctagataaaatacagtagccactgattcaaatttcaactgaggagtaaaataaactgaataacttagaaaagttttcttcttttgaatgactctaagaatttaaggagcatgtgagtgttgatggctctaaaagggtaacagagcccaactagctcagttctcagcatgaaaatagtcatatggcacagactcagtggagtgggtgcacttcaataactggaagcacagatgccctacagcagcatcaaagatggcactctaaactactttcaatcctttaaaataaatggaaacgcacatttagtatgcatatgacaacacgaaggacttcgattttgctgatgcaatacagttttacaggattttttatactcaaattagtaaaattctgtattgcatccaaatta

SEQ ID NO: 48779 - DNA, 2418 bp, Homo sapiens
gcacacacacacacacacaccacacacacacacacaccacacacaccagggtcgatgccatctaccctggacttcatcttgaactccttcgagtgtgagtcattactcctttgtgcacctctgctttctcttctcaagatgttcacctgcttgaggtcagttccttgagcgtcttccacttgccatgttcaccacagtgctcaacatgcctgaatgcatggatggcgacttctcagatcctcagtctcctcatctgggtaataaggcattgggttggcgggtccatctggtttcttccagctctgagagtgcatttgctctgtgattcattcgttccacaacacttcaccaattaaagagagggtacaaaaggtgaacatccttggctcccagcagatgctcctcaaaacctgaaaaatcagataggtgagggaagattgaatgaaaggcctcttatgattctgcagcaattttggtggtttaagaactctatggaaaaatcatcagtatttctggaattgaagtaaaatggatagtgagcctctgtgtatgtgaaggcccgcatctggaacatgaaagaacctgtctgatgtgttctagtcaggaaagcaggtagccaatactatttatagaatttacagaaactgaagattttgtttctactgattttcaaaatagtattatgtctgatttttttcctcagaaatatacttcctgctcttctcaacaaactcatttgaaaatatgattagaacatgatagaattttactcatttgccaactgcggttcccatttcacatattgttagaattctgcatggtggctttgccctttaaccactaactgataaatgatgtagttagcttttaaatgtgtggaaaaatataatttcaggttcaaccataggtcagaagtacacgtgttttgttagtctatttgtctctcagtcatctcatggaaaattctcagcttttggtatggaaataattttcttgaaggcaatatttgttgagtgactgacggaatgaaaaacgccagttgcgtaagtgtgaaaaagatctgggtgttttcattggatccaaattccacatgagccaacaacagcgtggtgtggaggctggagcacattaataagaacagtgtcctaaattcaggaggtaatgctctgcccatgccctgtgcagctcagacggtgtgtgcagtgcagtatgtaacccagggcacatttcaggggcccacagggagctgcagcttgtaaggtggagtgcagccaacagagcagagagtcagaatccccgcagagtggttgaaggcacaaggatgcgcagcaaggaagacagacttataggtggtgcgactgccatcctctggtactgaaggtgctatcatggagggagggaagtagattgaccctcctggctccagagtacggaactcagacaaacggtcagaagcttacagggaggccaattttggatcaactttaagaagaattttttaaaagctagagcaatcctaaaatggaatttgctctttataaagttgcgaatgcctcaccctggaattgcttaagcaaagttgggacgggcagttgtgagtaatctcctttccaatccatacccgcaatcaccagaaacgtggacttccctgacactgagcacctcttaattaagcatctcataagtgaacaaaacccagcccttcaaagaagtcactttatttatgtgtgggtctgcagcttggatttcttgataatgttaaataaaactccatctactcttccacaaacacttcaagaaacctaagacttttggccagagtaacaccgaggtttgagagaaaggatatgtgtgtgagaggtgtggtttcattagaacatattatttgacttcatgttgaatcaacacttttgtgcaaaatgcagttttaccagcctctttccttgttttggtcacataatttaacttaacattctcggtacttgattttctaacataaaatgggattgagaggggaattttgaagttcccatggtctgtcctctacattctgacagctcattatctctgcggtattgttctcacatttaagtgaggttagcggaggcagaggcctctcaggcctgaagatagcctctgttttcagggaaatactagactgtgagatctgtgacactgaagcactaagttcatctcacaaaagcaacgtgctctttttaaatggttgatcaaagttactttcaaaaggaagtgttagtttttgttattagccgaaacaagagctgctttaatgtagtatatttaaaatcatatctcaattaagatgttattcaaatactatttgacccaccaatctcattactggatatatacccaaaggaatagaaatcattctattataaaaacacatggctgggc

SEQ ID NO: 48780 - DNA, 3455 bp, Homo sapiens
gtcttgtagatttattagcctgaacataatagattttttttaagcacgttaagtcttccatggactaaaagaaaacttgtaaacctaagagaacctctatttttgatatacaaaataatacatttccttaaactatgatcttgatactagaattttaattaaaaaatacctgcagtttatatgcaaagttatagattaatgcttaaaaataggttgtatgtagtatccacaggtcatgtttgactgtcaaatagatgtaattttaattcataataattgtgtcgtgttcttccccactagaagccaattatgcaagcttcaccattcacacatggaaaataatttaatggagtactcattgcaatttcacttatccagaattggctgttgttctcagagcagcttgtgttgccttgttaaggagaatatgttagtatccagacatccagaaaggatcctttactgtttcagagtccattttccccacttttgaaatacacacacaaacacccattcatgcaaaccaaacagagattgtaaagtgattccactgacatttatgcacttcttttttctctttggttcttcaaactctcagtcagtgcgcatttactcttaatttagatacggtttaaacctaattagaaaccagaagctcttgtatttccacaaaggattatgacagccccaagaaaagatagtgaaaccattatataacaagataaaggcttcttaacaatacaaggatggattttctcattgatcttagccttctgaattttagaaattgccatttcaaagtctaaaacaaaggaaaatcagggaataaaagaatggtaagtagacacaaacctactggctccatcatttctgttttagcaaataacctgccacatataccaatagcccaagagatgggcatgtccctgcatttcctggtcaaggtgacaacactgcgtcctcctggaagaggtctgccactcaccataccacaaaccaaatataataaaatcagaaggcacactatagtgaattttttagaggcatgtattgaaaagcatctcaaaaagcattctcgaagcttccagaagtcaactcaagttatctgaaaagtgacacttttgatgattgctcgcttaatactgggagagccagatgaagattcctccccacttcctcagatgtgcaactctggaatttcttagtgttactggagattcctgctgcattctgggcctttaatgcataaacactgagatgttctaaggaaattactccctagggaggagaggggtggacgaggagtaagctttgctggtgactcatgcgctgtgtggaaactccctgcacaagtgagctgcgcagggtgagtctaaagggttaatgcactttcaaaagcctctaatttgttattccagaagagtaatttactcactagaagtatctgggtggctactaacacatttgtgtctttaaaaagatcagttttattttaagattaaaaatataaagcaagagctggaaagtcactaaaaactgacagccagtttcccattttcaagagtatttattaaaaggttctggttgcagaaggaataagaaatggcttgagatcatgacacagtgaatcatgttgtaaacatgttagctatggctgtgaattcaaccagcgatgagttcaagcgtccccagaaggtgttgggggaattagggacatggctgtgtttccccagagaaaagtggccattttactttccctcttcactaacatgcttttgacatgcatggcagagctgaaggcaaggggaaggggacaacatagtaagtgactaagtggcttttttttttttttttttgccaagtgaagctgagtcatatggcctctgtcattccaaaactattctctacggctgcattcctttcgctcttgccttcctttagaaccctggagaaggcctcctgaagcctggccctattatgtatcctgacaaagataaacttttccaaaaagctgcatgttgtttctagcacagtttttcctcgcagtgactacgtgatgaaagtaccatgcagaggaggtgtctgactgaggcgttcgtggtgtgtgacagagtcccctgcacaggacagccgcactcccctcttgcgtcctttcctcccatgtttgcaaagcctctttccctgtcagcagggggtgttctggcagttgacatttctgaaaactacagcctacatttttaaaaaatccagtaagtgaaaactaaaaaattaataccgtggtcataatagtgtggcatttgataactaatgaggcactgtcgtgccagctattattttcagacatttacagtccttttttaaatacaaagaaatatttggtgtgaaatgttccccgggagctggtgcaagcagaggcgacagggcaagggagcttgggttgtagcctcgaattcctccggccagggctaccgtcagcctgcggcacacaagtaaatcaaatataaaaccaaaatttctgtaagcaaatcagtttctaactcactgtaacgaattatctttcgcacatcacagaggcatctcttttcactgtcgagtttggtttgcttggttacaaaaagggcagttcaaaagctttggttgctattgtgaaagtcagctgaattccttccaccgtgctggggtggggtggggttcacgcaggttctcttttgtcaccaggggtgctgtggattcacaagtaagcaagaggctcctcaggtcaagcctctggctgctccctgaggtcagctgcctagcttctcctcctctgagatagacgggaacaaagtctttgatgtgtgcatttctcaagcttgacaatgatacagctacataaaaacccatgatttcatatagatattccaaaacgtaaaagtaaaccatgcatccacagagacatggaattacagaactggatgctgagctggtcacttgggaggcaggcgtccttgccattggtttatgcctcagccccaccatgcagtggctggccaggtgacctaggccagtcctgcatcctcggctcctcacctgcctggtgggacagtgacatctctcctgcagcactgctgtcagggtgagggaggtagggcgcagtttcagaaaaccattgggctgcacctgcgtgagcacagctgcaggagcaaaagtcagaaaggtcagcaaaggatttcaggagcaaaggtcagaagaaaccctcaaggtggttgtgtctgcaggaaagtgctgtcgtctcctgcaatgctttcaagactattcagaagcacagtgtgaagggagagccggagcccatggggaaatgactccagagtgttccacgtgttggaaggcatctgttggaaaacggacattcaagcaaatagttgcctgcatagacaacgcagaatgactgggaaagccccaacaagttacctact

SEQ ID NO: 48781 - DNA, 3118 bp, Homo sapiens
cttcactgtctggaaaatttccttataatcaggatgaaatttctcatgttagcctttcacatttcactacttttagataaggaattctcaggctttgctatatctgactgctcttggaggctgagcttttggctaactacctgactactttgtcgtttctcttcccttggaatgaagcaaatatctaacttctcactcattgtttctgctattttaccatttagtcatctgtgatttttctaaatactgaaagacttccctcaattcaaactatgtgccggatcaaggaaagggcagttggatattgcagacagcatagtgcaattgtgaagagtgtctgcttaccagccacgctgccttgcacaagttatcaagcctctcaacccacttcctcaatctgtaaaataggtatgagtgtaggaccttcccaggggatttttttgtgactatagaatgattctcagaagactttcaggcagtatgtgggtgaggcacatgctggaaaggcttctgcaggtgcagtgatcaatgcttttctcagtgtgtacatcccataatacagacacgttaccagaaactccctagccaggactttgattgcagctcacattttgtatatggcccatagggaaatgaagtgtgtattttttataaagttcaagtgttaacttaatttggaatttactatcaaatctcagttgttatgggcatttatagctattaatacttcgtcccatgtgtcccatgaggaaaccaaggaacagaaattaaagttctttctggagtcccctgaatctcgttcctgttcttttgcaccctgttaattacatagagacattcacagctcttctgaccttatcagcgttaaggaaaacagaaaaccagcgtgctatttgttctgtcccttagtcaagccttctcaacatatatttttcttccaagattttgcatgtgcacagggatgcctatcctctacaagaaacacattttaggcaaattataattaaaatgctgtttacatctcttcacctttagaatttaaagaatgatcatttcttagattgcatctcagacacacccttcccctagtctggagagggcgaggcccatgggtactgcaaacagcctgacgttgtcaggggcggtctcaacggctcattcaccacatctgcctcgcgaaggctaagccatgtgctgttacccctgctgcgctctggctcattctaaggtacacgctattaaccttgtgagaaaacaaagaggccagccccacccttcctgctcactctgagtcacggtgaaaatgtttcaggatctcgggttcgaccatgagtcctgtccaggtccaggaggaaattcggaaggaccacatgttcactctgagatcccactttcatttccctcctggttgagcagcattaatactctggctagatttaaattctggctttctccagttagaactgaaagttatgacaatgtaatcaaaatagaatgtgggtttacagctggccccctggcctggtttgtgaacataaaacagaaacagaaagtgtaagtggtgacatcatattctctcattcaatgtgaaaggccaccgaagtctttccagaattatttttgagaataatatgaatttttaaaaaatacctaattattttaaatatcgtcttgcttgctccccaaatacctactgttttcaacttggatatacgacatgattaaagaatatctaatatttgggaatgcatactttaaccttataaactaccactgtaaatagacagactcattaaagtgaaaggacattttaaatcaattagtaagcaaatcaattaggtggcaaagacaagattatttttccttatggtagttgaagaataatgcttaacctgtcattctaattaccaagcacggtgttctctttggaagatcatttcaacaaaacattattttcatccagaatttgaaccttgagattgcatggtattttagaaatctattttagaaatctttggcaaaggttactattaaaacaatcacattcatggaaaatcagtataagagcaactaaaataactcacaataccagtaaaatcactttgtcatcttcttaagacttttaaagagcatttgtaagtaactgaatagaaggccaaagggtgtgtaggtagcccagaccatcagtgggcagccagggccagggcaggggccacggttgcagcctgcattcttctaaagggcagagcaaattaaagttgaagcaggagctaaaaaaaaaaaaaaaaatgtttcaaagaattccaccaaccagaggatactacctaggacagtttgggcctaacttatctgtgaaggcctccagcttcctccacaccggtggccacttttcattcactctgaacccttctttgtatggaggtcattttattaattgagctgtgaccaacatgacagaatttcctgttttagggcttttataatatagatagtttatatctaatttcagaatatattcactggggaatggacttagcaaccactaccacaacaatgcaacaatgtgttttggaacaaatttaccaatctgaatttccccctagattaggtcacaggaacattgcagctgatgtacagctatgttcctcctgaaacttggagacacatcctcttgagctgggttataatgggccacccaaagctcgagttcctgtaatggatacactcaggcagcagaacctaccaccgtagtgaggacagcacccagagccctcagaggccatcacaagtgcaccacagctgccttctctggcacgctcagagctacacagtgtactctgggattggaactctttatttttttttcagttgatttgtaaataagattgcacaaaaatccatgcacatcaactctccaaatcagaatttgctgagctaaaaagagcattaaattagatgggctggctttcaaggggtgggggtgcaatagtggaactctgcacaacagttctttacaaagagacaagcaagcacatcgcgtggaaatttccattcaactggaaatgtccaagcctgtttacctcaattaattgtccttgttcacttgtccagcctagca

SEQ ID NO: 48782 - DNA, 1110 bp, Homo sapiens
actactattctttgctgggtgtggtatttttaaactgagacatcagtgtgcctagcacagggcctcaagcacacagaaaaattccttgataataattaaataaaatttcagcaaaaaatatcatcttaaggctgtgaaattatcttcctgtgtggctaaaatagtgaataaaattcagcgcaatataaatcatagtacaatttcatcactaaattttctgatcttgatcttgtcattttacattggaagtaaaaatgtgtcctcctttttttctctgacagtgaaaagtgtgtgtgtgttgtgtgcccttttgcacaccctgcctcacacttgctggtctaattccttccagcatgattatgatataattaaatgacagaaatgtttacttccaagtggaactaagccagggtaactcagggtagggcagctgcttgcaccgaaagaccaagactgctagagaactaggaaacaggcggtgcaagaactccaggctctcatggaagagcgggaggcttctatggggctgcagaaactctttggtgcttggggaaaaaatgggttaaatgctcttaaaaaagaaacctgggagaggtagtttccagatgcaggcccgtcttttcttttaaacagaggcagctccgaagagctggacattgaaccctgagcaggaactggaggccgtcagcgcagctttgtttggcgagcggagctttgcaagggtgtaatgctgcaccagggagacgctatctgcagggaccggtgacgccgtgggtgtggagggggaggcagtggctggccctcttggggtaaggtacgcccaggaacagtttagaataacgtgcgcgagtcaaagggaagaagaagctcctgcagaccttctgggcactgtgcagggtttgctcctgtccaccgtgccgtgttcctgtcctggggtatttgggtgtgtggcgtgtggggaggggagaaggagcaaggcggcagggaggggatgaggaccaccctgtccatgggacaggccctgggccccgcacacaccccaagccccgcgtcccgcgtcctcactgtcctgggacaccccccaccccaccccaccgccacagcccagag

SEQ ID NO: 48783 - DNA, 842 bp, Homo sapiens
agagttgaataagttgagaaatgtcatgtcgaagctattggtggaaagagttccattaattgacaatacaagtccctactacattctaaaatctggtcctgactagtggcaagccgggcccaggagtagcacttaaacaatggcaggcttgtgttgctggcaggatacttcagcctcagaggagctgtgtgcagctggggagactcacactcagaggatttcaaagcagagggcatctcgtagagcaacttatccaaaccctgacccactgtaaacacacacacacacacacacacacacacacacacacacacacaccctgagagagagaaagagagagagataactaaagagagagaactaaagtttggcaaaataatacatgctctaatgaaggtttattaatgattaatctactcctagcatttcctagtccactctatctccttaaaaaaaaattctggttgcagcccactaacttgattgtacagctgcttaatggatagcaggctgtaattttcagagaactgtttaatgcgggctacctctgttcttccatgctgcttgtggttcctgctctgctcaggacagaatggggaggaaaacaggctctgcggcacaatattggcaagtgaaattttgtaaaccggccctcccttccttttgcatttggtctgaaaattcaattagatgctgagtcctacaatgtatttgagaagcccaggagtgccctagaggatgagactgggtggctccctgtcaggttgaacatttgccttaattactttggcaagatttgcatcagtggtattagtccctgcctcacttggaggcctgcactt

SEQ ID NO: 48784 - DNA, 893 bp, Homo sapiens
tgatttcgaagcagtggggagtcagacaggagcctcaggtggcctctcctgagaggccctggaaagtgatgagaacctggcctctggcagctcttcataaacgtccatgttttccctctactctctcactcttttcccagggcctcaaacagaagatgaaaatcaatttctaaaacagccctctgtgtgctctctcgtatctctccttttcacacatcgtggtggtggctttctctgtgttcctctgttgattcagtctctggaattaacggatcaggattccatgcccagaatgctacaaagactgtgcttgagttctcccacatctcactcaattacacagaagtttcagattatgtaacagatgctgtgctgggttaggcagagccatctgacttgttttgctttattttagaccatgagatgggtgagtttttctttttaatgccacattcttttaagaattaaaaacctccacttggctgtcagcattggaaatcagagtgatggtgcaagccctgatgaggacaatgtccttgtctatgaaaaggtgaaatcattgcttgaaatcgctaagcaggacatgcagtcccagatggaggggggaattcgggagctggttggaaaagagtatttggcactttgcagccttgagaggtgcagaagagacaccgaggggttcaccaccagagccaccattgtcagagaggcgtccagctgtgtccacctgggactctgccttcagggcttcttgcctggctgggagctgcacaggcagactcctgggacggtgtgccgacagctctgggcacccccttctaggatctgattcctgaggaatcacaatgtggatttcacaatcacttccagtgtcttttgccaacctctgtgaa

SEQ ID NO: 48785 - DNA, 665 bp, Homo sapiens
gtactatactatgtataaaaatgtgaagaaacacagaacagctcatgaacacctccactgctgtataaaagaaccatcttttttctggctcctattggatgccttagaaaaatctgtatttcctctttagttattgtgtttgaaagatgaagttgagacaaaagttctattctttttaagttggcagaacttctgaaaggtgatttttagctgcagtgtgactcattccaaatgcagaaatctctgaccctgagttagtctatttgtcatgcaagagcctagaaaagccctgagtgataagaaatggccataggccattcccacagaattttcaacaaaaatagaatcatgcttatgttctagtcatgacttagaacttataactcatgttcggaactgtccatgttcacgcacaggggccgtatcactccgccagagctgccctgggtgccggtgtgcagaggggtccgagagtgactgtctcttcctctgttgtcgaatgtgtgggttatctccataaatggctgccatgagcatccttgttcacacatttttaggtacttgagtgagtgtctgtggaataattttgggaagtgaaatctgtggtcagaggtttgtgagttttacatgctacattttcagaagttgagaaatagcagtaggct

SEQ ID NO: 48786 - DNA, 3995 bp, Homo sapiens
ccaaagaccagagtggtagaagcaggtggaccagcctctgaacacatttctcccccactccccggctgtgtggaaggttgccacctttggggtagtcattcaacaaacacgtgtcaactgtccactatgtgtcaggccaccactgggcactggctgtggctagctggatagacaccatttctgccctccagaaatgtcatgtccactggcacatgacaagtcactaagtcattcagagccatgggtgacagctccaggggccgacaaaggagctgtgatctcacagatccacagagaagtgtcccagggcgggcgggaaccaggactgcacagggaggggtgaagtgacacataagaagtcagcccatcagcctgaaatgctcccccaaatcttcccattcagtgttttctcagtagcaaactcgtgggaaaattggttattttacttaaaaaactcatactagaaagctagtttaactttaaaaataaattttaaaaacatttttattaacaaatcctacctttcctccaaagtcaaggagaaaagaatagaagtgaacaatggaccaagtaagcctaaaactctgctctttcccctgctcattttacagttcaagtgccattcaatttatcctggcaagaagaggaaggcatcatcaagaccttaattttctaatacatctgatctgagaagaatgtgaaagctataaaattaatttttgatcaataactacaggccttttgagagagtgccctcctaatgaattgagtacctatttctccatacacagtgtctatcatgacctacaaacccttttcccatgaggtgtaacagagagagattacagccttggaactggatgtcagactctcctggtttaagacaataagccatgacatagagcctgaaaccaacacaatcttccgagtggttccagaaacatataggggataatgttggctctgatgctgtacatccccaacaaccatcaactatttggaaactagaatttcagcataattggagttggtgttaccctagcaaatgctgtgggaagagagtctcactgtgtatcttctcctgtttaaagcctgaatttgttcagaatgtaatatctctgtttagccactctactgaaactgatctaggaaatgttcaaaaaaaggtatcccaaggatccctttgtagctacatctgtgggattcccctcgctctggcgtggcctggcccctctgcatttgacaatacggtcctatgcttttgtcttcctgggctgcgtgaacccaccctgccctggttcacctctcctcttgacccatccttatcagtgtcttgaaaggtccttctattggaggacacattctgttgcagcaggtgaccactgccccaaatctgtttcacctccccagggccatgggcacaaccatccctggagtgtgttagagatgcagttggccaggtcctccaaaatctcagaatctgcatttttgcaaagtcctgggtaactcctatgtccatgagagtttgagaagtactggtctcatgagttcctgacatacaaatagtgctgaggccagtatgctgactgggtagccagatacaagtgaaaaccttcctgttttttgcaaacctggatggacccgaggccgctgacgtgggccaggacaagctactctttttcagtgtttctgttgcatcgctgtgtctctctgtgatcaggtgctgccctccctggcaggaggactgcagacaggatgaccaagagcactctacacagcctgctctccagtgttgggggacgccacccaccctcgtggttcctgttcatctgcctacacgtggagggcccaagagggctaatatgtgactatctccacttcctggtaccctgtgtgaataacttcacttactaaagggatgttgagcaactttattaataatgaagaaagcactttggtttgacaaataatcactccattttttcatttgaaagttaactcttgttagtagagaaagcaatgtattacaaccacaaggacgtttacatggaaatgaaccatctgcaaagcatcccccattttccttttaaatcagccaatgggtggtggtgggagaaatattcaccagagtatttaacatctatcccccttcctagactgtcagctccatccgggcggagactgttggtatctccacagcacacacagggcctggcacacatccggggctcagtgagcacttgctgaatggtgaacagattagctctcctgggaacgttgttgacacatctcataacactggtttggagtggagggcattcatcgggctgcatattcctatttttaattgtattctccactggttacagcacctacagttataaagacattgttaacattgcttataggaagacatttgatggaaatgagtccaaaggcattacggttagaaactggccaggtgtcatttttgagagattagataactgttttccggtagagtgaattgcctgtttgttgcaagttgggactttgctgggctggtttacagggccaaggggaaagagataagtggatcttctagtgagaggtcatctgttttgaaagcctggaagattccatgaactaaatccaagtcttacaacacagggaagtgtgtcatactgtgcagggatgaagtctccaatttagcatgaaaacaagagctcctcacactgtcctcttcagaaagcccatacaatccaaacttctgaatgcttagctgcttacaaccatacatagattgagggataaaactctgatatggaagagaaggtaaacattttttggcagacattcccaggaaaaggcggctctcttctctcattgctgctgctctttcagaatccatttcaacagaggaggagtcaatgggagccccgtgcctctggcagatatcatatggcgtttcagtggcattgtgtgttacccttcttaggtaacagctcagccattagaagaatgtcctacacaccttctcattttctgtgatgagaggaatgtgaggtactgcccttcgagagctgtcatttgtcctagtagccagcagcgtgactgtgctgtcttctgctctgtctccctgtcagccttctgcccagccaccaccactatagttttgttctctccattggaactcctggttcagagaattaccataaaaaacagacccctagacatacaacactctatcacataatggtgactttgtcttctattttggattactgagctttcttgggtaacttccactaaatcgaagttaatattagaagaacttcctcttactagaatcgaaaagcatttaagtgatgcagtcaagtttgtaccataagtaattcagtcatttaacaaatatatatggcctctgtgcgacagtgaccttgactgggaatgaagctgtcccatgtggggcctgttcttcaaaggcagttccctgctgcccagttcagtccagtggatctgggcatctctctttaatccgcattaggggctctttactgattcttcactatccaaaaagacttggaggggagacctgagcccacttctggaaggaaatgataacaatttatttagataatctttgtgcaacaagtcaattcactgaagagatctgctctctaggagcctctgtgaccccaccataactgggaaggctctacctctccagtcttcgggccacatttctctctggcctgctgtcttcccagcactctcagccttgctcatggagcactctagtcctccgtcgaccttggcctttggtaacgtgatttttcacctggcagctcccatctggtctcactccctctttttgtccagtctgcatgacacagcctcacatcgttagtgttccctcactcccctcttactgcccaacctgcaaagtccatgcctgggccagtgcagcatgtgtcctcaatgggctgctggtggcagtggggggaaccgcacag

SEQ ID NO: 48787 - DNA, 6232 bp, Homo sapiens
tagctggggaggcctttgcagaggatgtagttgtgtggagaggccacacacgtggaattcccaggagggctgtggaggcggggaatctgcaggaaagcactggggtgagaaacgtgatgagaaacaattattgtcttaaaatatctgcagggctgtaaggtagagaagcaatacgttgcatctgtgttaagtcaaacaaaattatcaagggactggtttcagcttaacataaggaacaattatgtgatagggttgtcaataacaagagtagactgcttcttcacacactcctagtcactcagaatggtccaggaggagtggacaaccatttggtagagtatgggaaggcaggggccctgggtgggagtggtgagggtagggagtgagtatcccaatctagaagtaaattgtgcccagcacggagctgcaacactgccctgcacacaaacacacacaaataacaatccccagcccctgcatttccctctccggtttcaggaccttgtatcttacttcaattcctttatttagctgatgatgaaataggaagagcttagcactaagaaaatccttttggagtttggccttgggggaaaatgaatcactccaaccaggtctgtcttctagaaagtataggatgaaagggctcctcatcacatacttcctgacctcctgctaggcctttccctaaaacaggggctggcaaagcacaacctgtgggtcacgcctagcctgccacctgtttttgcaaataaagttttattggagcatgactatatgtatttgcttacagtctgtggctgcgttcacactatcccagcagagttgaataattgggacagggaccatatgatgggtgaagctgaaaacatttactctctggctgtattcagaggaggtttactgagcccttctctgagacatggcaagcgctgcttcaggctcatgcttcactagattcaggcctggggcagtaaagagccagctcaggatagcactcccgactcactcattttttcaggcaggggagccatctaatgtcaagtgcctacgtgcaggaactggtctgttaattagcagctctcctcatggaagggataatatattctagaaacaggagtgcggccctattgcaagaatgtcctgagccaaaattaagattcttctatggcagaaacttggctggggcttctcctgagttaacttggtagttgttagtgatttttgagtcagtttttccttgtcaacgaccccaggaatgagtttgggattacagggtagccagggaaagggaaagcttcacgcccgcccccgggacaaggtctgtcttcacactgctacatcccttcacccactttaaaatgaaacttaaaaggaggatttcagttgagtaggaagtgagaagagggctcattttaaaacaagcgttaaatgaaaacccacacacactcagagcacacaaatccaaccacgcttacaaaaccatcacagagggtcaggcgaggcccttttctaaatgaaaaagaacaggggtggagactgttctgagagcatgctgggttccctgaagggaattctcagctgtatgtgccccgcacaggatccctgctagacacaaggccagctgccttcctttcaagccgcagacgcatccctgtgtccaggcgggctggtcagctgcggtcagcaccagcttccccgctccatggtgaggtcatcacaacatgtgagcaggagggcaggccggcaacctctgagtgcttagagaaagggacgggattcctcctgtgcaacccctctagtctcactcagactcaagtctgactaaggggccaggtgctttgaccagggactctcccctctcacttccctcccaggagtcacaggtacatgagtccttgttttacaaatgaagaaaacagacccaacatgattaagatgttgccttcataggggtggcaccaggattccaaaccatggactccactgagcccagtgcccactgacatgtgccagtaacagtgcagctgcctgtggttctgtcgactaaactgccggcagaggctggctttccaccttctttttttttttttcactcttcaaacactttatgacatgaacataaactactggctgcatcgttctgctgacaacatgacatgtttctataacttgaaaaaagcaagcagtggactgctcattggtaaaattgagtcagtaatcttttaggaaggttatttttcttccttttactgcttctcatctgttccccgcagtaaagaggacaagatgacgacgactcagggaacacctccagcctgaagcagcaccatgcgagcttagaccttagggtcggcttagaaaccacaggcggggcggcttgggcccctcggacactccctctcgaagctgcttctccccaagctaccccaaaggcactgagcgccctctgccccccagcaattcaattcactggctgtcctgctcctgtcagtactgagagttgcatgtttgaccctcgggggaaaagtccagaggccctggggtgtccagcatgctctgaggtccctgctgctgaccccttgcgctgtcagcattcagagacattcacacagcacagcctcccaggctaacagctgtcatggaacagtggagcagctagacgtggccattctgtggcccagtgctgcagaggtcaaagggacaagcgcagggagcatctttgctttcagaaaaaaaaaaaaaaaaaagaagcacactggtgcactgacctgctcctggtgtctttgtgattgctcttttctttcgatttttggttgtctttttttttttgaaagaggggcttttatgcttttttcctaatgttcatgggtaaaccaatgtaaatgtgtgtatgtttatagagatggctttaaatcgcaattctgcagtagagattgattttttaaaaaacatgggtaaaaattgaagaaaaattttaaaagaacatttaaaccatcttgggctaggggtggatatgcaccaccccacggaagccaaacaaaatctctctgcagataaacatttgcaaaaagaatttccaatcccaatttttgagtcagagatcttttatttccttgcaaattacatatctgtttcaggatttttgactataagaagaatgaatgaagatgtgtttcttacagataactatgaacaaaccaggaaggataataacttgtatcccccaattcgaatccagaggatgggaaggcataaaaaaaagaaatggaagaaactttatttttagtggtaaatggtgggactatgtattttacgtatggtgaagtcaccaagcccaacacttggcacttgtaggcaaggtagtcttctaatctgaatgtgaagtattatgttttcatttgcttggtaatgaggaatattggtgctttcgtcccagttctcgagctgactgacttctctttctgacgtgtgttcctttagcacacctctacactgcatggctctgagatgtcctgtgactgtttcatgtgtaaagttgcctccccaaaggactcacatattccttcagggcagtgagtacttctgattcatccttagcagctaccttcgcgctactttactagatatgttgtagttgaattaatgaacaaaagaacaagcaactttggtgcctggtgtgcatctcagagcagggtggagtgagcctggccaaagggtcatcatgcaacctctgtggctgactccatctggccacggagcttctcagccatgcttggtattcacatgacttctagggcgacagctcaaccagcaaataaacagcttcatatgggaaatattactcagcctttgtcatcaaggagtgagtcacgggcctgaactgaatagaagatagaggagaaaaggtgtgtggactgggtgagacagcgcccagcgaggtgaactcccggcagccctgcctgtctttacctgcacatcaccttgctagggtgccttcggttgtgagggcctgtctaggaagagaagagttgcaccctggcaggcagcactgagctgtctcatgcaaagctgaggaagaaagagtgagctgcccagtgagcctgctggggtggtggaggctgggctgggctgtgcagtctgcagcccccagcagcccttggcacctttctactgcctggtgctcaccagctctccagtaacaaagagggacgtgaagtcagaggggaagggaggtagcacagggcagtcttgactttgaacaaagagctggcttcctgaagtcagctggccgggttttgaagccgattttccagcagtgatctttgatgccaaccccatttaggaattctgtatctccccctaccttctaccagatgtctctgagctcacctttggtgataatcatgcaatctccgtcatccccacgtccacactgccccattctgtcccaccccgggttctgtggtgctgtcggctccccagcgagccaggaagggagaggccagctctgctggggctcctgccgccctggctctgcactgcccttctctggcaggtctgaggcgccactggaggagccacacggccctgaagcagcaaggcagatgccctggacacagtggaggcacagagtgcaagcaccggcctggcccacagacttttggaggggaagtggtattattcagttcaaaagtatgcctgtgtgtaaagagagagcccctgaacatgagtaagcaaaagtctcagcgcagagattagacaagtagaatgctggcccgagaggaggcgtttactcaccctctgtctaggaaggaaagccaggcccagcacgctcactgctatctatcctctcacacagagggattttgaatcgaagccagcatcctgtcctttctccaatgtcccctgctcaggagtcaggactcagcaaggcccaccccagccacacacagatacagttccaggactcagaactcagcgaggcccaccccagccacatgcaggtccagttccaggattcaggacacagtgaggcccacccgagccacatccaggtccagttccaggactcaggattcagtgaggcccaccccagccacacacaggtccagttccaggactcaggactcagcgaggcccaccccagccacatgcaggtccagttccaggattcaggacacagtgaggcccaccccagccatatccaggttcagttccaggtaaatcatctgccttcctccgtccaaaagccttgtttcctgtgtgtccttgtgtttaaaatggaaacgttatgagaaactgcctgccagggcaaagggtgctgcccggcacacagtagggactcaaaatgaaactattgtattgaatacataacagatcaacgggtattgctttctgaaatcttttttagcccaattttgtttcttatagtccaataacaggtcaaattcatttctgatttactagccattcagttgcccataaaaaatggaaagtgatttaagattattagtttaaaaaccaatgaaggtaaaacagttatcattgaaggcacataggcagaaatagattgcaatagttgctgccatgtgaagcctcagtgtcatgctccatatttagagagatctatgatttctgaggccctttcatgtccatgatctcagtactgctcacaactgccctgtgaaattcgccgagctggccccatgtcaatcagagtacactgagcactgagacccagcatgttgagataactggctagagatcatcccataatggtaccatcacaatcttcacactgtagaagtttgatgatgtcactggaagcatattccacagtcccttgtgaactggccttcctgtgatcagaagcatcagtgaactcccaagagggtgggaactcccaagaggtattctcactctacttagtgtatattttacaaatcacaagcttggctttggattcttttaatggctagaaggagaatcatggggttggaagtccaccagtttgggtattctgttccctaactcaaaataaagagatgttattttcaagtcttctgcttgttaacttaattagagatacatgagtttgcagctgtgctgggcatgccgcagcttggcatgtttagtccagaaggcatattataatgtacatggaagattgtcagaaattcaaaaggactttttgagtatcacatgtgtattttcaagttccaatatagat

SEQ ID NO: 48788 - DNA, 1237 bp, Homo sapiens
aacttgcaagctgacgtccttgattatttaaaatgaaagcagctgcctgttttcatctctctgcatcctgaggaaactcttctgcaacgtgttccagccctaggttctagctgaccctgttcatctgtttggcacgaggggcccaactaacacttgcggctacctggacgacagccaatctagttggaatgagagttagaggccatagtctgtcagctgggaaagcagcttttattccaaggtgtgccaaccgaaaggccacatgttattgtcacaacctggtacctacatcagtgctgacatctttaagaaccttagaattgggaaatcagtttagccctatctgcatgtgtagccgacaaccacacaattgttccaacttgaggttgcattcagagcaacctcatttcccccatactcctgaggaaaagcagaccagagacgctgggtcaatccagagttatggttggaaaaatgatggaataattctgcccctggtgataggagagagggactccatcttgtcaactgtcatggttcccatgtgaaagctatcattatcactgaaattgaatgagaacacagaagggaagaacagggaaatccccacagagttaaagaggatgtgaagattgcttcatgtttaatgtttgtgtaagtgctttgggttggttatgtgctgtctgaacatgtgctcatttccatggctcattgagagggcagacagtccaatgatactctttagaatcattcccatggggaaggaacaaagaagcctgtaaaatagaaatgcacatgtaaaaagcattgaagaaagtgccagtgtattgattttggccatggtttgtgctctaccacctggttactgtgattgcagaagtgcctttgcagatgaggaagaacctggccaaggctcaatccaacatccaaagccagaggccatatttcttcactcttaagataatttgggttcaaattatagtccctttacacactctctgcctcaaaaggcccaagactctcttttgttatgcttgcctaaacatgcctttcaaagaactagttctgtaaatacaactttattataaacctctcctttgcttttaaaaatggatcaccacgtccatttctatggtccaactttgtcccttaatttaaaattttttcttggattaagtttgatgccttgaaacattaggaactcaagcatacaagattgtatgctggtggtgaggga

SEQ ID NO: 48789 - DNA, 1022 bp, Homo sapiens
gtaggcaatggaagggaacgcaaaacagatttctaggtgtactgtgtgtgtgtctcccacgtctaaagtctgttaactggagcacccaacaggccccacaggctgccttcacacagaggacctggggcgcctccgacccattggggtgagcagtgggccatggagggagccagggtcaggagacctggttgtgggcctgacctgaccctgctcagggtggcctcaggtgggccgttcacctcgtcagcctcagcttaccctctgactacagtgacctcagacaaaatacgcttcctggccctgtccagttctgactttttataaacaagcacttatccaagttaaagggatattttcaatatctactgagtccacagatattaaatatctcctctcttctttaaaattgtggcattatctttagaatataaaaggaaaataacacacactctccttgaaaatagagagcctaaacactctgcaggaaatatttaaagctatagtttttgtttgtttgtcttgaatgcaagtggcctggactttgacttgctttgagtctttgaccttcatgacttcagtacagttcaaccctgacagttttgaagtaggtatgtgcctagatctgccctagtccctgctggaatgttgaagaagcaaaggtccaggccctcagagcacttgccacgtacttgccaacagatacggggcggagacttgagtcaacgtaagagcaagtgtgtgccgggtgatccgacactgcagagcgccagctagaccctaagcgtgtgctaggggctgaccaagccgttctttcctcaaaaacttggtggggagggtatttttaaaatcacacaaatatttaagtacagattatgatgactgcctcaaagcagtggctcttcagcttcatcaagcttcagagtccagagggtttgttcatatggaaggctaggcctgtctcctgcatttcaccctcttggcctgggggcgggacccaagaatgtgtggctctaaaaggttcc

SEQ ID NO: 48790 - DNA, 2137 bp, Homo sapiens
tgatcgtgtgagtcaatattccttaataaacttcccttcatatataggtctatcctatcagtgctgtccctctagagaaccctgactaacatagaagagttgtgaaaatgaccgttggtctgccctcaccctttccctcttgtcctttaaccgcatgcgctcagtgttaccttccgtggcacctgctcaccgtcatcccgtggtgactcgtgtgggtaacttcatcagagaagaccctgcctgtcacctcaggtacagcccacgaagtaaggtggctgcaagcgcagatcctgcacctgcccaaggtgaaacaaatcagctcccggagcctgaggtgcaaagggcaggaagctccctgcgcacccctgcggccccagcgcggctctcccagtcccgctgcctcccactccgagcccctgccgtctgggacccgctccacctcccgctcccgggccctcggggcatcctgtctccattcgcagcccagtgccctccactcccacggcctcgggtacagcttccacagggaaatcacccacatctgtgtctctcgcctcgttcccagtcctgaggccgacgcatggccactgagcacacagatccagcacagcgtccctcgcctttcccgcgccccgggcagaggatgagcaccaggccagccctgcagctcacgccggcagccctgggctggctccgcacccgcgcctcgggcttccacggtggacccaggagacaccctctcgcccagcccagcttccctgcgggactgagagggagaagggaggagtcggggagcgaaggcggaggcagagctgggctgcgggaggaggcgcgacggcggcaccggcgggatggagcagcgggatcccgcggtgaccgggcggatggagtggccgagagcgccccctgccggccaagggtcccccctcacacactcccggtgtggccgggaaggcgggagccgggttccctgccgggaaggcgggagccgggttccctgccggtggagccggcggctcagccgggccccgcacgcaccggccccgcagggccaggtccccgcctccaggcccaccttcggcgctcgcaaacgtccgggtggctgcggcctggccaccatccaggcctcgcccaccggcagttgcccgggtccacacagggacaagctcggtctccgccgcgtcccgcctgagcctcgcccgcgcccaggggactccacgctgcacagggagagggccgctccgtgtgacaatgcaagaagggcgagctctcttttccacctgtctcatctcagtgtgaacggcgccctggaaaacagaactgttcagggacttctgaggagctcggccaacgctcttgcctccctacattttcccgaaatctgcctttcaaacaggcttcctcttgtcacagacgaacccatctccacgttagagtgcatcgtggcgtttcctattttcataaaagccagcgccctggaattgtcagtctgttcttacactgtgagtgtaacggccctctgttaaatctcagcaaaccctcgcgcgccagagaggccagccccagagcccgcgccctggaacgcggcggaccgcgggtgccctctgcgggtggcgcgtggcctgcgcagcgatcaggtcctcaagtcccgaagccccagtgccagcctccgaaaagctggcccggcaggaaggagcccagttcctgcccactgccttccgacgtcctgtaagtggaccccgcttcccgggcctcagtggtctggtctggaatgaagagtctgagccaggtggtcccaagcgctgccgggctcccacattttctgacaatgaggtaatcagtcacgtgcacttgccaaggtttgggcaccagactctttgacacctggtgtagactcagcaaaatcccatgagccactatgcccttcagatcaatggactatcacctacttcattcggacttttcgacctcaggtgagactggagagaaacctgggacagaggagacagctggctgagattcccgttcctgcgtctgaaggctggagggtatggagagtccctagacagtggcactcacgcctgctgcgccctgtgctgcaggttgtacgcgatataaaacatgacactgactgccc

SEQ ID NO: 48791 - DNA, 2617 bp, Homo sapiens
gctcaatcaacgtttactgagcggaagaaaacggaaataagacattttcctcaaggagcagaaatcattacacgtatttggtccaaacaaataaaaataaagagaaccaatgaagactgaagtaaaccacatcacgattacataaatgtaaagatctggttgcttgtgtcctttttataatacatactatgatctttgccaattaacactggaggactctttctggtcgataaaatgtttggataattaagtatgctttcattttatgtcccggtatcaaagatgtccatttattcaaaacaaagggagtgaacataaaacataaaaagaaaaaaaaaaaggcctgtggctcctcctcccagacacccccctccaacagtgatgaataggagggactgtctccctcccccatccctcggagactagccttgcagtgttttagactgttttgaaattctgttctttagaagagattttttttttcttcttaatatcaaacaaagaactgctgctattcctttgggctggcgcagcaggggccggtgaaatgcaggctgacgacggcgcgccaggggctgagctcgccccggtcggcgacgcgcacacaccttgagtgacagcgacctcttctctacaggttttccccgcgggagcgtggccctagcgggcgttcggttttctttggaaatcgcggagggggctggccgggcgcagcgatccccaccccgggactccagccccggccgtgcgcgtcgccgcggacgggctctgcgggccacggggaaggtgcgaggaggcgcgagcaggctgtgagccgctgggcgctcccgcgagcccgctcctctccgtcgggagcagggcaaaggcgccaggaacagggcagaggcacagcgcccaccgcctctgcggccgcctgatgtgcgagcagcccgcgacgaggcagtgcacgctcagacgccccgctcctcccgccagcgcgcggcctcgctcctcctagaggacgctctctgcgcgggccctcggaggaggcggcggcggggcgagctgcagcgccgggacaggaggtttgtccccgcccgcgcgccgtaccgcggcggagatgggcgagaccatgtcaaagaggctgaagctccacctgggaggggaggcagaaatggaggaacgggcgttcgtcaaccccttcccggactacgaggccgccgccggggcgctgctcgcctccggagcggccgaagagacaggctgtgttcgtcccccggcgaccacggatgagcccggcctcccttttcatcaggacgggaaggtgagtcggcggcctggccgcagaggcgccggagggggagcgcggcggtggtagcgtccaccttccgccaggcgtgacgtcacaggcgcgcgccgggcttgggagggcgcgggatgatagcgcctagcacctgtctccgggccttcccgatgagccgcgcttagggtccgtgggcttcagctgcatgaaccacgttccagcagttcggccctcctggccccaacgcgcctttgaaatacgcggacagtgcgctttccttcttggcccgagcggcgcttcgcaatgcgggcttgtgcactcgtgaggcccgcggacacctcccgcccctgcgcggcggagcgctccgccggctacctgctcctcagaagtggcctggaggctggatttccttggccatatctggtccctgggctctcgccgacaaagaagcattgtccgtactgtctgtgtgcccagaaatgggaagcgggtgtaaggggaggccaaacttgactttcttagtgtcgcgaggtgggtcagagcgttacattgacataaaacagattaacaacagaaaaacatacatctcttgaatatgttttacgtgaaaaagacacaaagaaatggcaaaacccaaatacttttgtgctaggcagaaccaagagcggcagctgtgggagagtaaagtgtgcggggaggctaatggaagatggaactgcttgaaccacgtctaggtagaaatctccgccttgctcggctctggtgccgagtgtttctttgttcctggtgtagggaggccatgttttacaggagttttctcttgtttcatgaagaaaagggggcagtttagagcactcttctgtttttcaagtgcttttagcttaaaataatccttatgccagagacatatttttgggatggcataccctgtcacccttcacgggctatctgaacagaatctaacgtgggaggcaaaaagtgggaataaaacagaagattgaatatcagcacaactgttttcatgcttggtaaaaccgtacctttaccaggttttctttttccactgaggtacgtgttccaatggccacttcacctccttggatctccatgtatttcatatttggctaaaactaagaaggtaattttgaaagagccattggtctgaatatggaatctaaggcaagtgacttctgtaaacctctctcttcttgaatgtggttaaaaactcgaaacaggccgggcgcggtggctcacgccagtaatcccagcactttgggaggccgaagcgggctgattgcttgagcccagcagttcgagaccagcctggccaacatg

SEQ ID NO: 48792 - DNA, 849 bp, Homo sapiens
atatagatttgggagaagaggggtacctggctttttaggaggtgtgagccccatggaaggaaatcaagtattggtattttaacaaagcaaagcaacaaaacaaaacctatctactcctaggttcacttgccatttaatcatttcctttactactctcttaggagtgtagtcctaatccaccaaagaagagacaaaatacactataacactaagatttcaaacagttgaaacaagttttgcctaagtcttaaataaccagatagttgaatgaattctaattttatgtgctttttttgttttccaggtaattgatgttttgttagccatgatacaatgtaaaagaaataacttcagagaaaataatttgtgtttcatttttgtttgtttaaagccggcagcaaaagtggaccaagaaaccttgacagaaatggtgaaacccagtattgattatgtgcgccacaaaaaattccgatctgggaattacccatcatcattaagcaatgaaacagaccggctggtgcactggtgccacggcgccccgggggtcatccacatgctcatgcaggcgtacaaggtcagtgcttccgccgtcacggccgtcccctgtgtggggagccaggtttccctgtcaggttttgggtcttgctttggtaaggccatttgactgtacactaaaaaccttttagaatgattgtttttacaaaataaagtctctgtattttaccactcatcaccactgtcattagtgctgcaagtctgtgtgtgtgtatgtgtgtgattgtgtgtgttaacagggtttatattcatgtgtaaaagaaaacctagatgacagagcagtggtgagatgat

SEQ ID NO: 48793 - DNA, 491 bp, Homo sapiens
attcttccttctattcacgttttgagttctagggcattaggaatttgtgtgggtttagccactgtaaacaaatacatttgttaaatgagattgtatttggaaaggtaaatgcaatgtccaaaaaaagcatataatacccccaccagggtgacacgagtgcagtccttagatgctgaactgaatctggcagcagccacagcatcactgcttgtgcccacacgcctgccctgggaagccccagagagaactgcattgggagtgccccctggtggccaactattgtatatatgtcagaaaatgctttcatacaaattctgttcccgaagcttgtttgcaagttgattatttgaaacatggaatgtttttctaggggtatcagaattacttgaaaagtttttttaagctatactttttttcctccttactcaagattctgataccttcttaattttaagcatcacttaaataaatgtaccatagtttatcattgt

SEQ ID NO: 48794 - DNA, 2896 bp, Homo sapiens
atccaaaatgaaccagaaaaacaaacaaacaaaaaacagaagtttagaaactacactagttacaaccaccagcttggaaatgataccctggtgtggaaaaatacagctcaaagcaatctgagggaggctcctcccctttccatggaagttttcatggcttctggcacaccctgtcagcattctcttcccaggaaggtactgggaagcactgccacgtgtactcctctcattccttttcactactaccaaatttcacaccccctcaattctagtaatatgcattttcattaaatctggtaatatttaacctggagtcaaaaagcaatttcttgtgcttagaagactttctatttcttgtcatgaattgattggttataaatgttaagggactaagctgttacagcaaatttggggagaaagagagtcagttccacgtgctgccccaaagcagcatctgtgtatcagaaaatcttcagggagtctctggcagtgtggaggcctaagctaaaaccaggaggactgagaacatatgtgccaggaaggtgattttgatgccagttctgtctctctcctgaacccaatcaactcaatcatttctgtttaacacaaactcacatgagtgcctcctaaaagctggttcagtcagctgcctccaggtcagaccagtgaggatggaggccggtcactcagtgttgtctgtgggtgcatgcaaggggcagtgtggtgctcttgaaaggcagtgcccaaggacagcagcagaaatgcccctgccttccccactcaggaagggcatcactgtccacccacaagcagcttccagagccatcacttataaatatttcttctctcatttagatttccctgtgccaagaaaaaaaaacaaaaacaaaaaaacacctgcctgctctgagtcagcctcagagatgaccgtggttgactgtgctgtctgccatctgcttttaaccacgaaagaggaagcagctatgtgggacaccacatcagggaaccttccggacctagggtctcactgcctggaaactcccctgagcctcagcttcttcagatggaagggactctgctaactcaaagaacccctcatactacccaccaaaggaaagtccccatcagggagactagcaagggaggctgaatgtagaacagcactcaggttaatcctaaatccctacctggctttccctcctcagtcatcaacatagtgatggggtgaacttcgatgatgttgtctggggactgaccttcatatcctctgatcctcccagtcttttcttcttaccttttctcgtacccagtgtgtggtgggtgggtagggaggtagatgagtgaaaacacccacaggaaggaggatggcaaaactcagatccaaaagcaacaactctgcctcagtgttgtaaataagcaacagcttttccacccaaaacaactcatttgtgcaaggtcaccagcaaactgtacagctgtctcccagccctgtcagctataatttctaatagctgtcactgtgtcctggcttgttaaaatccgtgaaggaaatcatttcatgtagctttttttttttttttacgagatggagagagaaaagaatggtagcagagtaaaacagcaagtgcaagcagatgacagaaatttctacagacacttaatagacagacattccttaggcctagttcaaatatctaaattccatctggggacttggctgtcaaaagataatcatctcttgcttcatttctcatataatttcctaaaccctcgggtctcagctagtgcaaggtcctgtcatggtcacctgtggcttgggccaattctcacttcccctgaagggcagctgcgtgtagggagcgggggctgcccaaagtttcactctgactggaggtaaacttaacatcatttctgcattagtcatttagagccctgggctcagtactttcccccaactgggtttctgcttttgagctcgctctgcaatttccccaattctgactcaattctctctgggcccagggagctgtcaacagccactcctccccacccatttctccagctgtagccctcttgcaggtgtcctgcccacaaaagaacaccagcatacaacgccatgcagggcccactctgagctggggaccttctgccagttgccacctgggatctctgccaggtgcccagaagaacctcacaccagacatccctacagctgagcgctgctcccacccagtgctctggactttggggaaagtaccaccgcccactagctcaccccagccacatgctgtccccagtgcctcctgtcttcccactccatccacgtggtcaagccttgtctcttcccaggacattcctgccacaccacaaaggaggctggcatcaaaagccagggggtgagcttgctgatgggagaagaggagaacaggaagacacagttgaagagtggtagagcctgcagcacctgccccaagaccactgccacatccaagtctggccgcatggcctctagtgccagggcctggctgggggactcctgacactgcacctgcccctaaacctctcagcagccttgacaaagctcagggggctacgcagggctctgtcatagagaataggaaaggagggcacacagcacaccaactcctgctagaaaatctccaggggctccccattcactgtgggtttctctttgcttccccttgaggtcataattttctttcttctgaatgcaattttatcttcagtgggcttcattacacaaacaagcaaaaagagtggggctgactgatcagggcaaagctcagtgagctcagagggcactggggcaggctccccctggaaaccctgctgcctcactgagggtgaagtacagaccccagggagtgtccttctg

SEQ ID NO: 48795 - DNA, 1816 bp, Homo sapiens
aaaatacaaaaattagcatggtggcacatgcctgtaataccagctattcaggaagctgaggtgggaggaccacctgagcctgagaggtcaaggttgcgatgagccgtgattgcaccactgcactccagtctgggtgacagaatgagaccctgtctcaattaaaaaaaataaaataaagaaaagaaaaagtgaaaaaacggaaggatttactaagcccagctgttcaatcagctcacagatactcactaagcactccacagctctggcctgtgctagaagacaaggactcagtcatgaggagggcacaggtggtgccatctcctgagttacaagacagtcgagggagatgtagacaggatctgacccatgaatgaagatataattcccaggtagctcactaagttgagaatagttgtacaaagagaacacttaagggaaaggcggaattatatgctctatggaccgtgaggtggtaggatgcaagaagttttggcaaaactgaaatgagcctaaatcaatacgccatgatgaactgaatctcccaacagaaaaagggacattaatggaaaaactggagagatccaaataaagcaattttaattaatagcaatataccaatgttggtttcctttttaggcaaatgcagcatggcaatgtaagttattaaattagtggaaactgggttatacagcaactctgtatttgctctgcaaatgtgctttgcaaattttctataaatctaaacttattccaaaattaaaagttgatttaaaaaatatacaaatatattgtgctcccccgccaagaaataagtgataccaccacgaccaccaccacccctgaattaaggctccagctttgaagcacagagcccaaagggaggggcgatggagcagaggccagcaggccgagagctcaggccatgcagagcctgggaggctaagccatgggatcaggtctgcatcctaaaaccaacaggaagcacctccacaaatgggagctacaggccttgtccccagtgcccctgaacatggagaaggacagccttcatttcactgatgagcgagtcagagcagagatgactcagcaacacagctctctcgacccacattctgccaaccgcccagactggcagaaggccatgcaatttgtaatccctctgacctggattttagcagccccaggtcagctgttaagacttgggagaagccgacagagctgtaggagggagtggtgggttgggtcttgattccactgttctcacctaatgccagctaacatccagatccaaccctgtcccacctctgaggctggggacgggggacaaaggggctccaggggttccacagataacaggaccccaacaggactgaggctaccttccccctggggctacatgcattcatgtagaaatgaataggaagagtggcaggcaaggtgggctccaaggctttctaaggttgatgccatacgcacaccaaggctgggagtgaaatttgggctaattaacagtgacatgtaagtacaggaatctttaatttaaacgtaagcctctgcataccaataaaccttgccaactttttgggagttacagaacctcatgtaaacttgagaaacaacaggaatacacctttacagagagctctggagcacggaactaagtatgcccatcatgcaaccctttacttgactaacaaaccagttgagttgggaatgatcgtctcctactagctaccaatagacatgttttgtttggcccatgatagctttgagataaagaaactttacacaaaatctagatattcaatttttcctg

SEQ ID NO: 48796 - DNA, 2786 bp, Homo sapiens
attagccgggcatagtggtgggcgcctgtagtccccgctactggggaggctgaagcaggagaatagcttgaacccaggaggcggagattgcagtgagccaagatcgcgccacagcactcaagcctgggccacagaacgagactccatctcaaaactaaagaaataaataaataaaaataaaaaataaagattgcaagtataggtacacacattaaggtacaagcacatctgttttcatgcgattactggtctctgattcacttctttgttctctatggtgagtcactcagagaatgtgattcctaaggttctaaaattctgaataaatggaaagaatgcaagcagaggcactccacaaaaacattaaataccaagctacggggatatttccgaacagaaacaggaagtctcggctatggcagagcctggagcaaggagaaatttgtccaccagccttcctttcaggaaacacttttcctccaacattttgtaataattactttttaataaagggcgaagacaaactagtaatttccagcaccaatcactaactattaaggaagatagtttcacaacttcctaaaacagaggcatgggattcattacctatttcttttgacttcattaatttaacgcaaatttccttcagaataatgaaactaaggagaaagttgaacaagccctgattcagactggacaccccagaattcctctagttcgcattttaaggaacctgctttagtgagaagtatgtggccccatccgaggatgcaatttcacagccaggagcagccgcggtccccgccagggatgcggtcacgggcgctcgcacccggaagccgctcaacaagttccccgccggcttcggctccgcacccccacccagccaggctctccgcagaatttcctccccgcacctaaaggctgcacttcattttcacacgcgggaacgcctcctcccgctgctcacctccacaactcccggcactcccgcgacacttccccacagtcccctccgcccgctcccctcaccccggctcggcacccatcctttcctaaccccaaactgcccggcgccccgggctctccgcgcctgcgccgcgcccgaggaccacccccgcccaaccccgggtccatccgatcctcggccctctgcggcggggagagggggcggacggtgcacaaaggtcaccccgagctaacggaggcggtcggcgcgggaaacgcgctcacccgcagggtgggggcggggtgcgaaaaccgaaggaacgacggaaggcgcggaccggggcgggagcctccccgtcaccagggtcccgcacctcccagctccgggaggcgcgcagggctgtggctccccgtcgctccaccgtctgcgctcccaggcaaggtcctctggggcgcctcggaactgcgcgcccccagccgccagcatggtgggcgccgcgcctccggcagcacccggtccccggcccctacctccaagagcagcccgagcagcagcgccgccaccttcgcaggctggcgcctcatggctcctcgcgtcctctccagcgcgcccggacgccgggtcgcaggcgcgcttcgcgactcggcccccgcgcggggcgggcgggcagactgcagccgggagccgtcccgccgaccgctggggggcccggctgggagcgggcgggagccggggcgcgccgcgcagccctggctgcgctccgcccccggccgccgcgcgctcccgacacgcccggccgggcgcgcgcctgcgggctcccggaacccgaggcccggcctggggcgcggctgctgggcgctaggcccgcgacgctgaggtgcgcgcgccccgggcgggaggaggggctgcaccgcctggcgaatgggagggggactggcaggctctcccttcccaagggaggtcgtcctgtcgccctagactaaacccaggaaggcttttaaaagaagcagagtctccgcggggggaagcttgttccctgagaggtggccgcagacgaacccactgctcagtctggcatcccgaagccgctccgctcctggctctccccgctgttcctgcgcgcagcgggggcagtgcccccacacccacgcgtgatgggaaggccggcctgggggtgggaaggcccaccgaaatagatggtccccacacctcactgcttccttggatgtggctattttttatgccagtgttctcctgctctgaccctacttgaacttgaccgcaaccggccccgccttgcaggccaccctcccgcagcagaaaactgtgcggagctcgcgctgtcctcgcctccgctgaccccacctccatgtcctcacagacactattttttcacaacacagctcagatcccaccttcttcatgaggttattcaacaaacactattaaacttgtaagatgtaccagatcctgagttggaggctgagaggaggacaagaaaactgctcccgtagcctagagggagggagagtcgcttaaaccacctgatgcagaatgctgagtgcggagaccaggaggtgggtgcatcacagagggtcataaaggacatgagctgcgcagtacaggaggtggaaggagggggtcacacgaacagatgtcacccgaggcaagtccccaactctttcccagctttcaaagcctaatttgattaatatagagcatgcaccacctgactatacctgtcagagccagaacttacaagtaagacagaaacaatgcctatggccttcagtcatgctaaggcacctatctgacaagcctgccaaacgccattgaa

SEQ ID NO: 48797 - DNA, 1294 bp, Homo sapiens
taagctgaaagcttattgtgtgttagcaagacaaatgtttttccagtggggatagaagtgatctcgtcctgtaaaaatgcaaatgggccaggcagggtggctcatgcctatcatcccagcagtctgggaagctgaggtgtgagaattgcttgagcccaggagttcaccaaccccaacctgggcaacacagcaagaacctgtctccattaaaacgtgtgtgtgtgtgtgtgtgtgtgtgtgtataagacaaatgacccctgcttaaggtgagaatcataaccagcttcctatctgattgagccacttcattcccagcgtttcctttctcttttctccccgcttttgactgtgtgtgtaggtcacttgcctgcattctcctttgaagcacctttgtcatcccactgtttccatcattaatgggttaaaatggaactttgacttgtgtccacgatgtattcgtgtgcaaattgtggttctgttgcattgtgagcaacctactagtgtctgacataacctcccttctgcatctctctctgcctggaagattgttttgctgagctcgacttcctgtaatttgtgcaagtttttttccaagaataaaattagaactgtgactctgctttcacctcagtctgatacctctcctgtgtgctctctgtttggtcctgaatgatgtggtggttgcttggcatggttggaggatggggtgtaggctaaccagccaggctgtttccttgagcacaaattataagggcatcagataccactgaaaaagttacaagataaagctgcattcactagaacaactgttaaagttggacttggggttagaagaaagttcttgatgagttgtttggggcaggactggacatgtcctggtctgctcagctgcccctgaggagtaaggacccagagcctggagcatgtgtgttgccaaaggaaacaaataagagagagactgggcttgacctgtagcttccctgcaaaactgtggagtctacatgaatgatgaacatgtatttcatttattcaataaatatttatctgcatctgttttgggccaggcactattctggacatttcggatacagccctgagtaaaatagacaaagcagtggcataaaaggcagagtggctgctgtcatgcagatttcaatctagtgaggggtaacagagaatagaataaataaataaatatgtatataagtgccagaaagaaaaataaattgagtgaaacatttggaaggtaagactgagtgtaattaaaaatacaagggtcggccggacacagtgg

SEQ ID NO: 48798 - DNA, 638 bp, Homo sapiens
gtgtgcatgtgtgtgtgtgtggagtatgtgtgcatgtgtagcacaggaaggggaagagtggagcctggctgttcaggacctcaagttttctcccttcctgtcccatctgcagggtcagctaagaatagccatgactcaagggtcagctaagaatagtcatgactcaagggtcatttaggacacaggaagataccagatgaggaaactctccccaagtcctaaactcattcacaaattagaacacataggtccagcccaggcacagtggctgaagcctggaatcctcccgcttcctgcttcgggagaccaaggcaagaggatctctcgaagtgtgagttggaggccagcttgggcgacacaatcaggaaaagcaagtggccaccaggtggcgcccaagaactgggcccgagttccctgggaggaatctgcacgcagccctgggatggcacagggatgcctcacgggacacctggcctcgtcctggtagccccttgcttgcatttcccggccctggggtgtcctccccgactgcacatgcatgtagagaccattcctccttctccaaagagggatttggaacaattctcacatgacctgacgagggacagtggctgtgctcagggtccctcttttgtcct

SEQ ID NO: 48799 - DNA, 935 bp, Homo sapiens
cgaactcctgacctcaggtgatccaccagcctcaagctcccaaagtgctgggattacacgcgtgagccaccgcgcccggccaataacatcatcatcattatattttgagtttcatcaatatgaaattgatgggaaggaggggtgattccaggactgaaaggaaggcttgtgtcgtcaccatggagatggacagtccaacgcttctaattggcagggacgaagggacgggtcctcggcccgtccccctcgttcctctaggaccggaaaattctgggaaggctcgaggccgcggtccccggggtccgcatagtcccgatgaaaaacagacccgggaaagctggtgggagtcaggagccccggcgatgaggattgcgatgaaggaagcaggctcggagcgccgccagcgcatgcgtattggggatctgaggccagcgtcttgcgccgccattgcggggaggctgtcctcagagcaggtctggcgcgccggtggctggaccggccccaggagcccagtcaccgggcgtcattggctcaggctgcggggccctcggcaccttctccctcccgggtccaccgcggcggcggcggcggcggcggcggcggcggcggcggcgtcagggggcggagcctgccgaagcgccctttgtctgcggaggtgagtgcgcgccgggaggaggcggaggcgggaggcggaggcggggggcggaggcggggggcggaggcggggggcggaggcggggggcggaggcggggggcggaggcggggggcggaggcggggggcggcgggcggcgggcggcgggcggcgggcggcgggcggcggcggcggcgggcggcgggcggcggcggcggcggcggcggcgggcggcggcggcggcgggaggcggcaggtggcgggaggggcggccgctgtccccgctgtccccattcctgtca

SEQ ID NO: 48800 - DNA, 1009 bp, Homo sapiens
cgagactccgtctcaaaaaaaaaaaaaaaaaaaagaaacaaaacaaaagaatgaaagaaaagtccgaaacctcctgcgccactgtccactagctgcgcgcgttaggaaaccagaggtcagcgcccccgaccccgccaccgccgcgggtccctttaagggagagtgggcggggtcctgcctttaactccgcccacggctaaggagatgcacggcctacgagaggggtagtgtgggactgagccaatgcgtacggcgtgacgccatcccgctgcgaccggcgctccccggggcaggtggctgcatagtcttggcggaggtgagtctcgtggtggaggtgagggcaggctccggggtattgctgccgggggaggatttgctggggacccaaggcaccctcgcgtgagagccctgagagcgaatcgcttcgtctgacctcggggttgtctggggcgagggcacgaatcaccccaacctttccgaagcctggtggaatggcttgtgaactgatctcaaaagcagcccaagtcatccgtcgctgggccggggagggggacaccgcggcggccccgccgagtgctacctgggcactgagcctgtggggagaggcgacccagcggggtggagagagataagggaccagtaacgtccagcgtttgtccgtggtattgagcgttctgtgggtcaaattctcaaagcactcctgcgaaataggcctgcccattttgcagaaggggaacgtgaggcttggcgaagttaaagttaccgctttgtaagcgctgtaaagatgagaggttgggtagtggggaacgtgtaagcatctctgaaatggtgattcaagccgggcgcggtggctcacgcctcttaatcccagcactttgggaggcttgaggcgggcggatcacctgaggtcaggagttcgagaccagtctggccaacatggtgaaactctgtctttactaaaaatacaaaaattagctcggcgtggtggtgcgggcctgtagtcccggct

SEQ ID NO: 48801 - DNA, 1473 bp, Homo sapiens
tgcgtccggccccagaatgcacttgttaaagcgttgtggggctttttgaaatgacaatatattcatatactacaaaatttaaaagacattggcggggtggggtgggggtaaacccactgccactgccccgccccaggccctggattcccctaggcacagtgttactctttccttttggagttttccctgatcattgaagttatgcccttgtcccttctgcacccgcgcttctgggcaccgagctcctcccgctgaagtgatcggcttgcactgactgcgcttgggcttcgcgctttcccgcagcggccgggccttggcgcctggacgccccgccgacccccgcggccgcgcgccctgctccccctggcggccgcgccccgcactgcagtggccgcgttggggcccggccgggggaggggtcgcgcggcggcggcgtcagcggcggcgcccgggcggtgggagccgaggcgccgagcaagatggcggcgcgagtgctgcgcgcccgcggagcggcctgggccggcggcctcctgcagcgggcggccccctgcagcctcctgcccaggctccggtgagcagcgccgcccttcccgggaggtgccggggaggggccgccgcgaggcggagggcgcgggtttcccggcgccggtctccgccccggccctgtccccagcgcgggtggctgcccggcctcggggcagtggggccggagctggggtggggccggagctggggcggggtcggggcgtcctcgggctcaaggtcacggaggggacgggccgctctgcggctccaccctcgcccgggaaggcccccgaggcttggcccggaggccacatcctccccgcggcgctggcccggcctgcagggccctgaccggcgcgacccgtggccagggacagggacagcgcgcgcctgaggccgcaggccccggacgccgtctgctgggtcctcgccggaggctgttccaagcctgagtggctgcgtctgccgaggacgttggtgaccctggtctctgaggtgccgggagtagggaataaaagagtaaagcattgtcccgggccagctctccgcggagcgtaggggaagttagagcttggaggaggtcaaatcacttaacgtcttggagttgaaatttaaagccggccgtggatctaaaagtacttagagttatcagcactaagttcaggcgtggggctcttgtttaaacttttttttttttctaacttcagtggattggacgtttggttgtccaaattcatcaccttgatatttgcatgtgctgttttccacattcaaacagcaaagcctatcctgacttacccagagttgctttctcgtattcattgctttgggtagtttaaattacctaaggaactgtgtgttaaactcgccatgggccagggaggtttcagtaacatggtttattattattattattgttgttgtttatttatttatatttttgagacg

SEQ ID NO: 48802 - DNA, 548 bp, Homo sapiens
actttgggagactgaggcgttttgatgatttgagcccaggagtttgacatctgactgggcacaaaaaaatacaaaaattagccaatgtggtagcacattcctgtagtcccagctattcagcaggctgaggtgggaggatcacttgagcctaggaggtcaaggccgtggtgaaacatcatcgtgccattgcgctccaggctggttgacagagtgaccttgtctcagaaaaaaaaaaaaaaaagactgaaagtttgcttttcccacgtggcctaatataattttgctcagaatttccccagcccagtatattacacacctgaagtagtccctgagaaaactagatgtccaggtgaagcaagactttaacggatgtatgggtggaatgcagtgtatgtgttttaagtcttacttctctgtgtggttatttttaagcttacagggatcttcagaccagggaagacatacggaatgcagcatggcacaaacatggctgggaggaattggtatattacacaggtaatctcttaacagccatgaaatatgctttt

SEQ ID NO: 48803 - DNA, 655 bp, Homo sapiens
aggggtggtgcatgttgagatttaaattggcataaagctgcatactttttgtctagctgtttgatttcattttttaatatagtatgccaattttgtgactgttaccatgtgaaagtcctgttgaaatgaacaattgtctgccccacaatcaagaatgtatgtgtaaagtgtgaataaatctcatatcaaatgtcaaacttttacatgtgaatgattttctcaaagaacatagaaaagtcaataaaatcctcttaatttccacatatcacgtttggattttcttttttaatttgttctgagattgacaaacattgctgtgaatgaccttgtcactcttgcaaaatagcttgtcacaaaagattgaaggaagtgaggaagtcagctggcttctggggaaaatccctccataggaacaaattacgaggccctgggcaaggtcatgcctggtatgtgctgagggcagcagaagccagtggcagaagcagacatgagggagagtgtggtgggacacgagctcagaggtcacagggctggatcccttgagtgttggaggccattagaaagaccctagtggccgggcccagtggctcacaccagtaattccaacactttgggaggccgaggccagaggatcccttgaacgcaggagtttgag

SEQ ID NO: 48804 - DNA, 1004 bp, Homo sapiens
cctgagcctaacataatgagacccccatctctacaaaaaaatttaaaaaatagatgaaaaccacttgaagtttttgcaaaacaggccttccatctcagggagtaaaatttctccattgtattcatatgtcagcacttgtgaccacagtgttaagtattcacttggggtggataatcctggcctgctaaattgttaactctctaggaatgcttacaagataaagaatggtgtggaaatcattgcctcgggttccagctctgaatgtaatctcacagctgtcatgaactctggtagggtatttcccagctgttaaagaggacagcagggccgggcgcggtggctcacacctgtaatcccagcactttgggaggctgaggtgggtggatctcttgaggccaagagtttgagaccagcctgggcaacatagcaaaacccagtctctacaaaaaatacaaaaattagctaggcatggtgcctgtaatcccagctatttgggaggctgaggcaagagaatcacttgaacctgggaggcagaggtcgcagagctcagatcgtaccactgtactccagcccctagtgacagagcgagacaccatctcaaaaaaaaaaaaaaaaaaaaaaaggacagcagtttctatactgctgaccttaggactgtgagaatcacatgaggagacatgaaaacaccttgcaaaatgtgaaaataagcactgtgactcatggttagcttttctgaagctgctcataaagattctgagggtcgtagggtcaaaagccatcaggttcatgttaccgcttcctgaggccaatctctgaaatctgccgctctcttgtggccttgcccttgggagcagcagccccagtgggcctccctgggtaccatggagacagacacacttgtctccagtagaagagagagaaatggaagaatcattaaaccagcagttaggcctgcatgcagtggctcacacttacaatcccaacacttttggaggctgagaaca

SEQ ID NO: 48805 - DNA, 1008 bp, Homo sapiens
ctgcctcggcctcccaaagtgctgggatgacaggtgtgagccaccaagcctggccaatttcctcctcttttcattgtctccaccaggagtgactcacaatctatgcgtatttaaaattctcgtggctatagggggaaaaagtctgctgagtaaggtcagttgcttcaaagtaaattgtgtacattagaattccacacacagaaaaatcattgccagagaatggactctggattcttcgtatttggctctaacagggagggagagggcagggccagggtagaagacatgccggtgggaaggtctattctcagattctcagacacagcagctcccaggtcccatccggaccactgccttctgcagctcagaacagaacttctgcctggctggccccagctagttcatctcttggcaagcaaaggaccaactgattaaaaaaaaaaaaaaaaaaaaagccactgctgacaaggccttctcatccctagttccaaagtacaaaagcaagctttcctccagggccagccttcggaggtctgattttggataagaggaaaaatttccttgcccaaagaaatgctttcccaacttctcaatctctgtatctttcaagaggcttctaagatcaccttacttccttcaccttgttaggactgacctcttatcttcacctgtgtaagaaaaaataaaagcctgtacagagttgtgaaggtcatgcatagttgcgagaaccaagcttatttgctttggtagtagggataaatttgttcaggtccccgggcattgaaagagtacaaagtatagccgggcgtggggaggctgaggcaggagaattgcttggacctgggaggcagaggttgcagtgagccgagattgtgccacactgcagtctagcctgggcgacagagcgagactccatctcaaaaaaaaaaaaagaaaaaaaaaaaaaagaatacacagtagattctgaaaaggttctgaatcagaggagagtcaaagaggttccctgta

SEQ ID NO: 48806 - DNA, 955 bp, Homo sapiens
tgatttatttaattcccaacttaaggctgtatcgttataacaatgtatctggtaagtacttattttaaaattctaattctaatgggaaagaagacaaagtcggacacttcaactctgagtttggggattgttccaatcttgcactaagggtgctcctgtgtaggattgcatcattcattcatgctgtttggcaacaggcagctgctgtaagattagacaagtgaagctacccaaaaaataaatcaatgaaaagaaagcctggagattttaggaaatgatctgcctacgcgattaagaagaaatgtagactcagagaggaagcctggaagaggaaaaggaaagtcggcaaaatctgaaagttgggcgcagggaaggcacaagccgggacttaccctgtgtcctgggcctccggggctcctgcggctgcaaccttccggctgcagggggccagcgccggctccgacgctcgggcgagcagttcccagggaggtgagctgtgcagacccagggcctccaccgaacgctctcttgagatctgctgataagcggggtggcttctgatgagttctgcaagtgcttctgtaaactggagacaccagatctgtctgctctgcaaagccgggctgggaggacgatttggccccgccccaggggaggggctccctgaaccagccccctcctcctccgggggctcagcccctgcagtctgagaggtgcacggtgcctgtggcacctccgctttgcagaggaaaagagctcccggaccttcagaagctgctccgcgctgccgccaccaccacttaggataaggataggtgagggaagcaagggactgctgcactgatttagcaattagtgaaatctccgtcggggggcctcttttgaaatccacgtttggcattatacgcttgcagcagtgtaggtcccaaaagaacttcaaagactacttatattc

SEQ ID NO: 48807 - DNA, 2350 bp, Homo sapiens
ttgtatttgttgtatagatggagtctcgctatgttacccagactggtcttgaactcccgggcacaagtgatgcccccgcctcatcctcccaaagtgctgggattacaggcgtgagccacccagccctggcccctagttgagtcattcttacaaagaacatcacgctgctgttaccgaggacttcccattagtcttgatatggcacaatctccaagacacttaaagtataacacaccctgcagtgtgtattatgaattgccatttgtgtggggaaatgattatattcatatgtaagtttataaattcagaaagcattccgaaaattcatagagtacccaggggtaactttgcttgtctctagtgttgaactagaagtgggaggaagatttaattttcactacatgccctttggtgccttttgaattcagaacaatttccgttatttattaaaaataaaatacagccgggcgcggtggctcacgcctgtaatcccaacactttggaaggccgaggcgggaggatcacttgaactcaggagtatcacttgagctcaggagtttgagaccaccctgggcaacatagtgagaccctatgtttacaaaaagaaaataaataaagtaaaataccacgtgttactgaatccctggtatttggcgggacactggatactggaaacaattgtggagctctttggaaatttaccttaaaagggagtccgctcaaaggcaggaatgactctacaagggtgaattttcaaatctgccataggggcctcgggcctcagcagcatccagagccctacggacgggcaggttcttacgtctcaactcccatcgcaccagtcctgcagctttctaaaggtatccagcactttctaccttgcattctatcttcatcttcgctaggcctcacagcaccgcatgattccgggggagggtgcttatcagactcgcgtgtggccccacggcacctagggcaccgtcgagcacacggtccgggaagctccaatgaaacggaacaaaccgcgagatcaggggaggtaggaggcccaccctacgccctgcccccgcggagcacaagccccgcctgcgtcccgagctcccgggtccgcaaagctgggccccaaagagctccaacgccggaaccaaggagcacggaatgccgggaacaagctcctcccgtgcgcgatgacgacaaggccgaggcgcgaagggtgggaccgcaggagccgtgcagccgcggaccaatgagcgggcgccggacgacctgtggcccaatggcggcggcgcgcgggcacgctgggggccggccagacgggccgacttttccagaagacccggatagttcctcccggccacgccgcgccggctctgggcactcagcatcgtttccttttcctccgctggagcagctatggcggcggtgaagaccctgaaccccaaggccgaggtggcccgagcgcaggcggcgctggcggtcaacatcagcgcagcgcggggtctgcaggacgtgctaaggaccaacctggggcccaagggcaccatgaagatgtaaggcggggctgaaccggagggccgggcgggcaccgcgcgccgccgcgctcctggcgggcccgggaccgcggactggagcccgccgcctcggggctgcgcagccgtccttctcggcgtcctccggggtcggtcctgtgtccctcctaagccccaccgtcccggccatttcttcccgcatcgatgcagtctccgcggagaacaaagcggctctagagcgcggcgttccccgccctctggggcttccaggcaccctgaggactcggcacaatctctgcggggacggggtgggcactacacctgtcctccatcctgctggacataactagccccacatccctggctccctaaaatctgggaaaagcccgttttctaatgggacttttagttatcgttgaaaaagtcatagtctggttcatttctgtcctttaaacaggctcgtttctggcgctggagacatcaaacttactaaagacggcaatgtgctgcttcacgaaatggtgagaggtgctctgggctaggtcagaaaggtcttgattttccgtagaatgttttctttgtagaaagatttgcagtgtccattttcaaggtaggagaacattcagaagtggcgtgtaatcagtaatagtcctgagtgcctggagtctgacagccctgcctttgaatccctgcttttttgccattcacagtccgggctaaagggctgtaattgtatattaaagttaattattttaaaacttgaaaaattaagagaggttgacacaatcacatgggcaaaatgcatgaggatgatttttctt

SEQ ID NO: 48808 - DNA, 1993 bp, Homo sapiens
tggttttaaaatttttatgctaatataaatgctcaagtaatttaaaatattgaaagcatccctgttggtataaatttctgagtaaatgcattggatcagttggactttgaacgcctttgaaatggctttgctaaaatgctcccgccacaaagttgtaggaaatgggaagaggagtcaactagaggcaagggagttgagagagctgcaactgtaaagggcaagaacaggcagaggtaaaaagatgatggaaggtgtggtgactaagggccacggttattgggtgaaatttgagattgtaggccaactgtattttcaagcttctgaacttaggcaaaatattcatcgcaaagtctctagcgtcatatttttctcacccaaattacgtttccacgagattatttatatatagttggtctatctctgcagtccttgaaggtgaagttgtgtgttactaggctgtgttttgggatgtcagcagtggcctgaagtgagttgtgcaataaatgttaagttgaaacctcctttctgttcttgcaatggtatgacgcacaaaagcaatcttaaggggaatgaaaactgtccaaaggttcagaaaagtagtgaaggggcctctggaacggccgggaccctcaacgtggttttccttaattccctgggcggtcctgaaggtggtgtggccagtcctccgcctcgctccgtcagtttccccctgctgaactattgggtgcggggcgggtggtggcgcagcctgcgcatgtgcataggggtcgactgccgctgcggtgcatgagggcgcatgcgcagcggggccgtgggtgtacgcggcgcagcgcggcagtcctgatggcccggcatgggttaccgctgctgcccctgctgtcgctcctggtcggcgcgtggctcaagctaggtcagtgaaccggccgtccatcctgggggcgctgggaaggggatggggcgctccgccctgacgggagagagccttaggcccttctgccggcttccgggatgcggctgcagcggcaggctggggaggtagctctcggtgcgcgtggcgcctcaccgccttatacttttcaacttcttgttgtggaatctttcaaacctaaaaaagggaaagagaggccgggcgcggtggctcgagcctgtaatcccagcactttgggaggccgaggcgggtggatcacttgaggtcaggagttggagaccagcctggccaacgtgaaaccctgtctctacaaaaatacaaaaacaaaaaaacacaactatccgggcgtggcggcgggtgcctgtaatcccagctactcgggaggctgagacaggagactcgcttgaacccaggaggcggaggttgcagtgagccgagatcgtgccattgcattccagcctgggcgacagatcgatactttatctcaaaaaaaaaaaaaaaaaaaaaaaaaaaaggccggacgcggtggctcacgcctgtaatcccagcactttgggaggccgaggcgggcggatcacgaggtcaggaaatcgagaccatcctggctaacacagtgaaaccccgtctctactaaaaattcaaaaaattagccgggcgtgatggcgggcgcttgtagtcccagctactagggaggctgaggcaggagaatggcgtgaaccccggggggtggagcctgcagtgagcggagatagcgccactgcactccagcctgggcgacagcgagactccgtctcaaaaaaaaaaaaaaaaaaaaaaggaaaaaggagaatataacgaggaacgacccccgcccccacgtactcggccagcttaaatagctgccagtttgtggccagtcctgctcctgcggaatcgcacactccccctctcctggagccatttggaagtgggtccagacattatcccattttattctagggatttattaagcttgaatagtcaaaccgtttctcacctaaaaaattgacagtgcttcttaataatatattcagtctgttcagattc

SEQ ID NO: 48809 - DNA, 771 bp, Homo sapiens
acctcacttagaccacctgagtctcagcctgacgtctctgttctgcgtcctgtggctcagtcggggaggtgcctttgctgggccggagcatcttgcagtcggtctccttctttttcgcagtctgtactctggtggcttccagtggaaaaggcattttggaggcaggtaagggctgattccgctacctcattttctacccctgcttgactcttattctccaggcccagcctcctctctacccctcgtacatccaggaacactgagtttcaaagaaggataggggaatatcagggaaagcgctcagcaggcctgtttcacctgcccgaatcctgtttcctgttacccatccatttctcccttcagcctcctgtagtctcttttttctgactccgaccactggtcactcacccggctctcttccagctctcttgctccatctagtggtaaaagctgaacgcgggcgccctaaacctagcctgcctccgacttaatgcgctcccggaagcctgtctcacttaatcctggctgtcagcctgcaggtcctggctctggcatccgagagagactggagcacccagtgttacacgtgagctggaatgacgcccgtgcctactgtgcttggcggggaaaacgactgcccacggaggaagagtgggagtttgccgcccgagggggcttgaagggtatccagatgataaggcgattttcctttattcttctccccatcctgcccagcatgaggggctttaaagggtggaaaggggctgggcg

SEQ ID NO: 48810 - DNA, 983 bp, Homo sapiens
ctcacaccaggcttctttccagaccatgctctccccagccctcatgctccctgatcatggccggccctgcggatgaggcaggcaagatgggtaagccctaggcctttttctcaggacgtgtctgtcctctctccccttctctgctggcaggatgggcaacactccagattcagcctcagacaacctcggtttccgctgtgctgcagacgcaggccggccgccaggggagctgtaagcagccgggtggtgacaaggagaaaagccttctagggtcactgtcattccctggccatgttgcaaacagcgcaattccaagctcgagagcttcagcctcaggaaagaacttccccttccctgtctcccatccctctgtggcaggcgcctctcaccagggcaggagaggactcagcctcctgtgttttggagaaggggcccaatgtgtgttgacgatggctgggggccaggtgtttctgttagaggccaagtattattgacacaggattgcaaacacacaaacaattggaacagagcactctgaaaggccattttttaagcattttaaaatctattctctccccctttctccctggatgattcaggaagctgacattgtttcctcaaggcagaattttcctggttctgttttctcagccagttgctgtggaaggagaatgctttctttgtggcctcatctgtggtttcgtgtccctctgaaggaaactagtttccactgtgtaacaggcagacatgtaactatttaaagcacagttcagtcctaaaagggtctgggagaaccagatgatgtactaggtgaagcattgcattgtgggaatcacaaagcaaatagtactccagaaagacaaatatcagaagcttcctattctttttttttttttttttttttttgagacagggtctttctctgttgcccaggctagagtgcactggtgatcacggctcactctagccttgaattcctgggc

SEQ ID NO: 48811 - DNA, 1695 bp, Homo sapiens
ctgtaatcccagtgattagggaagtggaggcgaaaggatcatttgaggccaggactttgagaccagccagggccacataatgagaccctgtctctgctaaaatataaaatagaataaagtcgccaagtgtggtgcacaggtggcgcatgcctgtagtcccagttactctggaggctgacgtggtagaatagcttgagcccaggaagtcaaggctgcagttagccataattacgtcactgcactacagcctgagttagactctgactcaaaatataaataaataaacattctaattaggacttaaagatggtcaactggggaaataatctagtccaattccttcattttacacattacaaaacaagactggccaaagtgactcgtctgaactattataccaaaagcaacttcaactattcctcatctgttcaacgttcagatgctttcaacaatttcgagaccccttctcaaataacaaaagactaattatgtcctgcacgtatttaaaaatcttcatatgtatcacgctccctctgaccatttccggattatttccttgggtgctcttttccccgaaatcaagctaggtcaaaatttatgccttcctaccacctggccataacgttatgcctttcccgttgtttggataggaagctttttccgtaagtgaattccctccccacactcccctaacataggctttacgttcaatctacccccgcctggcagaggcgagcccacgccgcagccgaccttagttcacccccgcccgcggcctccctctgcgtcattgccccagtagagtccggacggccgcgctttggtctcaaaccctgcgatggtctcacctggccggaggggccatgcgggaggtgcggcttcggcttccacgcggcatcctaggtaagcgacggctaggcctccggacgtgggacaaccaccgaagagctaagcgacttctgaggagaccggaagatgggaggcggggctggcctcaacgcgcaaccaaccagcacacaggcagagaacttccgttctccgtcgtctccgcaggcctgaagttcattggaagagcaggacgtcacggggacgcctcgtccttcgcggtcaacgccctgaacttggcgccaggatctttaaaacccggaagttcctgtggttcatccgcgaaccttgtcctccggtcctcgcatcagagcacttagcattttgcttccctagggcagctggcctgtcgctccgtccttcaaacatttgtattaaatccaaccttaagagtgactcacatctctggctggattgccaggggaccttgggcagatttcttagcctttctgagcattcagttataagggcaaatatttttggaggcacagtgtggacgcgtagtatgaactgaatgaaagaaatcggtttcgtcaaaaataaacagagttgaattagttgtatttggtatttctctttcttgtctgtggatccagtcagcaaaagttaaattcaggcagcaataatgttttacatttatgtattactatatattttcagctccttttcatatgtattatagaatttgtgtccagaattgggacagtaaccatacactggtaaattcaacaaaaatttactgtctaactgggttatggagatactgcaccaaatcagataagattctaccttcacgaagttaagtttcaa

SEQ ID NO: 48812 - DNA, 930 bp, Homo sapiens
ctgcttgaaccactgcagtcaccctgactgtccccttcatcctggctcctgacagcccatcctctacccggccagagggattctttcagaaagaagtcagactgtgccctcttctgttcagaacactccatggctcccacctaccccagaggaaagctaagtccttcgttcgacatgcaggcttccatgggctctgcccttcacctctctgagctcacatcctcccatgctgcccctcactcattctgctgcagccacacgggcctcttctctgccatcctcgctcatgccaggcacggtccatcctcagggctttgcacttgctgtttactctaccaggaatgcccttcctctggaaatccccattgccctatccctcatctctttgaggctgtactcaaatatttgctcagtgagacctttcctgccctgcacccccaccctctacttagatttgttcctctctgatgctcccctcctccttccccagcttacttttcaccttagcactcactgccatcagaaacatgatctatttaatttacctatgaagtctgatgcccccttcctcccccactccataatgccagctctacgctggcggggacatgtgtgttctgttcactgttgcatcctaatacattcaggtgatggacgatatgagtcaagtgtgttatcttggacactgatggaggcaagattgtcggggtgagggtggaagcaggagaccaggaaggaggctcctgcaggggccaggtgagagaggtgggattgggccagggcagggaggggtggctgtgtctggatggagcagcaagtggtgtgaggggtgagggaaagagaggagttgaggatgacaccctggtatctggcctgagcatctggaaggatgggggtgccctggatggagatgagctgtggtgggagagc

SEQ ID NO: 48813 - DNA, 1051 bp, Homo sapiens
cctgaggcctgctaaggccagatgctgttccagggactccagaacagcagcgtgtcacacagtctgccttctcgtcactcttgtctcatggattggcatggcagcactgctgcttactgggaaacattgagccagtggcaccactccccgagcctcagtttccccatctggatgacagtccctccctcccaaggcccgtgtgcagctccatgagctcatgcctctgacatgcctggcatccagtgggtgctccagcagagctcgttccttccctgtccagcccctatgctggctgtcccccaggagactgtgctggaagcattattttcaagcctggctctggcgggctgggccatggctctgaaggctgcggggagaccacagtgctatagcagcatcccagctttcttgatgccaggagaccgtggctcaggggaggctgccctgtgtccatgcactgcctggtaaccctttatgcgaaattatgtcatgtcaccccatgctgtttataaacagctctgacgtttcccaagcagggccatgggggaggggcctgcacctagtcctcccaccccccaccccccgatgccaggacctgctggtgacccctcccgttagcccacatcacacagagtaaagtgggtggactggcctccagccagcgctggcctggttgtttcaacacctccaagcatctcgcagctgaccagccctggggtatttttaaaccctggcctcggccaacctttttgtcacattcaggtcggggcttgagtttagtgcatgcccctattcaggtagctgggcgggggttgggattcactggacaacaaacatttaatccagttccagaacctggggacctactatgtgccaggagtggggaccccagggggactccctcacaaagcctgtccccaaggtgctcactgtctggcagggacactgtgacaggtccacactgcgacaagtgctaagatgcaggccaagatggcagtggcaactcaaatatccacaggcccagtgggttacactaacaaatgaagtgggc

SEQ ID NO: 48814 - DNA, 1422 bp, Homo sapiens
tcctcagcaccccttacccagttcagagtgcttgcataataaatgtttgccaaatgcataaatggagatcaggaaggggtgactccccacaaattaccaggttagaacatgggatctgggcttggaacccagggctgtgtacttaagcttccagtgacaggttccatgccgcagagatggcagctgttgctgtcatgatttttagggtgatattctcaacatccatcagcttcctcacccacaggggagagctggggggccaaagagagaggttgggctggctatggcctccagcctgcaggaggtgactcacccatccggtgatgacaggtggcattcctctccttccccaggggtgggggggctttggcctgacataaagggagtgtcctgcttctgggaagaggacaaacaggtgggagagaaggccaggtcactgcctggaggctggcatgtctaggctagagggtcaccaattatgaagtaggggaagcccgggttgggctggttggactgactcctgagcctccctggagtgagagactgaggctctagtcctctagtcctttccctaagaaaacagcatcccaacctctccttcagccggtcacagggaaatctcttgatgcccatccaccttccccttggcatttttgcctgggtcaagagggacttgagccaattgacaaacactttttgaaagaaacagcaaaggtcccacagactctagccagacaggctttatttactttattgatttattttagaaaagtcttaactatataaatgacacttgaatacagttctgttgcagaagactcaaccaacctcctccccagtgagtttgctgcctctgagattgcatttgactgcaagtaaaaagtagcaggcactagggttttgccagatgggagttcatttttttgtgtaaaaagaagtccagacgtgagcaagtctgggcttgtagacttgctcagggacatcaccagtgaccagcttcctggtgtcccatgttggtatgtgactttcaaactcctggctcaagagggttgcttctcagcaaggcaagagggcagggaagggacaaagtgtgtgcaccctgggtctcatggctaccattgcacctgcgtggtttcaggggagtctggggaggtcttatttcacttgggcacattgctgccccattcaaaacttgggaaaaggggtgatgaatgatggcaagtgctagcggcatcagccctggatttcttttgtgctgcctgattcgaaagagattgtaaatgtggttttgcagcctgcttttctgttccgcctaactatgtgtgtagagatttgccttatcattttgatctgctacatggtattccatggcatggatggaccatggtttatttaccaaattccacattcattgatatttag

SEQ ID NO: 48815 - DNA, 1579 bp, Homo sapiens
gggtatattgaaaagaatcagaaaaaaagaaaaagaaaactgttataaaactatgtacaaaatgttatgcactattaaagtcttccaattctaccagttatggagttattggtcttggactaactctcctgaaaagaaaaaaacaaaacaaaacaaaataaaacataaaaacgtggataaaatggcctaccgtgggcactggcaatgcaaccaagcaggtaggacatgggagctacagtctctttgtcagaacacaaagcattcatacactcccgagcagggagagctggaccaggagcgcccctccgcgctgcccttgccagaacgccagtggagctggcagccgagtgtgccgctcccgccctcagagccgcggcggcgggggcaaaaatcctcggcggcgggggtaaaaagccgcggcggcaaaaagcggcggcggcggggcaaaaagccgcggcggcaaaaaaaaacaaacccacaaaaagccgcggcggcggggggaaaaagccacggcggggaaaaagcctcggcgtagggggcaaaaaaccgccgaggccggggcaaaaagccacggcgtcgggggaaaaagctacggtggaggggcaaaaagccgcggtggcgaggtcaaaaagccgcaaaaagccgcggcggcggggggaaaaagccgcaaaaagcagcggcggcgggggcaaaaagccgcagcggcaaaaagcctcagcggcgggggcaaaaagccacgaccgggggaaaaagccgcagcggcaggggcaaaaagccacggcggcagggagcaaaaacccgcgggggtaggcgcaaaaagccgcggcggggggttaaaaagccgcgtcagcaaaacccgcggcggcgggcgcaaaaagccgcggcgggggcaaaaagccgcaaaaaaccgcggctgcgggggaaaaagccgcggcagcaggggcagaaagcagcaaaaacccaaggcggcaaaaagcctcggcggcggggggtgggggggtgcaaaaaaccgcggagaggggggcaaaaaaccgcggtgtcgggggaaaaagccatggccgcggcggcaaaaacccgcggcggcaaaaagccccggaggcgcggacaaaaagccccggcggtgggggtcgaaagccgcgtcggcaaaacccatggtggaggggggcaaaaagccgtggcggcgggcgcaaaaaatgcaaaaagcagcggagggggcaaaaagctgcaaaaagcagcggcggcggaggcaaaatgccacaacggaaaaaagcctcggcggcgggggcaaaaatccgcggaagcggggggaaaaagccgcggaagcgggggggaaaagccgcggcggcgggggcaaaaggcagcgggacaggggcaaaaaaccacaaaaatctgcggcggcgggggcaaaaagctgcaaaaagcagcggtggcgggggcaaaaagctgcaaaaagaagcggcggcggggacaaaaagctgcaaaaagcagcggcggcgggagcaaaaagccctagcggcaaaaagcagcggctgtgggggcaaaaagccatggtggcaaaaagcctaggaggcggaggcaa

SEQ ID NO: 48816 - DNA, 822 bp, Homo sapiens
cactgtttttgcggaatttgcaagtggagatttctagccatttgatgccaacagtagaaagggaaatatcttcaaataaaaaccagacagaatcattctcagaaaattctttgtgatgtgtgcgttcaactcacatagtttaacctttcttttcatagagcagtttggaaacactctgtttgtaaagtctgcaagtggatatatggaccgcattgaggccttcgttggaaacgggatttcttcatttcatgctagacagaagaattctcagtaacttctttgtgctgtgtgtattcaactcacagagtggaacgtccctttacacagagcagatttgaaacactctttttgtggaatttgcaagtggagatttcaagcgatttgatgccaacagtagaaaaggaaatatcttcaaataaaaactagacagaatcattctcagaaactactttgtgatgtgtgccttcaactcacagagtttaacctttcttttcttagagcagtttagaaacactctgcttgttatgtctgcaagtggatatttggacctctttgagggcttcgttgcaaacggggtttcttcctttcatgctagactaagaagagttctcaggaacttttttgtgttgtgtgtattcaactcacagagttgaaccttgctttagagagagcagatttgaaacactcttgctgtggcattttcaggtggagatttcaagcgatttgaggacaattgcagaaaaggaaatatcttcgtataataaccagacagaatcattctcagaaagtgctttgtgatgtgtgcgttcaactcacagagtt

SEQ ID NO: 48817 - DNA, 726 bp, Homo sapiens
actatggcaaccctgacaggtttgtgagcagcccccggtcccctgccgctccgtgagaaatcaaacttcaggcactgacgaagcatgaagccagcatcttaggaagaggtagtgacataattacaaggtaggaccaaccgccctggtcccactgtcgcctggcaggcaggagaggtttgggaacagccaggctccccttgacatggcagtactgctctggacgcggggaggtgtggattagtgggtgggagctacacctggcatactgggagttgtcgtctttgattagcttccagttttttaattgcagggcgaccggattacaatcacagccagcatgaacatggggcggcgcacagtcctgaagaggaaagccgggctgtgttgacctcgctgtgcatgctgggagttgtagtctcttcactgctcccgcccgttgtttcaggcacttcgggactacaatcccagcatgacccgggctcggggacggggcgcagttctcgtgggaggagcggggcggtgagagcctggctaggcaggctggaaacagtagctcttaacggtcccccgcccgttggtggcaaggcggctggactggaatcccagcaggcgacatgcgaggaggcgggcagcccaggagggttggacacggcaatgtggacctcgccgcttccacaacgatgctggctactgatcgcgtgcacttccttgccaaagaaagtgagt

SEQ ID NO: 48818 - DNA, 2043 bp, Homo sapiens
tgctccagaaagatgcccagggagattctgtcctgctgcgtccgcactgtacagaactgacgctgtgcctacgcccgtttcagaagcgtggagtacttaagagttaatctaaaaaagcaaatataaaaatggattcaaaaaaatgatcactgttaagttccaccggcaaagtcttaaaagcggtaccaaagggagtatttaaaaagggataaagtttttccagggaaccctattcagggcagaaacacagacactgtccaaacctcaccacacaaacttctctcacgtgttgggagggaccaaggcgctcaggtcctgcacctgcgttaattacggcaggcaggtccacaccaggaccccggggcctgggaaccagcctgtgtgggggggcagagaagtggtggatgtggctcgcaaaatgtccctttctcctgggacattttctcctctttatcacagtgacaggagcgtctgtgtgcgaggcctgacccagacgccggccatgcagccagcccggggtccaataggtgcatctggggagcaaagggagaccgaaaaaaaggtggttttcaaaagtgaagtgccaggttaccagagactgggcaccttcacatgaggcagcaaacaacggtttaggacactcacgaggaagcttccgtcgccggaccaaggggcagcactgcgcatgtagccaggggaggaacaatagagggtggggctaaaaggagaggcccctcagtgggaacgggtggggtcgacccggcggggggggggtggggtgaaacgagcgttaccatggcaaccctgcggcggaagctctgagaagctcttggcctctaccggttctgcgagaaagtaaactttgggcacgacaagtcatgaagtcggcacgttggggagacaccgtgtcacaatgacaaggtgagatcagctgccccggccaagctgtctcctcgagtgcaggagaggtttgtgaacagccaagcttccctccgcatggcggaactgcactggaatcctgaaagagctcggtgcagaacggccctttgctgggaatgatgggagctgtagtctcttatccgcacccaggtgttagttgtaggtttacaagactacaatcccagcacgaaacaggattgggagtggtacagatccctggagggagacatagcgcggtgcgctactgcagggtatttggcaggagtagtgtcttagccgcttccggccgttggtcgcaaggctgcgggactacaatcccagcatgcaacgggagtggggttggtgaggacacctgggggggcagcgcggggcgcgcctcgccaggcatgctgggagaagtagtttcttcaccgctttcggccgttgttcgcagggctgcgagactacaatcccagcatgcaaggggaatgggttggtgatgatacctggagagggcggtgcgcgcctcgtaaggcatgctaggaggagtagtttctttttttgttttttgcttttttctttgagacagagtctcgctctgtcgcccagcctggagtgcagtggcgcgatctcggctcactgcaagcttgggaggagtagtttcttaaccgctttcggccattggtcgcagggctaccggcctacagtcccagcaagcgccgggctcgggggtggtgcgcagcctcagagggaggagctgggccgtgtggacctctctgcttccaaacctacgctggcccctcagtctgtgccaccctggctaaggggattgagtccggagagggacttgaggggtaggtcggtgctgggcagtgaggagggtgtgatgctgcgaagtgcatctcgcctttgcccaaatcggacgggtctcagcctcactccatctcccgctgctcagctcggtttccctcaaaagcgtcgcgcctcctccagcccagggagccgcctgctctcctaagctgctgtggaactggcctgaggtcccagacgctgtccattgtgctgctgccctctacaccctccagccagagcgccagttcacccgcttttgggagaactctgccg

SEQ ID NO: 48819 - DNA, 1252 bp, Homo sapiens
gagtagttgggactacaggcgcccgccaccacgcgcggctaattttttgtatttttagtagagacggggtttcaccgtgttagccaggatagtctcgatctcctgacctcgtgatccgcctgcctcggcttcccaaagagctgggattacaggcgaaaaccaccgcgccctgccgccctgccgccctgccgccctgcctctctttctaaagctatgcccaaaccccgagcccggagcatgccgggattgtagtcctgcagtcctgcaacctagggactgcgagaggttaagagactacatctctcagcatgtctagctaggcgcgcaccgccgtgtccccagggcttcgcaccgcccccagacttgcgcatgctgggattgtaatactgtcgccttgccaccaacgggctacgagcggttaagagactacagctcccaggatgtacggtgatggcacccgtttggactccgcccctctgcgcgtctagagctgttctcccgtgcggaggggatcctggctgttcccaaatctcgcctgcctgcgaggagccagcgtggcccgggcagctgatctcaacctgtgattgtgacatcacccctacctgaggaagcctcttccagcctgctcaaggttgccgtagttaggtttaccctcccttccttccctcaccccgtcctttccctcatccctgccccttcctctgtcccacgcggctttcagacatgcatagtgcagcccctcagtaaaggtgcagctaatggcccgtgggcctagcagttgtcaggccttttgggagcccatgatgggagctccctggtaagtgaaaccgtcaattaactgcctaaaatgacaataccccgtctctggtatctttgcacttgcctcttcaaagccaccttttcctttctctctctctggactgtcacagatcctcctctgtaccccaagaacaccccattggatttccgggctggctgcttggcctacacacctgggtcaggcctctcgcagggatgcgcctgccactgtaataaagaggagaaaacgtcacacgggaaaggcctgactccttcgtacaatcagaatactcaactgcacagagaagggacccctttaagccactttgggagccacatccaccactctgtgactcccacacaggctggttcccaggtatcaggtgtcctagtgttaacacgggccaaaaggacaaaacaggaccctaggtccttcccaaaacattaggaaagt

SEQ ID NO: 48820 - DNA, 1049 bp, Homo sapiens
acaaatgtctctcaggcagggccaggcccccagcacagggaggactcgcctgaaaacgctgcaggcaaaaacctgtcacccttgcctcattcagcccagtgtctgattacatcttctgtcacttaggattgaaacgggtggggcctggagccctagccaatcagtggcgccagcgtgaaactgtccaatcaagtgcgcagctacagaggaagaggcggcctcttcaatatggcggggcctttgtctcctagcttccgggctctgatcctagttcgcgtctccactgttccatctcctccgttcctggagttcctcggtgactctactatagcttctgttatcctgtgacctgcaggtactgggagatccatagggaggacggcggaacatctggaggctgggaaatggtgagtgcgtggagtgggtgtcccgagaatggggaagaggctgtttgaatccggccggaaccggctgcggtggtatctgggccttctcgcggtctgctctggagtctgcatccccgagtccccgcgggcacagctcaatcctcatttccctccatcgcagattaggggctgagccagcagccaaaacgctacgtcttgttttgtccctaaactcgaatttctccccagctcagatcccttcctgggcagctctgtgccgcaacctcgagtctccctcctccagattgtgtgggggtgttgggagtgtcataagacgggaattctcatttagggtctggagttcctccgtggaagaagcagtgggccgtggggtccctagtccctcctttctccttttaaaaataaaatcatggcccttttttaaatttatttatttttgagacagtgtctcactctgttgcccaggctaaagtgcatttcggttcactgcagcctccacctactgggctcagatgatcctctcaccccagccccccaagtagctaggactagaggggtgcgccaccacgcctattttgttttgtttgtttttgtagagacaggcttttgccatgttgctcaggctggtctcgaactccccga

SEQ ID NO: 48821 - DNA, 1440 bp, Homo sapiens
ggcgacagagcgagactccgtttcaaaaaaaaaaaaaaaaaaatctaactcaaatacattgttttttgtaaagtattacattgggggaaataaaattcttgcttaaccaactataaactgccaagtaccctccgattacataaccagaaaatttccactttgatcttacaaattaagaagttatgtaactgtacctaaccgattattgaatttggttttattcatcatacaccacttaaaagtctttccttcaagcccctcccatggaccacaaattacaaatcatagctgggtgctctacgatttttgaaccactcttctattacatttttaaatatatttgcagtgacttccatgaatttttaatagaaaaaaggagggactgggaccccatggaccaaagcgcttcccatttatgaaccctgcaccccgagttatcggcagagatgcggcactgcgggtgcagagctgcccagcgagggctccaggccaaggcacagtcactgcgcagggaggagacatgacgcccggggtccggctgtcagcccagccgccatcttatggctgaaggggactgaggaccgagctgcgccaaggacaactcgggccgcggattttggagcccagtgcttggagcctggagtcctgccacagccacttccgaccggttccaaccagcccctccccctctctcggggtgtcggaccgcactctcaccatttctaggcttccaggtggtcctggcatcttagctgtgcatctcccaatacctgcagataacggagtcacagaggctgggcctctaggagcagaatacacagagcagtaaagactagacctggagctcccgcagcagctagagacaaaggccccgccaaatcccggaagccgtcctgtccgctccagctgcgtgcctgattggacgggtcccagccccgcgtccctgattggataatgtttagggcgccaccccctaatgccctgagtgacagaatatgtgctcagcggctgggctgaacgtagaaagagtgaaatccaagctgcagggttctcagggaagggcttcctccctgaacggaccaggctcacaccagagagtatttgcatataaccctgcgtataaggtcgtatgcctttataaataatatattatgtggctattcacacatgaaaataatgcaataacaattatttaaaattttccaattttatgagctcctggcttcttgtcctttgagcgggtagcctgacatttttttttaaaaaggcagtcctctgaaattgaatgtgagccacgtgaattctaaattttctagaaggaaaattttaaaaagaaaaaaaaacaggaggaattcattgtagaaatttaattaacccaatatatccaaaatattatcattttaatatgtgaccagtatgtaattattaacaaagtatata

SEQ ID NO: 48822 - DNA, 877 bp, Homo sapiens
agtctgcaggagggactgaggctgtcatgcgtggatccagtccactgttgaaattgtgagtcatatactgagacccaacatataggaagtgttgcctcatacctataactgggaaatgtacaggattgttcattttatccctggacttccctgcaggtgtgactgagaaataaacctctgcccagcctttgacttatttgacttttctgcctcagaccagcccacctatgggattgtgatatgtcactagaccccacaactaggtattgtgactctattctccttccttggcactgtctaaagggggcatatgatatattgcttatccttaaagtcaggtgatgtcagtctcttctgccttggcactgcttatagggggcattgtgacatatcactgggctctacacccataactcacattatgtaactctccattcctgggccctgctcatagtggccattgtgacatattgctgactccgaaacccaggtgatgtaactcttctgccttggcccagcctgcagagggcattgtgacacacctctgcaaacatcaccaaggtgatttgactcttctgacaattccatgtcccaaaaggtgattgtgacatatcactgagctcagcacctagctgatgtgacctttttcttcctaggttctgcctgcaaagaagattgtgacatattgctggttgcaacaccacggtgatgttactttttgccttctcactgccctcagaaggcattgtgatatgttggtggtcccagcttcaaagaaatgtaagtatcctctctggacccttcccacaaagggcattgtaacatatctctgcacccatcaactatttgatatgactctcttctctgacctgggctc

SEQ ID NO: 48823 - DNA, 1378 bp, Homo sapiens
tggtttttctgtttacaagtggaattgtaacatatcactgaacatagcgcttcactgatgtgactcctcttcttcctacgttctgcctacagaggacattgtgacatatcattgggcccaacaccaaagtgacattactcatttgtctcggccttgacctcagaaagcactgtgacatattgctggacccagtaccaaggtgatgtgagccttctccctggatgctgttcacaggagttattgtgacacatacctaaggacccattgtctatttgatgtggctttcctctattacctgaactctgcccataagaaagattgtgatatacctctgggtccagcactgagatgttggcactcttctccttgcctgtgccatgcctacagaaatgaaagtgacttatcactgtgtccagcgaacacatgatgtgactcttctgcctggcctatgcccacaggaattattgtgacatacctctaggctcatcacctaaataatatgactctcctcttttttcttaaatctgtccacagtggggattatcacacattgctttgcccagcagctatgtgatgtgactcttctcttatgcatgagccctgccctctgggccagtgatgacatagagctgggcataatctttaggttatgtaactgttctttctcagccctatccaaaaggagtattgtgacatatctctgagctcttcaccaaggtaatgtgactctcctgcccaagctgcttcctcataaggtattgtgacatattgctggatccagcaataggtgatataaacctactcatctacttgggtctgcctaagaaagaattgtgatgtatttctgggcccagcacctaggtgatgtgattctcgcctcctgcctgtgccctgaatacattatgtgttgtgatatatggctgggcccagcacttaagtgatgtgacattcctctttagccttggccttgcatattttgagtatttgtgacatatcattgggcccaacactgaggagatagaaagatattgcctgtgcccttaccacaggggaccttgtgacatatctctccatctattacctaggagatatggctctgctctttagcctgcaccctgcccacagagaaaattgtgacatattgctgggcccagcaactgagcgatgttactctcttgcttggttcttgcccaaagggagcattgtgaaatattcctggcctaacacccagctgatgtgacccttctgcatgctcccgattcacaggtaagattgtgaaatacaccttggcccagttcacagctgcgatgatgactctgttaccttgaaccagccagttaaagagacactgtgtcttgtaaccaaaacagcatggtac

SEQ ID NO: 48824 - DNA, 737 bp, Homo sapiens
tgaactcgtgatccacccgccttggcctcctaaactgctgggattacaggcttgagccaccgtgccccgcctagactgccttttatatttacttaaaattccagagcactttagcctgaggggctagccacaactcaggtaccaagtgctgggataaataattttcttctgtctggggctgatcaaagtgctcccgccatgggcaatggccaaattctgccttggattacttcctactaaaacagggcagcactgagttccaatgcaaagttcaacaatcccttgctgtccttcccctaagcacacaaattctctctttgtgccacatatttactgctgggaaatgagggataagtggtgtaggaaattctagactgtctttcctaccctcttcagtacctctattttgttaaaactgggtactgtaattactcacctaatttttggttgttgtgaaggtgctttcttgtgtgaatagttgttcaatttggtgttcctatatgggatgattgctagagggttctaatcagccatcttgctccacctctgtctctcttcctttttaccattatgaaatgacaatcttagtctcctgtgacagttgtttacttaatgtgtattttgtctaatataattaagactactttaccaaattgtggttattatttgcatggaatatgtttttccatcctgatactttcggcctatttaactccttagagctaatgtgaccctat

SEQ ID NO: 48825 - DNA, 814 bp, Homo sapiens
ttaggctgtcactcttccttcagtccagcatctgatcacatctcccgtcactcagggcccgaaggggcggggccttaaacgttatccaatcaggaacgctgggctgggaaccatccaatcaggcacgcaactggagcggacagcacagcttccgggatttggcggggcctttgtctctcgctgcagccggcgctccacgtctagtcttcactgctctgcgtcctgtgctgataaaggctcgccgctgtgaccctgttacctgcaagaacttggaggttcacagctaagacgccaggaccccctggaagcctagaaatggtgagcctgctgggtcccacatcccgagagagggggagggtctggctggaaccgattggaagtggctgtggcgggcctcgggccttcccgcagtcggctccgagatccgcggcccgagttctccttggcgcagctcggccctcagtctccttcagccataagatggcggctgggctgacagccgggaccccgggcgtcctgtctcctccctgcgcagtgactgtgctttggcctggagccctccctgggcagctctgcacccgcagcgtcgcatctctcgccgagtgtgcagggacgacgggagaatagtaaagagaagaatcctgactcggggtgcggggtttatgaatgggaagagctttggtccgtgtggttctcaggtcctcttttttcctattaaaaatttatgggagtcaaggtaaaaatattgaagaatttaatcaaagagcgattcaggaattttagagcacccagctatgatttgtagtttgtggtc

SEQ ID NO: 48826 - DNA, 1448 bp, Homo sapiens
atctaccatagaagcctagggcctcagcagcatcctgagtcctaatgacggacaggttatgactcaactcccatcgcaccagtcctgcagctttctaaaggcatccagcactttctaccttgcattctatcttcatcttcgttagtccttacagcaccgcatgattccggcggagggtgcttatcagactagcctgtgtgtccccacggcacctacagcaccgtcaagcacagggtccagaaagctccaatgaaagtcgtgaaagcagcaagggaaggagactgaggagcaaaccgcgcgagtaggggcaggaggaggcccaccctacgccctgtccggcgcggggcataagccctgcctgcatcctgagatcccgggtccgcaaacttgggccccactgagcagcaacgccagaacccagaagcacttactgccaggaacagggtactccagtgcgccatagcgtcgcggccgctgggcgaggggtgggactgcaggcaccgtgcagccgcggaccaatgagcgggggccggacagcccgtggcccaatagcggcggcgcgggcacgctaggggcgggctgggcgcgccgacttttccggaagatccggatagtgcatcccggccacggcgcgcctgctctgggctctccgcgtgccgcgtcgctttcttttcttcctctggagcagttatggcggcggcgaagaccctgaaccccaaggccaaggtggccggagcgcaggcggcgctggcgttcaacattagcggggcgcggggtctgcaggacgtgctgaggaccaacctggggcccaaagggaccataaagatgtaaggtggggctggcgggagggctgggtgggcaccgcgcgccgctgcgcacctggcgggcccaagaccgcagatgggagcccgctgcctcggggctccgcagccacccttcctcgcgtcctcccgggccggtcctgttccctgctaagccccaccgttgcgtccatttcttcctgcgtcgatgccgtctccatggagaaaaaagcggctctagtgtgcggcgttccccgccttcttgggcttccagacaccctgaggactctgcacaatctctgcggggacggggtgggcactacacttgtcctccagcctgcgggagataactagctccatattctcggctccctaagatcggggaaaagcccgttttctaatgggactttttaatttagttttcgttgataactagctccatatccctggctccctgagatctgggaaaagtccttttttgttgtttgttttggttttttgttgtttttttttttgagacagagtctcgctctgtcacccaggctagagtgcagtggcgcgatctcggctcactgcaagctccgcctcccgggttcatgtctttctcctgcctcagtctcacgagtagctgggactacaggcgcccgt

SEQ ID NO: 48827 - DNA, 914 bp, Homo sapiens
caggtctaaccgaaggtggtggtgggaagatcaggtcataggtgtgggtctctggagctccaagcattggccagggttgatttggattgggtcagaaatatacaacgaaaaagggaaaaaggatggcaattgattgccatccccagagggaggggccgagggttcgcccagtcacccacagtggcatccttgcaatgtgctagttagaccgctcctttaagtccctcccgcactggcccgctcggccccgcccctctctggctccgcccctccccacccctgccccgcccatccccacccctgccccacccctttctcccccgggctccacccctcgcgcgcgaccggccgcgcggcgcagcgccacgccgcctcagtctccgcccgccgatccggcctcttcggccgttgcgcactccaccccctccctccgcgcccgcgcgcgccttccccgccccgtccgcctcactccttttggggcggttgggccgcgcgcctgtgggggcggggcccggagcaggccaccgagccaatggggcgcggcggcggcggcggcggtggtggcggcggcggcggaggcggcggtggcggcggtggcggctgggtcgggccccgacgggcggcggcggctgaggtggaggcggagggaggcggcggcggcggcggcgggaagatggcggctcccgtcctgctaagagtgtcggtgccgcggtgggagcgggtggcccggtatgcagtgtgcgctgccggaatcctgctctccatctacgcctaccacgtggagcgggagaaggagcgggaccccgagcaccgggccctctgcgacctggggccctgggtgaagtgctccgccgcccttgcctccaggtagccggcttgggggagtgggccaggagcggccgagcggggcgagg

SEQ ID NO: 48828 - DNA, 864 bp, Homo sapiens
tccagccagggtgagactctgtctcaataaataaataaataaaataaataaatggaggatttaaatatctttcctcatacaaaaaactattcatggtagcaatatttctgacggcctctggcatccttttgttactagctagaaagagaaatgtagattgctttcacagtccagaatgaccctccctaggcctcccgctgttcagttgtgattactgtcaataaacaccactgtgaatactactgttttgtttcattttgttttaatcagagagaaaaggttttaatactttctctgtgactaggtaggctaatgatctacagatctttgagcaggtgtttatttttcaagttcaagttcacttgaacttcagggagtctgagattacaatcagaacatttggttatttccaatgacagttttactcagctggttaacctaagcaagataggttttgttttcaagatcttccctcatcagtttttttttttcccgtatcaaagacaacagtttcaatggagcgaacactggattaagtatgaaaatgtgctctggtcccagctttgattacttactgggaaaacaagcaagcagtgtgtcagatctgttaactcctttgatacacagaggccacaactgctctgctcatgaatattgacagttaagacattttcctatacccttcaaatttgtattagtagaatctcagttaatagaaatttatttggctgggtgctgtggctcatgcctgtaatcccagcactttggaaggccgaggcgggcagatcacctgaggtcagaagttcgagaccaacctggccaataaggtgaaaccgccgtccctactaaaaatagaaaaattag

SEQ ID NO: 48829 - DNA, 398 bp, Homo sapiens
tgtggtgttccctagtactccatccgtaatcttccctttccctcatattctccctgaacactcttcttcatggctatcatgtttagaaccatacttctaaatctgcatttcagatccatctagaaaccttcaggtttttattttgggctgcttattggatggagttatctgtgtgacttggaggtatgtgaaaagtcaacatgtcaaaactcaactcagtcatctgttcttcctcctgtgttctttgtcccttgaatggcctcactatctattcagtcatcctggaaacccgggagtcagtcattcttcctcaattcagccagttgtcagatcctgtcagtcttacttcttcaatcttcggatccatcttcagtgctctaaactgttacagtctccga

SEQ ID NO: 48830 - DNA, 398 bp, Homo sapiens
ccaaggtgggaggattgcttgagtccagtacttcaagaccagccttggcacatggcaaagctgcaactctataaaaaaataccaaaaaaaaaatatatatatatagctgggtgtggtagtctcagctacttcgggaggctgaggcaggagaatcacttgaacctcggaggtcaaggctgcagtgagtcatgattgcaactgcactgtagcctgggcaacagaggaacatcctgtctcaaaaaaacaaaacaaaacaaaacaaacaaaaaggattgcataattctacaataaaaatcttcatggctttcacttgtttgtaaaatcggggtgatttttctctcccaacatcatcgttatacaggggtttcattctatatcttgggcatcaagtgctatta

SEQ ID NO: 48831 - DNA, 635 bp, Homo sapiens
cagcagtcttaagaagtaggcatgattgttatcccaattttacagttgagaaaagaaaggcatagaggaagaaataagttgcccgtatcattctgaagttaactttcttaggtaaaattgtgaccacattaatttcgaaatgttagttgtttagcataggtgaagtcagcaaactttttcagtaaagggcctggcagaaaataggctttgccagttgccgcagccactcaactcttctagtatgaaagcagtcacagacattacgtaatgaatgacattacataaatgaatgagcatggctgggtgccaataaaactttatttacaaaagcaggtagctggccagatttgctagtccctgcaacaagtaattcagcagcaccttagtcttgaagtgccctatgaaagcatctaggcccgtggctgtgcggcagccggcccacaggcgtcttcttgttgcatttttttttttgccaacagggcccaggatttcagctctttaactgacttctttatacctgctcccacctgttattttgttcctgtttctgttatccttatccatgagtcattgggtaggagggtagtttaacatgctctgccttctctgtccttgaaaataaatgcacatattct

SEQ ID NO: 48832 - DNA, 853 bp, Homo sapiens
atgtcgccactgctctcataatgacacacatgcagtaagaagacttttgtaaggggatttgagtacacccaaatgaaattgtgacaggatgtttgtatggttaacatctgatatcagaatgttaaaagtgccttctgtcttaaatctcaaaccaaatattttgtgtgttgaccttgggcagaagaagtgtccttccctcctttcttcaccgtcaggtagaaaacctgcactctgcagaagggtcctgtgtgatcacttaatcctctggttgagaagcagcagtaatgtttttgcttccaacctgattaatcattttatgttgaaaatagtcaatgagaccagtatctcttgagtgctttatttgccttctctttgaagggaggggacgggctctgctctgtaaactcaaatgtgtagagtcagcaacaattccgtagcttccaactgactcagaattgatgcaacgtaggtcttctggcccgaggcaggtatcaagtccaaatcataatgaacttttcaccagtttcaaccagtttcttaaaagagagcttaagtcaagatttcatcaagacttgtgttttcccatgaatgtgaatctttcaatggctgttggagtatgtatgtactgttcttgcattctgaagtagttaaagaactctagaaagtactgattggccatctggtgtctatggagaaagaagtcctcacgtttgagggctgtacagtgaggccatcttgtagcagcgcatccagctctaccaaggcagtcctctggttcttttttctaagctacagtggaaatggcctaatggttaaaactgtggtatacatgacatcggttgtgctaaacaag

SEQ ID NO: 48833 - DNA, 1161 bp, Homo sapiens
ggctattcctgcagacgccctcgggaaccagctgctctgaacgtggtgggggtgttggagcagcagtttctcaaaagtccacacacagttaaagctctgaaaacagcacgacgcacagaaatgatttcagatgcttttcagtagccactttcatgccaactctttatttccataatagaaaatcttttatttccacctttagtgttccctgctagaatagatgaccacaaaacccaggccagaaacgttctggtctgccgtgaacagtccaggaggcacttgttctgctgctgtggaagtcgccctgactcggggaggaagggacacgcaggtggtatcagtcttgctcaagtaaacaggctgttttccaaacattgtgacttggctactgagtggggatacctggtttcattggcaatcttccagtatctctctcgcaaaaggaacgctgcactttttggttgtctctgccgagtgaagatcccctttttattccccagcactctcgtcggtgctacaaaaaaaaaaaaaagacacaaagcgattcagatgtcttctgatgggtcaagttagaaccagtctggagctaaggtaggcactaaatagaaatgtctttttttttcttttttctccctgttgcccaggctggaatgcggtgacacaatcatagctcactgcagcctcaacctcctgggctcaggcaatcctcctgcctcagcctctccagcaccaccatgcccggtaatcttttatttttattttttagtaaagacaaggtctcattatgttgtccaggctggtctcaaactactgggctcaagcaatctgccctccttagcctccctaaagtgctgggattataagcacaagccaccatgctcagccaaatgtcctcttacagtttcaggatgcttgctctgaagtgacaatttatgggttgaaatatttaaataccactgctctgcccaaacacccaggttccctggtgtgttaatttctagttttctagtctgttaggggaaaaaaacccaaaacagtggccaggtgtggtggccaacgcctgtaatcccagtgctttgggaggctgaggcaggtggatcacctgaggtcaggagttcaagatcagcctggccaacatgaggaaacccgcctctattaaaa

SEQ ID NO: 48834 - DNA, 531 bp, Homo sapiens
tctccaaaaaaaaaaaaagcactaaaagtttatcttttatttgcaaactaaggtttacatgctgggtacccagctgtctggtaactgggtaggcagagggctaggggtatctgggacagttacccttgaaaagccttgggcctttctgaagagatagcgcctagtgggagccagggtcctgaccagccacaggtccctgcgtgggacctactcatggagttcaaagtccgccggggctgacgtccagcttggcagcacccaccactggtggtcattaggcctgagctgagcctggtggaggagcacagctggcaacgacctgtcagggctgtgctctcaggacattctctgtccccagtaagaccaccactaaatggaaatgttaaatggaaagggggctttccccaccaaaaggttcaagactgtttcttccataagtgaacacaggcatcgccaagtacttcatcaaatgcagcccttacgacaccaacaaggaggtggcattatccccactggacaggcttatgaaaa

SEQ ID NO: 48835 - DNA, 1571 bp, Homo sapiens
atatttttagtagagatgaggtttcaccctgttatgttggccagcctggtctcaaactcctggcctcaggcgattcgcccgcctccacctcccaaagtgctgggattacaggtgtgagccaccgagcccagataattttttttttttcaattagccaggcgtgttggcaccccctaaattgcaaggctggggcgggagaatcgcttgagctcagaagttaggctggcgccactccgccccagcctgggaaacaggtgcaaacccagtctcaaaaaaatttttaaaaattaaaaataaatattgaaaggaaggatactgcacagactcagcctttacctcgggaaagggctcggcaagagccttttctcctcctgcctaatccgccccggccctccagggtgctcctgttcccccgtcccccaagccggcgcccccaagcccgttgacctttaacctcctgcgggccccagctcggagacgcccaggggaagaagtctgcggggggcccgggctcccctactcccaccgccgggctttcgggcgcctcccggccctgccccgagatcgcacctcccacagcggccgccggtaccactgctcctcgaagccccggcgtcggttgtcagagaagtcggcgcggaagctccagaggccgtccagctccttgcactcccgcgacgggctctcctgggggtacagcatcccgccctgcagccccagcgcgcagccccacaacaacggcccgagcgccgcccaggcaaccgccgacccccgggccatgcttcccggtcccccgctcggccaccgtctgcggcgctaagaaaagcgcgggaggtgcccgtagggcgggtcgcgtgacgcgccggtgtcgtgatgcgcctgaagccatccgcgccatcttggttgaggacgagtgccaggcctggaggggcggggccgggcgctgcccggtagggcttgtggctggaaccccaggctaggcctttggggaaacgggaccctcaccctcagccccagccgataagggcgaggtctgctccccaccccgacccaggctggacgatccagggccgcaggccagaacagaacccctgagatcggtgggatccccctgtttcttcaaggagcacctccacttgcttttcccagcaggaattcaaggaggccccagcggcgcctcttccatgcctgtctgatgcagcctcttgcagggatgcacgtccttgggatgcggccatagccttgaccctgggcttctggagccctgaccttaacccaggggccaagagctccctcttggtgttgcaggcacataaagatgcagggagagaggccaggtgcactttgggaacccgaggggggcagatcacttgaggccaggagttcgagaccagcctggccaacgatagtgaaaccccgtccctattttgtaaacatacaaaaaaaaaaaaaagaattagcggggcgtgatggtgcgtgcctgtaatcccagctactcaggaagctgaggtaggagaatcgcttgaacccgggaggcaaaggctgcagtaagccgagatcgcaccactgca

SEQ ID NO: 48836 - DNA, 1194 bp, Homo sapiens
acgtgaaggaaactgtatcagtcagttcacagagaacacaagttaggtaatacctacaagttaatatcaatcatataaaacccacattcggagtagatgcaaaaacttccatttgcactaggcgcaacgaacaagcacggaaaagaccacgtggagttaaactgtcagaaaaccttttaccctcgcctgtacacacccacacaccccgtgctgtttctccggtcccagtcctggctcacatccttcccttctccacccaaaaactcgccccttccctcacagtgttgactgttcccatcaaactctgagggcagctcttcggagtgagggctccccagggcccggtggggcaagcagagctctacctggacctgattcgtctctcctccacctactttcagggcggacagactcaggcctttacagcctgctaagtcccgggtcggataccaggctgggctccacccccgcactgtgacccagaaacgctggtaaatgaatgagagaaggagggggcacattgaaaggcagccggacacggaggtgctcggccccgcaccccagacacaggttgtggaggttcggaggggcttgagtcccgttcgtccctgtccctatcccggggccctcccggacagggccagccagccccctgccctcacttccgtacgagggtcgcccagtccccacggctctcggctctcagaggtccaactgttaggctcctcgcgtaccaaaagggacgcgtccagactagagtctggacttccatgaggtccagactcgtcgcctctggctgccagcagacaaggaacttcacactctacagctctccccaccgtcgccaacagcgccaaagtgccagctccgcacgccaaggtgcaagccaggagcgccgcgcttcatgccgggagcttggcggactcggaacctcgcgccgcaggttctcctttctcgggggtgggggtgttggggggggtgggggcgtgttcctgtatccttcgcccaggccgacttcagactgctgagcgtttgcggacaggattatctcgtgttttctattgtttgtttgtttgttttgagacggagtcttgctctgtcgcccaggctgtagtgcagtggcgcgatctcggttcgctgcagcctctgcctcccgggttcaagcaattccctgcctcagcctcccaagtagct

SEQ ID NO: 48837 - DNA, 621 bp, Homo sapiens
gctggagtccatggggccttgtagggggacaatcagagtgacagtcacagtgtcccactcaggactgccccttggaccttccaaccaagcaggaaccttaactctgccttaacttccttgggaggaaggactgtgtcctggaggctccatggtcctgagggggcctgctctccactcccaacccagccctccaggcaggcctgtctcctggggcctctgctgtaggctttttcccataaacatacacagtccccagaaaagtgcttgagatagtgcttggcgcttagtaaacactgcataagaatgcttattggccagatgccatgcctatgcctgtcaccccagcactttggaaggccaaagtgggaggattgcctaagcccaggaattcaagaccagatggtgcaacacagtgagaccatgtctctacaaaaaattagccaggcagggtggcatgtgcctgtagtcccagctattcagtaggctgaggcggaagaaccacctgagccttaaggtttgaggttacagtgagcaacactgcactccagtctgggtgacagagggagatactgtctctttaaaaaaaagaaaaagaaaaggccgggcgccatggctcacgcc

SEQ ID NO: 48838 - DNA, 1964 bp, Homo sapiens
acagcacgaacgccagcgcactaccctcctcaaccccagcccaggccccttccccgtcggggtccccccaaccctttccccgcccgcttccccgccccggggccgcttagcctccagctcagcgggaggtatccccgcccacggccaggattggaggatggaggcaacgcccaccccgccgggcggcctcctattggcgcggccgtcgccaggggtggggacaggaccggcggctgctgacgccatcccggccagaaaagccctggccagtggcgggcgcgacactatccgtgcggccaggcggaggtgagtgcgcggcggccggatgggcgggacgggcgtggaggacgccgagcaccgtggcgcgcgctcacgtccgcgtccccaagggctgcgctccctcaagcgcagtgcccagaactcggagccagcccggcccgggggaccctgctggccaaggaggtcgtcagtccggtcttgtcttccagacccggaggaccgaagcttccggacgacgaggaaccgcccaacatggcctcggaggtgagtgggacctcggggactccggtcctcctagcctccaaaggagagagtgggggcgccagacctgcctcgggccaccctgctgggaatcgccctccaggaagcaattttgaaaattacctaggaagcctgcacccccagccctcccgggcgcatcatctggagcccagcagtcacctttaccaggactcaccagtatccgcaggcagcccttgtggcaaacccaccaacccacactactaggggtagagtggctctgccctcacctcacagtgatgcctgcctggccaggaaaagtggctcccaagccttcagccttccaactcttccttccttcttaccacgtgtcctcctgtcaggtcccaccccacaccacatcccttctcctgctagagcaattgtccctgtttatagaataaagctcagcccctaagtgttcttgtccttgactgtggcatgtggaaagagccaggaaaaaggggacgtcgcctcgtggctccagcaaccctggtgcctggtcccttcctgtctcactggaccctgcctcttagggtcagtggctcctggcctctcctcctgaccactgagatgctggattcccaggcagaggttttccttccttgggccatagttgatttatctggcaatgggggtaataatagctgtcggcctcactctgtaaggcactagattatgaggccattgctttggacccttcaggtgagaggggctgttcgcctgatgcttgatgaagggaactccgggaagcaggaggtctgggttccaggcccttttggccttcattagctagcaattcacttcctctttctcaatgccctgcaagctcagtgccctgcaagcttctgggtcatggcaggggggtagggcctggactttggagccaaacagacttggtttctgtaccagtcacttgagccctttaaacctctttcctcatttgtgaaataggggtaatattgcccacctcataaaaggccgtaataacatatgtgaaatccctagcacagggctgagcaacagtaggtgctcaataaatggtggctaaccacaacaatactgatatttctactttgggaggccgaggcgggaggactgctgaagcccaggaattccagaccagccagggcaatgtaatgagaccctgtctctacaaaaagattttgaaaattacccaggtgtggtggcgtacacctgtagtctcacaggaggcggaggcatgaggattgcttgagcccaggagtttgagactgcagtgagcatgatctcaccactgcactccagcccaggcaacagagtgagatccagtttcaaaaaaataaaaataaaaaaacctggcaggcatggtggctcacacctgtaatcccagcactttgggaggtcgaggtgggcagatcacctga

SEQ ID NO: 48839 - DNA, 1405 bp, Homo sapiens
aggaggtggagaaggaggtggaagaggaggaaaggaagaagggaggaggaggaaaggagggggaggagggagggggagaagaggaggagggggagaaggaggagagggaggaggagaaggaaacggcgaggcttggtggcttacacctgtagaggaggagtaggaggaagaaacagccaggctccctggctcaggtctgtaaaggaggaggagaatgaggaggaggaggagaaggaagaaacagccaggcctggtggctctcacacctgtaaaggaagaggaagaggaggaggagcaggaggaaacagccaggcgtggtggctcacgcctgtaaaggagaaagaggaggaagaaacagccaggcacagtggctcaagcctgcaaaggaggaggaggaaacagccagttgcagtggctcacgcctgtagaggaggaggaggagacagccaggcacagtggctcatgcctgtaaaggaggaggaggaggagcaggaggaagaagaaacagccaggaagggtggctcatgccggtaaaggaggagaaggaagaggaggaggaggaggaaacagccaggcgaggtggctcacgactgtaaaggacgaggaggaggaggaagagggagaaacagccaggtgtggtggcgcagcctgtaaaggaggaggaggaggaaacagccaggcgaggtggcttacgcctgtaaaggaggaggaggaggaggaggaggaggaaaaaacagccaagcgcagtggctcatgcctgtaaaggaggaggaggagaaggaaactacatggattggtggctcaggcctgtaaaggaggaggggaggggaggggggaggaggagaaggaagagacggaaactgccaggcacggtggctcatgcctgtaatcccagcaatttggggggcagcagtaaggaggaaggaaggaggaggaaaaagaatgaggaggaggaaagagggaggaagaaaaagaaacagccaagcgggcttggtggctcatacccatactcccagctactccagaggctgaggcagaagaaacgcttgaacctgggaggcggaggttgcagttagctgagatcgggctactgcactccagcctgggcgacagagtgagactccatctcaaaaaaaaaaaaaagagccaggtgcagtggctcacgcctgtaatccatctatttgggaggctgaggcgggaagattgctagaaacccaggcgtttgagaccagcctgaccaacatagtgagaccctgtttttacaaaaataaaaatttaaaaaaaaattaaaaattagccaggaatggtggcacaaaccagtcatcccagctactcagaaggctgaggcaagaggatcacttgagcccaggcggtcaaggctgcagtgagctatggtcaaaccact

SEQ ID NO: 48840 - DNA, 2407 bp, Homo sapiens
gaggcagaggttgcaatgagccgagatcacgacactgcactccagcctgggcaacagagtgagactgatctcaaaaaaaaaaaaaaagaaaaagaaaaagaaaaaaagaaaattagccaggtgtagcggagcgcacctgtggtcccagctactctggcaggctggggtgggaggattgcttgagcccaggagttcaaggctgcagtgagctctgattgcaccactgcattccagcctgggcgacagagcaagaccctgtctcttaaaaaataaataaataaactgcaatgtttctggcagcccagatgccaccagcctcactactctctgagaggtgggattttaacatgcaaaggcccactaacccgatcacgtctcacaacttcagctgattaatactttgttaaaacctagaccacgaaaacagacagagcccggcgaggtggctcacgcctgtaatcccaacactttgggaggccgaagcgggtggatcacgaggtcaggagttcaagactagcctggccaagatgatgaaaccccgtctctactaaaaaatacacaaattagctaggcgttatggcgggcgcctgtaatcccagctactcgggaggctgaggcagggaattgcttgaacctgggaggcagagattgcagtgagccgagatcgtgccactgcactccagcctgggtgacagagcgagactctgtctcaaaaaagaaaaaaagaggctgggcacggtgcctcacgcctgtaatcccaggactttgggaggccgaggcgggcggatcacgaggtcaggagattgaaaccatcctggctaacacggtgaaaccccgtctctactaaaaacacaaaaaattagccgggcttggtggcaagcgcctgtagtcccagctacttgggaggctgaggcagaaggagaatcgcttgaacccaggaggcggaggttgcagtaagccgagatccagcctgggcgacagagcgagactccgtctcaaaaaaaaaaaaaggttaaagaaaaaaagaaaagaaaacacaagataatcctgtccgcaaacgcttagcagtcttaaatcggcctggtggaaggatgcagggacactcccccaccctgccccccgaaaaaggggaacgcgcagcgcgaggttccgggtccgccaagctcccggcatgcagcgcggcgatcccggcgagcaccttggcgcgcggagctggcaccttggcgctgttggtggcggcggagacagctgtgaagtgtgaggttctttgtctgctggcagctaggggcgacgaggcgggacgtcatggaagtgtaagtcttctcgggcgcgtcccttttcgcccgaggagcccaacggtttgaccgctgagagctgagagccgagagccgtggggactgggcgaccctcgtacgggagtgagggcagcgggccggccctgtccgggagggccgcggggtggtgacggggacgaacgggactctcgctttgcccttccgaaccttcgcttcccctccacgccgtgtctggtgcggggccgagcacttccgtgtccggctgcctttcaatgtgccccctccttctctcattcgtttaccagcgtttctgggtcacagtgcgggggtggagcccagtctggtatccgaccccggacttagaaggctataaaggcctgagtctgtccgccctgaaagtaggtggaggagagacgaatcagggccgggtagagctctgcttgcagctgtaggcccctggagagccctcggaagagctgccctcggaatttgatgggagcagtaaacactgtgagggaaggggctggttttggggtggagaagggaaggacgtgaaccaggactgggaccagagaaacagcagggggtgtgtgggtgtgtgtgcaaggcgagggtaaaagattttctgacagtttaactccacgtggtcttttccatgcttgctcgttgcgcctggtgcaaatggaagattttgcatctactctgaatgtgggctttatacggttgatattaatttgtaggtattactatcttgtgttctctttgaactgattatttgatacagtttcctttatgttcttttgcctcatgtttaatggttatatgtactatggcatttcacatttttacatttttaattaattgttttttcttaagaaacagggtcttgctctgtcccccaggcggggtgtaatcatggttcactgcagcctcactttctggactcaagcaatcctgcttcagcctcttcagtagctgggactacaggcccacgccatcactcaccgctaattttttaaaaaaagttttgtagatgcagggtctcactacagcccaggctggtctccagctcctgagctcaagtgatcctcctgctttgtactcccaaagtc

SEQ ID NO: 48841 - DNA, 1374 bp, Homo sapiens
gtcacatcattggtgctgtgaaattggataacttgattaagttgatgtctgtctggtttcaccatatcctgttgccaacaacctgtcgtttagtggtggttacagtaacttctcaaagataaaaactgcctttaaaaaaattccccaatacatacagctcgtttaggacttcataaaaggtagataaagtacctcttgacattttattaaataaggaaaggcctagcatacattgattggcatttattctgtgaatatttagctgggttttaaaaaaatttatcttcctgataaaatcaatgaataaatcagcttctgtcagccagagtctgttacacagagtacctgtgtaaacatcaattggttctcttgatcccaaaacacagattcattaaaacttatgtgaaagagggttttcctcctttatattcgttctagaagaggcagagggtgttctttggattcttgcattacactattgacttgtttagtggggtagtaacttggaatggccaaggacaaatttcccacgacgtggaatattctgaatgacagagaaggggccattatttggaaataaagttgtaacagtgcacctgcgatggatccattggccctgaagagaaaaaacattcatattttttctcgagtcaagtattccaggaagggatgttttaatgcctcatattttggagagcacagggagttataactcaatttcaagcaaagataggaggaagccagtgggcagatttcctgattaagcaggcaaagatgacatgtggtttgatttgtcattttcaattttaaatgaactctgtcacatgcactaattatgcattgtccttcctgtgttagattcctttcaaatatgatactctttgtgacttcagtgtgtttgtggtcatttgggcaaagcagcacttttgtgaaatcgtagcttgaatcactggtagcatttggtaagcttcacagagctgatttgattatagtgctgacatcactgtgctgatgacctaaggccgaggtctatctctttgtgaaccactgttagttttgctttatttattgactcggaagtcacctatctggcccatgcttttgaagtcttgggtcatcatttggatcatctcgccacactcctggtttaagaacatacagaggtctctgttgcacattacaaatcaagtgcagacccctctacctgatttttaaggattctgcatgaccagtttccattcatccagttcagtctcatttcccacagttccatagttaccttccactttatttagacttcttactgtgtgaccttgagcaagttacttaatttctgagtcttgtgctttatctctgcagagtaggaatcatacg

SEQ ID NO: 48842 - DNA, 2972 bp, Homo sapiens
aggaaagaattgaaagagaaggtgtcatggaagccccgagggcaggcagttttaaggagggaatgatcagcagtgtcagatggagtaggaccgaggagcagccgctggatttgtccgtgtggaggcaccaggcccttgaagcaagaacacttttggtgatcacttgggcaagagctagggtgcagggagttgagaagcaagggaagaaggtagagacaatgaaagtggcttggttctgaagccagcagggaatgtttgtgcgctgacccccttaattccaccaccccagactggagtgtggagtgcatgggggcctgctgtgaccacagcagtgctcagctccttgggtgtaggacagggaacttgcttggtggtttgacctcgagttggagtttttcagggagcggttgtgaatgtctttgctgatcttctggtcatctcgttacctatcctctgtagcttttagtctttgcgatccctcttctccctcttcacgtggagacctctcagacgggaactgagaaaactaaccggaatgaactcatctcccttccagtcctttccgattggctgctggttcccctcaccgtggtctcagtggaacatgagcccctttgctggagatttgggcagcagtttctgagggtctttacttttccctcctggaatttcagcctctccatgtgtttgtctccccagccggtggccattctccactctccttccagaccctccctccttcggctggagctgcttttttacttctgtgttatcaagaggttcgttcctccacaatcattcctcagtcctcagagtccagttgtcagcacagctgtcattccactgaactgcacaggccaccaatgacctcttggttggcaaatacagtgacttctatattgacacagtcaacctatttttctcgctctgtctcccagactggagtgcagtggtgtgatcatagctcactgaagcctcagactcctgggctcaagcaatcctgcctcagcctcctgagtggctaggactacaggtgtatgccaccatgcttggctaattgttttatttttattttttgtaaagacagagtctcactttgttgcccaggctgtttttgaactcccagcctcaagtgatcctcctactttagcctcccaaagtgttgggattacagatgtgagccaccgtgcctggcttctcctggcccgttaaatggaggcactttatggtgttctgtcctggtcttcactcactccacagttggtctctggacccataatatccactccatggtttcatgtaactccttgcaaataaatctagtgctggtttttttcctttagttttagaccaaactagacacactttttgacagaagcctcttcagagttataaaggtactacaaactcaaatttcatgttaaataatgtattttttttctaaacaacctaaccttgactctatctgttccctcactcctcctccctgatcctacccaatctaggcagttgtcaagtcctgttgactttacctgagggtgacgggaagtgtttcacgtgtttagacgcttactggcatgcctgctcctgctggccaacttcataactcactctcactcacccagggggtgttacaatgcattcctcactgtctgcctccattttcttgggtcttcccaaatcgctgccagcaccagccagagcatgcccctcttccttgattgctctcctatattgaccaagtcacacccagcctcttgatagtcagggccctttcgatcttgtcccaaatgactctttcaccccatgtcccacccctctctagctgtttcctaaaactccgggagctttctttcctctgggcacgtccttgtgttgttcctgccctggctggctgtccctcccatcccttttgtgttgaaaagccatcaggatctagtgcaagggtcatctctgtggagtctccctccttgagtctagagtaaacatttgggggattacaagcagtagaaattgactagaactgccctaataatgactgccatttatggagaaactatcgtgagacagatggcattatgacactttccatccattatcacatgtacactagaagcagatggccaagaacaggagcttctctgccatttactagctttgcaactgtagacaagttatttactctctcagtgtcagtgaaatctgaggatttgatgtagttccacatggaaagcaagcaataaatggtagtggcggcctctggaaagattttcatccctgttaatcctctcataagatagttaagtactgttatcattcctatttcacagatgaggaaactgaggctcagggagagtgggtaagtgttctgcttcccccaacacatggctgcaggagtcgtggcttcttcatgttttcactccagaaggtctttaatgcgataaatacttactgagctgattggaaagatggatatgcagccccagggtcaaattgagagagaaatgtagaagttgttgcctgcacaggggtggtcactgcagtcatttgatctcctctgaagttctgtagtctttcagagtccacatgattcagccaccctttcagcaatgatctgtttctttctttgaggcagatgatcactatatctaactgtcactcagatcttttgttgtgaaaatttacatgtatttgtcttctttctccagctgggttaagtgctttcagggcagaggcactgtacctgtatttctgtgtattaactcctgccccttttagtccctgttttgtttactaagataataagtcaaatttgggaaatattaaatcttcatctcaaaaaggaatttacccatttctaagagatgaccacacaagatgattttgtgtgttttaattttttagttttagagatagggtgtggctctgtcgcccaggctggagtgcaggctaaagcgatcctcctgcctcac

SEQ ID NO: 48843 - DNA, 4171 bp, Homo sapiens
tggctgatgacttggcggctctccgactcccctgatgtccaggccattctggccattgcttccctgtaggcgttgttgccaaccagatgttgcataaaaaacatgaaattcagcatgtctctggtgaacattctctgtccccacgcccacccttcaccctgctcttgcttcctctctttctgggtgaggggagcatgtgtgcgctgtcccatcagctcccttccttgctcatctcctggcctggcctcccacgccggaaacctgcaagccattctcttcctttcatctcacagtcagggagtccccaagttctgttgcttctgtcttcgttcttgcttctctcccccgtgtactgcgttgatttctgccattatttcttcacgcggctcttgcggttatcctctccccattctccctggctccccaagtccatctcccacatcaccgtcagagatcacatctaaaaccatgaatgtgatcccatttccctgcataaaccgtttatttagtacagcctcatcacttgtgaagtccgctttgtactgagagcgtaggctttggaataggaggaggcagccagagtagaggggcctacgatgggataaggggcccgggaaatgatccagggagatacccgggccaccactgggcacgctgtggccgctgccttcttattacagggcagagagcatcggtacctgacaagtgttaagcaggccgtctaattgccagtttaaaaaaaaaaaagaagaagaaactttagagaattaacaaaatgagaataaagcagtttccaaagtcagttttagaaatacttagctctttgtcaaatttcctttagaaaagtatggaagaaaatggtcaaaaatacgatttttagagttgctaatggaaaaactttttaaaaggccacagggtatttaattttttactaaattgttcattgtcttcctagggttgtttttgcccttcagaatgtacccaaaattaaattagaacagttcctttcatgaagggtgcctttctctgggaacccgcctgtaggctaaatagaaacccctttctcatgtgtcctgattattttcatgctttacactgtattggagtttcaacctagagcttagaggagagaaaaaacaaacagaacagcaagaaacgaatccctgtccctctgggttaaagatcatatgtcatgtctcctccagctttaatcagcaacatatgttactcatggcttaatgacaggcagagagaagagatgaggattagtgtgacctcagccagagcctgtggaaagtggtatcattacttgggggaagatttgctgctattgagagtgcctggggtgggccgggcgcggtggctcatgcctgtaatgccagcactttgagaggccaaggtgggcagatcacctgaggtcaggagttcaagaccagcctggctaaagtggtaaaaccccatctctactaaaagtacagaaattagctgggcatgatggtgcacacctgtaatcccagctacttgggaggctgaggcagaatcacttgaacccgggaggccaaggttgcagtgagccaggattgcaccactgcactccagcctgggtgacagagtgagactccatcttgggaaaaaaaaaaaaaaagagtgcatggggtgtgccagacacggtctcagtccttggtcctggtgcctgtgattgtctgtcacttcgaatgcccgccccatagtcttggaagggggcaagtgtcctctccattttagcccagagggctggtgagtggctgattgggaccttctgattcagaagctttactttgctcctccaagccaggtacttgtgcttgatgagaagaaagatgtgtgtggcatcccctgagatggtttccttctcgtttctacaaagtaggtaggccttggtagaaactgctgtttctcagtagttggaccattttatagccagattcttcccactctggaatttggctacaaaaggtagcaaattgtttaccaaggtttgtagcagtatcgcttctcaccagagtgaataagaaatgaaagctgtggccgaacatggtggcttgcgcctgtgatcccagcactttgggaggccaaggtgggaggattgcttgaggccaggaattcaaaaccagcctgggcaacatagtaagaccccatctctacaaaaaatgaaaaaaattagccaggtatggtggcgcacacctgtggtcccagctactcaggagactaaggtgagaggattgtttgagcccagaagttcaaggctgcagtgagctatgatagtgccactgtactccagcctgtgtgactgagcaagaacctgtcttttaaaaaaaaaaaagcaaatggctgggcacggtggctcacgcctgtaatcccagtactttaagagaccgaggtgggtggatcacctgaggtcaggagtttgtgaccagcttggccaacatggcgaaacctcatccctactaaaaatacagaaattagctgggcatggtggcgggcacctgtaatcccagctacttgggaggctgaggcaggagaatcgcttgaacctgggaggcggaagttgtagtgagcgaagtgtagtgagcgtgactgcactccagcctgggcgacaagagcgaaactccttctctagaaaacaaaaggaaataaaaggtttcacttacagtggcaagcacaaaggacttgagtgagaagttccctatattaacactagagccattttttctccctgggttcagaaaacagtcccagcatccaacatttattagcattcacttggaagccaggtgtcttttggaggctgaagcctcacctcttcagttacgcctgggctgtgatttgctgtggccctctgatgactgcctgctgactcagaggctcggtgaggaaatgaggtggccacccagcttaggacttgttgtgcccggttgtgtattgatttggaatgatttgtgagccctccggcctgaggtcagtgaatcctgtgacctcacaggccactgccctgaacagcactaccatctaggcctgttagtgatttcgtgattatgaagtcttgactcatatagagcgttattgcttgtaaaacactgttacatgtgttctccttttgtcctcgctgtaggcgttactttcattttacattagagaaagttgaaatttagaaagccagattcagtgaactgttctggatcaaatatttaatagtatacattgttgctatcagatctttgaatcattttgaggaaagtaggactttaggtttggcgacttcaagttgccatttttggaggtcggcaacccggtttgatgctcctgggattgagataataaatgtatcatttatgttaacccagctgttgatactttggatttttaagttttatttccccttatgttctcaactacctgaaatggttggtatctgagaaccttgagatggtgctttgaactttacttctttatttggactgtttctcctgtgttggaaagaaaaggtgaaaggccggacacagtgattcatgtctataaccccagcactttgagagggtgatgtgagaggatcacttgagcccaggagttcaagaccagcctgggcaaccccatctctacaaaaaataataaaaaataattagctggacatggtggcacatagctatagtcccagctacttggaaggctgaggcaggaggattgcttgagcccaggagtttgagactgcagtaagtgatgattgcgcccaaagaataaagcagggaaaggagggaaatagccaagatttgattatttaacctggagaaaagatgatctccgtttgagaaaataatgtgcagaaaagaattttgctaagttcactaacggccggagcttttatcaacatccaatcctccttaattacagtcaagaccttttttttcaacctaaggttcccagtcacaggaagaaaccctaagctgcattaaactaaatgaaatataaacaaaaaagaaactttcagaaataaaaaacttactagcacgtcttggatcactaggataaatgacaatgactacattatccctcacccccaccttttttttccccaaagagagtgggtcttactctgtcacccaggctggagtgcagtggcacgatcttggcttac

SEQ ID NO: 48844 - DNA, 1510 bp, Homo sapiens
ggaggccgaggtgagtggatcgcctgaggtcaggagttcgagaccagactaaccaacatggagaaactctgtctttactaaaaatacaaaattatctgggtgtggtggtgcatgcctgtaatcccagctgctagggagccaaggtcatgccattgcactccagcctgggcaacaagagtgaagggggggagttgaagattgtttctttctcagaagagaatttacattttcctgagccatggaatctttagaaaatggtcattttatttcacagcatcatagggagtagcccccattgattcactcaggatctcccccatcctgggacaccaggattattatctagttgcagaaacacttttgggctgaagtgagtggagagaccagggttttgccaggagttcgtggtgtgaccttgggcgtgtcacatgacttcctgaactgtgctgttgtctgtaaagggaggtggtcagactgggatcctctccaggattgcaggcctgtcttattatcttgttttacttcagtctgccaggatttctttctggaactccctgtggtcccagttgccggatttcagagattgctgtggggaatgccatggaatagaatctggccaccttgagctgagaaaggtgtttgtgattgatggttgatgccaccaagcaaacagggttaagcaacttgactgcctgcctgctgcttttaaaaaggcagctgacgacctaattctgtttagaattaggggcgaagctaaggaaactggctcaggctgtgagtatcatctctagattcagatttctgggaccacatcagaaaccaggttttatgtggacctttgatgggcagtgtggtgtgcaacgtgggggactgtgggttttagactgggcagttctggctggggattccagttctaccccttagcagcattgttgggaggacgaaaggaaatgccggatgggaagtgcaagatgcagctccagacacatgggaggcctccctgcagggctgttgctagtgggagtgaggattagaagaaggctccaaaccatttggcacatagtgggcatcatcaaccgtgttgctgatacagttcattaaattacagatgtgtgcctggcacagtggctcacgcctgtaatcccagcactttgggaggccaaggtgggtggatcacaagctcaagagattgagaccatcctggccaacatggtgaaaccccgtctctacgaaaaatacgaacagttaactgtctgtggtggctcgtgcctgtagtcccagctattcgggaggctgaggcaggagaattgcttgaacctgagaggcggaggttgcagtgagccgagattgtgccactgcactccagcctggcgacagagcaagactctgtcctgcccccccaaaaaaaaaattacagatgtgcttgtgaaatataaaagtacataaagtgccatttaacttcttcgagatgcatatgcaacctgttcaccacttctctctgtgtgtgtgt

SEQ ID NO: 48845 - DNA, 963 bp, Homo sapiens
tgaaaacaggctgaggttgtcagggcagagagctgaaggtggggacagtgaccgcggacccctctgtgcttgaaagatttcctccacggcctttgccccagttgtggggaggtctctgtgcacagcggggaaaatgcttgtgtcgcctttggtgggccatgtcctaattagtttcatctgcttccctgggaacttactaaggggcccagagcactgttggaagtctggttagagtccccagagagttactctaagttaaaatgagccactgaccttggctcaccttagaggaatttcctcgagaacaacagagataagaaaagaaccggcctggccaatccttcaacagctctagagccccttttctctgctggcaggggctttgtttaccagctcactgtttaggctaaatgttagggaccagatcactgcagttgaaaacgggcactccaggcttagtgacagtggcagcagaaacagtgttggctgcctttctgaccaccccactttcctgccctgagacagcagcccagggcaggtgcttcatattcagaccaggtaagcctcatttgcacaacagtcaaattgtttgttcctttaaaaaggacacaattagcctggcacggtgactcatgcttgtaatcccagcactttgggagggcaaggcaggcggatcacctgaggtcaggagtttgagaccagcctcaccaacatggaaaaaccccatctctactaaaaaaatacaaaattaaccaggggtgatggcacattcctgtaatcccagctactcgggaggccgaggcaggagaatcgcttgaacccgggaggcagaggttgaggtgagccaagattgcaccattgcactccagcctgggcaacaagagcaaaacttcatctaaaaaacagaaaatattaagatgattaccatgtgaaaacctttttaatattcaggatttggaaagt

SEQ ID NO: 48846 - DNA, 1506 bp, Homo sapiens
caaggcatgtgaaatacaaagacaatttagatatctctgctttttttttttttttttctgagacagggtctcactctgttgcccagactggaatgtagtggtgtgatcttggcacactgcaacctccaattcccaggttcaagcaattcttgtgcctcagcctcccgatagctgagactacaggtgtgcaccaccatgcccggctaatttttgtatttttagtagagatggattttgccatgttgaccatgctggtctcgaactccaggcctcaagggatcctcccaccttggcttcccaaagtgctgggattacaggcatgagccactgcaccatgcatcagcaaaacagataggttggaaacctcacccttagcatctcagatgtgaccttatttggagactaggttttttgacactggtaatcaagttgaaatgaggtcatttgggtgagccccagtccaatatgactgttgtccttataaaaaggggaaatttggacacagagacacacgtagagagatgatgtgaagagacacgtgagaagacagccaactataaaccaaggagaggggtctggaacagagctctcagaaggaacaaacctggctcccacctgtgaccccagcactttgggaggctaggcgggcaggtgacctgaacgcaagagtttgagatcagcctgggcaacgtggcaaaaccccatctctaaaaaaaatccaaaacttagctgtgcatggtggtgtgcacctgtagtcccagctactcaggaggctgaggatgagcccaggaggttgagcccaggaggtggaggttgcagtgagccaagattgcaccactacactttaacactttagcctgggtgacagagtgagaccctgtgtcaaaaaaaaaaaaaaaggaatcaaccctgtcattacctctagcctttggactgtgagacaatacatttttcatgttgagaaagagaaaaaaataaactaagcatttaactcttaacattctaggtcattcaccatttggcttccaataatatttccaactttaaatctcttgtggctgagtgcagtggctcttgcctgtaatcccagcacttttggtgcctgaggccggaggatcacttgaggtcagcaatttgttgccaggttaggcaacaaagtgattccccatctctataaaaaatttttttaggccaggcgcagtgacttgcgcctgtaatcccagcactttgggaggctgagacgggtggatcacctgaagtcaggagttcaagaccagcctggccaacctggcaaaaccccatctctactaaaaatacaaaaagtagccatgcatggtggtgcacacctgtagtcccagctactcggggaggctgaggcaggagaatcgcttgaaccgggaggtggaggttgcagtgagccaagattgtgccattgcactccagcctgggcaacaaagcgtgattccgtcacacacatacaaaaaaaatttaattatctggcatggt

SEQ ID NO: 48847 - DNA, 2145 bp, Homo sapiens
ctctgttgcccaggctggagtgcagtggcgcaatctcagctcactgcaacttccgcttcccaggttcaagagattctcctgcctcagcttcctcagtagctggaattacaggtgcctgccaccacacccagctaatttttgcatctttttattttaatttttgagacacagcctcactctgttgcccaggctggagtgcagtggcgcagtcttggctcactgcaacctctgcctcccaggttcaagtgattctcctgcctcagcctccccagtggctgggattacaggcacccaccaccaagcctggctagcttttgtagttttagtagagacagggtttcaccatgttggccaggctggtttccaaatccagacctcaagtgatctgcctgttaccttccaaagttctgggattactggtgtgagccactatacttggcctcaagtatgtttatggaccttaaatcaatttaatttagattctgagtactcaggattgagctggtgagaaattcaatcctgatcatttttagatgatttcgctaaactgtacctgaccatggctgtgccatgggggacccctacagttgttgattgattgtccacactggtcagaagcatagcttggtgggggtgtggtgtatagaagggcaagtcattgccttccctgagaacattctccaaaagcagcactaagatttactttgccatgggttgggtttcccaggaagccaaacttgagttagagattagtgtgcaagtgattcattagggaatgcatatgagatcaccagttaagccaggagtgcttcaacaaggccttgaaagtctggtggggaggcagaagagataagaggtttctcagacatagtaaagattgatctggggccgggcatgatgggtcacacctgtaatcctagcactttccaaggctgaggcgggaggatcacttgaggccagaagtttgagagcagccaggcaacatagcgagaccttgtctctatcaaaaataattttttttttgagatagagtttcactcttgttgcccaggctggagtgcaatggcacaatctcggctcactgcaaactctgccacctgggttcaagtgattctcccgcctcagccttctgagtagctgggattacaggcacctgccaccacgcccagctaatttttgtgtttttagtagagacagggcttcatcatgttggccaggctggtctcgaactcctgacctcaagtgatctgccagtcttggcctcccaaagtgctgggattacaggtatgagccaacatgcccagcccccaaacttttttttaaattagtctggtatgatggcatgtgcctgtaattctagttacttgggaggcttaggttggcagcatcatgtgaccccaggagttcaatgctgcagtgagctatgatgacaccactgcactccagcctggtcaataaagagcgagactctgtctcaaaacaaaacaaaaaaccgcccccccaaaaaaaacagattgctctggaacacagctgggaagcctgaagcctgactttaaagaaaggggctgtgcgtggctgacttctgatctcttgggattggagtacaggaagggaagagaaaaaaaagtggaacagaaaaggtcttgtttgagtgtgactgttgtgagctggtgtcaaatttgttggatgtttaacgctgccagctctttggtattttggtgtgttggtgagttttctgaggctctcctcccttcagtcactgggtgtctattaccttcagtctcattgatgaaagcaaatacctttccattctgtctcaccccttaagtccttccgcagccctctaggaaactagtgataaccttcagcttctctctgttgagatctatgtgcacctccaaatagcaaagcccttctgggtgggattttttctttttttgtttttgtttgtttgtttttgagacagggtctcactctgttgcccaggctggagtacaatggcgtgatcacagctcactgcagcctcgaccttccagattcaggtgatcctcctatctcagtcccccaggtagctgggactacaggcacacaccaccacattcagctaaaattttttttaagagatggggtggggggggtctcact

SEQ ID NO: 48848 - DNA, 1160 bp, Homo sapiens
cgttagaatctccatggactttcctcaaacagcatgagtctaggcctcagatctgatttgagggtttcagagaagggggtctgtcatctatgaattttgaagtatctctccaggttaagctcccagttaagattccctgatcagacagtacagggtacttagctgcctcataccaagttaattttttaaattgcaaaatttcttgagatataatatcggataagaagtgatccttggctgggcttggtggcccatgcctataatcacagtacttccggagaccaaggctggaggattgcttgaggccaggaatttgagactagcctgggcaatgtagtgagacccctgtctctacaaaacaaacaaacaaaaaagctgggcatggtggcacacacttgtagtcctagctactcgggaggctggaggcccaggagtttgaggctggagggagctatgatcatgcctctgcactccagccagggtgacaaagcaagacactgtctcatgaaaaaaaaagaaagaaaaaggtgacccttggctgtttttcagaagcgcaggggaaaaggggtcatatttggaacctggattcttctccatggcctccaaacctggaggagtgtggtccctctggaagtgtccagttgtggcatttccctggtacttggaggacccaaggaactgctcattccaccatcacaccctgtcctgcacacacccctgctcaaactctggccaccaacccaggcacagctcacagtccaggcttgctcaattcctctgcctcctcagacaagaatggctggaaaaagtgacagggcagggtttcttggaaagcaatctggcctgcatcagcattaatgattaaaacgtgtcctcatgtggcaattccccaactgagagcccattcctaagctattttaactcatcagttcagaaattctagagtccctgtccttagtttttgaggtctggatgcttttttttccagaggatccaatcgagacacaattgactagaaggcttcagaagccacagaaaatacctacctacctatggccgggcgcagtggctcacgcctgtaatcccagcattttgggaggccgaggcgggcagatcacaaggtcaggagatcgagaccatcctggctaacacagtaaaac

SEQ ID NO: 48849 - DNA, 1272 bp, Homo sapiens
aaccaatacacctccagcagctcacggccagtccacctaggactgtgtgtgtatcctgtgggcatcatgcaaaccacccccactcccattccaccttgactgccagcctagggttgtgtccaacagcacagcagatatttgcagggagcagagcaacaggccagggaccggtggaagggcctggctagtggggccaggccaggcccaggtgtctggaaccttgcagatttgctgcaccctggaaatatcctggagataatatttactctaatgtaatttactctcaaatactgtacttctgcctttggtgctttctcccctctacctcctgaccagggatcactagaggccattggggagtgaggagggaaagagccttccttttgcctcttgcaaactggcctctctccagggcatgatcccagcaaagagccagccccattgtggtagcccagaagtgcctggtgggcgttgaaggggagtggggtgtccaccacccaccccttggtgagctgcatgaaggctcccggcgaggcatcccaaatgccttccctgctctctgcacagattcttgtcctggttgcttttccttctctgcccagcctggctctgccacctccagcgcctcccagcctgggcaccagccagctgcactttccttgaatgactggcaagtacaacaggaccaggctggaatcatcgtcagatggggcacaggatatttccacagtcatgaagtatctcccaacagattacttatttatcacaaaagaaaaactaactttgcaggggagaaaactggtgaatttctctttaaccaaatgatcaatacgtcccactattggaacaaacagacctcatgggctcctgaaacgactgacacccgggaaagttacaacacacttctggggcacataacttgtgtacttctagaatgaaagccagaaagagagaggaaatgttccagattaaaggagactaaagtggcacgacagctaactgcaacacatcttgctataaaggacataattgaaacaatcagggaaattgcactatggactgtatagtagataacagtgtctgtgtcatggcgatgttaaatttccttcatttgatcattgtataagagaatgttcttttttttttttttttttttttttgagagacagtcttgttctgtcccttaggctggagtgcagttgctcgatctcagctccctgcaacctctgcttctcaggttcaagcaattctcctgcctgagcctcacaagta

SEQ ID NO: 48850 - DNA, 2022 bp, Homo sapiens
tttgtgaaatatctgccctttccccacctttcttttgcttctttgcctttttctccctagttttcatttctttcttttagggcgtcagccccccacctctgtggttgggagggactattgcacgtctacactctcgtggggatgaaatagtgtttgagttcgttatttgcatttgcgcgttatctccccgaggagatgacagcttctctgccagcagcgggcaaaggtgggctctgaagcagaggagaggaattatcaggaaaagctcattttcttctcctgtcctagggtttcactgatgaaggcctctgggacacccacgttgggggtgggggcggtgaggaccgccacctgcccgcggctcccctgcagccaggccacgcgcgctgttgctagggcaaccacccggccaggcctgcggctgccgggaagccccctcgggagcgcgcacgggaagggctgtgggggcgctggccggctgcgacgtcagacccccgcccctcggcgcctgccggacccagctccattcccagccgcgcctccttcggtgggcagccggccggaactcacgaatcagagcagccgacacatcgtccgctcagccaatcgtagcagatgtgtgatcccgccacctccccggaccctggcggttgtcgctgagttggcgaccgcgggagacgctgctgaggcggcttcggttgcgggtcggaacggcgctgctctgcggggccggtccaggctggcagctgccggcgcttggcggtgagggcgggctcccgagtggccccccaccgaaggcggtgggaccagcggctgaggccaggatgccgtccaggcggcgcggcggctcctcactcatcccaggtaagggggacgcggcgctcgctgcggctccgctcccctctcgtctcctcacacccggccctgtgccccgtcctggcatcccttggccccttgtcgccttctgctcggtgcctcccggttgtccaaccccgcccccgagcgcggagccccgggtctggcccgtccggcccctgctcccacgccccttcccccatcgccggcatttcccgggctcggcttcgccccggccgccggggcctctcccctctgccctttctctcccttctcgcagccctgggaccacgtcctagccccgcagtcccctgggatgagaccctcgtctcgccgggatcggacatttgcccccacgtctaccccggctgcgcttcttgagctcatcgccccatcatcctacccgttgtacgtagtcctgtctgcatggcagtcgcccgccccgctccaggtgtccctgggtcttgcccttttgctcctaagcaccttcctttcccaactcgcctcttctcccctcactttgaccacccaccatcgcaatctcctcttccttctcttactcttaaacctccagacactttcccactctctgcaatgccggattcatcgctttttttttttttttttttgagagatggagtctctatgttgcccaggctggcttcgaactcctgacctcaagctatccttctgcctcggcctccaaagtgctgggattacaggcgtgagccactgcgcctggctcagatccatagtgtaatatcttcattcgtccttacatgagctgcaccccataacatgtaaagtcccttgcccagagtctagcacacagtaggcctggcacatggtgggtggtcacgcatgttagcctcttcctccttccaggcgttttgtactttccagatgatggtagcaagaagtccagtgtccacagggatttgactctgcctgaagaatggtatgggagatggcaggagaaattggtgaactccagtaaagcgattaaatggtcaattactgcattcattaagaagaaacaattctgctatccgtgccatgtattgttttatgttaattgcctttgtaaaggattcttaggctgctagtcagcaggctttgcggtgtaattactccccatcccctctccatccccatctgcagtgtttg

SEQ ID NO: 48851 - DNA, 828 bp, Homo sapiens
tcactgctcctttaagtagtgagtatcagctgactttcaaagattgtcagctgtgtataccatattcttcttgccatttgctactcgttagtgggtctggtgccagcccctaacgtgcagctaggaaaaggtgttcccatgttgatgctctgaccatgagctgacataagaatggctcttgcaacaatggtttcatttaggtcagatttgaagtctgtactgcatggcaaagctgtcattcaaaatcagtctctgtgcatttattcattggcaagttcaagcatgtgataaaattatttttccttttgctaacaggctagaagtaaatggagaaaccagatacagactggactttagtcagcaggcacagtggtattggctgttgctgtttgccacgttggttggcatcatgaatgggtatgagaggcaaggaactagtgattaacaaaggaaagacagcttttaggggcgttgttacattcctgtaatttatcttttgctaggacatgtccccagcatctctttggacctagaatatagccatgttcctgattataacagcagggtgtggtgaatgtgctcttgagtgtgtgtacctgggcctgtgtgtgtgcactgggtgttgggcatggccttgctggctgctgacctctgtatctctacttttgttgactgatcctgtttttggttagcaatcttagtttataaaatttgcaaatatgtaagtatagaaatgtaatgtcagcactctcttctctaaggcattatttctaggagtctatttcatttggcctgctgggaaagagcagttctattaatagtgattcc

SEQ ID NO: 48852 - DNA, 2129 bp, Homo sapiens
ataaggcaacatttgtacttttcttggagaatatagcaattggtagcaaaaattagaagttggatatcagatcatttattagtttgattagatttctctacaaatagtagagatccaaaataacaaagatttccaaataatgactactatgtagaaggcagaccagggctgctttgtcagctttgcagtcatctggcatttaggctgcttccagcttttgtctccatcatccccaggatccaagttggagcgccagtcatttcatctacattctaagcagcacagcaggggtggatgtgtgtaaaacaaatggcgtttagtattttttgaggatatttcttagaagcttccaggtagtacttcttgcttttcactggccataactggggttccttttactaagaaaaatcaattggatattgggataggcagatagtagtctctgctacattattgagcacctactatgtgccagacactgtgttagctccttgagataaaaggtctttgccttaaaggaacatatgatctaatagaagacttagattcatatataatgcagggttaagaactatggtcaccactgcttcttcattggtgaataattaaaaacaaacaaaaagaggccaggcacagtggctcacacctgtaatcccagcactttgggaggctggggtgggcagatcacctgagggcagtagttcaagaccagcctgaccaacatggtgaaaccccatctctactaaaaatacaaaaattagccaggggtggtggcccatgcctgtaaacccagctactcgggaggctgaggcaggagaatcacttgaacctgggaggtggaggttccagtgagctgaggtcgtgccactgcactccagcctgggtgacagagcaaaactctgaacaacaacaacaacaacaaagaactatggaaaaccaaggagaggtgcctaacccagtctgaggtgttcagagaggtcatcttgggcaatgtgtcatgaaactgagccctaaagaagggtttcctcaagcttggtatgacattttagtcagataattatttgttgtggcagccatccaagatgatcaacagataaagggaagcgcatttagttttgacttagggaatattgtgctccctgggtgacccatggttaaggcgctgtagttcttccttgactgtccagaatgtctttccttttccttagccaatgagccacccaagaaatgttactcctgggagaagcctgtgcctaactgtggtttacagaattcaaagggaagaggtagtatggaggactccttgtggcttcactcctggcccaacccagggcctcaaaaggacctaaggaacaactacgccctgttatgcctgacctatggaccctaccctcttgaccatataatggaagtcagctaagcttagtcccacctggacctagaacatggtgtttgtttcccataggtgaatatatttttgaaaaatatatttttgaaaaataagtaaaacaaaaccaaatcaggaaataatcattgagaagttacaatatgaacaccttaacaaagatgagtaacaatgtggtgttttttgctagagagttcatttccaggcaggaagtagtgtgaaacaaggtttgagagaaatgatgcggaccaggctttggagggccttatattttaagctaaagatattgaattttaagccagttgccttcagacttctcttattagtggagcaccctttttttcaagtgaaatcttgttcggaaccttggtagatgatgtacttggaagtgaagtggccctcctttaggcagcatttaattttggttggatttaacaaagaaaactgaagtgaagctcatggaattgcaaaactacaattttgtttttaaaagaaaaacattgattgtaatgtgtaaaatttacaaaactgatacacttttaattgggattatattggtttataaaaacatttagtgttttttttttttttttttgagacagagtctcgcactgtcttctgggctggagtgcaatggcatgatctcggctcactgcaacctctgcctcacgagttcaagtgactcttctgcctcagcttcctgagtagctgggattgcaggtgc

SEQ ID NO: 48853 - DNA, 737 bp, Homo sapiens
tgtaactgttaaaagcattaagatataaacatgttaaacaattctcctttgagacataaacataaaaacaggtctactgatgagtctgttgattaccctattgcattttagccaatgtttaaatatttggtcatgtatgttattcttgaagtgcagaatgtgcttagggtaattattagcaacatttaaccaaattggttctgttatttcacgctggaggaccagagcaggatgagtcagtaaggggacttttgagaaatgaaatgtcagtgtttttgcaaccatttgtaggccataaaaaaaaaaaatcagatttgttcttacaaagaatgcaggactggccaaacaccaagatgttgctacacagagagaataaaacaaccagagacaaaaccacagcagaactgctttcatccccaaattgcagaataagtactgagatatgaccgagaaacaggggagagaaagggtaaacagtggaggaaagagatttttttgaccttatgctaactattaatctgaagctagaaatgctgattttatctgaaaaattagagctttccacagttattcatttattcaacaaatatttgttaaacttccattatgtacctagaatcatcctgggcgcataagatggagcagcagacaaaacaaaaattcctgcccttatggaacatatattgggggagggggtgtggcagaaatgcatacacatattgtacatgtagcaatga

SEQ ID NO: 48854 - DNA, 1858 bp, Homo sapiens
gtttcaatgtggaatgtttgtgtggctccccaaccagaccgtgacctccttgaagattgggactgcatcgtatcttgttctcattttctattttattttaatgatctatcctttgggttgaacgaatgtgtttcttgaacccgataagtgcaacactgagtaaacacttgtttcttttctcccttccatcctcccaacttagtagcttcaatacattcttagctctcctcacttgctattctctaaccataccacgtggctgggcacggtggctcatgcctgtagtcccagcactttgggaagccgaggtgggcagatcacctgaggtcaggagttcaagaccagcctggccaatgtggcaaaaccccactaaaaatacaaaaattaactgggtatggtggtggcctgtaatccccagctactcaggaggctgaggcaggagaatcgcttgaacccaggaggcagaggttatagtgtgctgagattgcgtcactgcactccagcctgggtgacagagcaagagtccgtctcaaaaaacaaaaacaaaaaaaaccccaggttatctccatgaatgtgaatattgatgtggtccttctgtcaggaagacatcacctgagaccacacacagaaagcctatttttccttaggatacagtcctacatcagggttgacaaagtttttttgtaagggttagatagtaaatattttagattttgcaagccatatggtctcttcctcagctactcaactctgccgttgtactacaagagcagccatagacaatctatacatgaatgagtgtggctgtgttccagtaaactttacttatggatattgatactcagatttcacatgattttcatgtgtaatgaaatgtgattatttttatttaaaacattaaaaatgtaaaagccattttttgcttgcaggccagacaaaaacaggcagtgtgagtcaatttaatttaatgtgtgactcatagatgctaacccttgccttagctgcttagtaacttgccctagtcatgtgttaccccatgaaaagaatggcctacttctgtcatattgtctctaacctctgtcatttcatttatgatgctatgtattatgtgtacctttgtctctcttgctggattctgagtatcttgagaggtaggccatggcctagtcagtcatctttgtatccttaatatcaaacccacatagtgggtatttaagaagtgactgttgaatttgaattttatgcttgatatatataaaatgtcatttctgctgatcttaaagagaaacacttgactgatatgcataggtttcccatgttcttccccttgagaggccatagttaactgcatttgctgctagcggctcttgtaaactcagtggttatacagcaaagcctttgcaaagtcttttattttagagctctttttcagacaagaaatgattatactttttcttcaaatcatttattcaatcataatgataaatatggctttcactattctgatgaagcagagctaccatcagtgtgaaataataatagccgttgtttagtgagcatctactacattccagtcaattcagattttttctctagatttttggtgaccttctgattactattaatttacattttttttattgttctctacatgtcaaacaaaacaaagcaacaatatcaaaaacccacatgctttttcttcatactgtctatattattgaatgacagacaaacatctgtccttcaagtcaaatattaattaatcatagactcctttctctttttcttcaccccgccttatctaattggccactgtcttagcttttttttttttttttttttttaaagatggagtctt

SEQ ID NO: 48855 - DNA, 1368 bp, Homo sapiens
tctttaaagtgacagataattttgaggaagaaaagatgaagtgtgaactatagtggtgtttttgggccttttgtggtaatgcatacaaactgacagtcttgtcttgtgagggtaggtttcataagacctttttgcaaactaaatcctgtgtatcttcaaagcttttttgcctgtaataagtcagatgctaatgtatccagcactgatgatcatgaggtttttgtaaagcagtgcttgaaaagagattgttgaccgttagctatgatatgagatgggccccagagaaagaggtggctggcgaaggtgttttccttagttatggggtgagagtgggagaaaaataacattttgactgagaatataggatttatatctctaagcctaaaaatactgggttggtttttttttttttttttttttggtacaattctgggtagtctgcaagtaatattgagtcagcacattttagggacatattacccaatattgaatggataatcatgcttcatggttactgtgactcacatagtaaattggtaatgaaacgttaacatattttataccctgtcccaccatagtctctaatcctaaaattatagtatatttcagtaaatggtgctgtctaggttacatcgtcagccttcttgcatagattcttaaccttttagacttaggaacttatttgagaatttgatgaatcctgtggatccccacctcagaaatacagacacatgaatacacagatttcactcacaatttcagtggatacatagatataccagaagtccatcagattaaggactcctattagccacaatttcagtggatgcatgtgtgccagaagcctgacagattaaggactcctattttatagtctccttgctcaagctcatccactcatagggctttcattacagcctatttgctgattatcataaatctgtatttcctagtgggtctctttcctgagccctaggttcattatttccaactgtcttctgtatgtgtccaccgaaatgctctcaaggacctcaaattcaaagtccaaaattgaatttattttctaaacttgttccctgagaggcagaagctaggtggaattgttcattaaactgagcaggaatccaccttgagagtggggatgatgctgtgctcatctatacttgcggtacctatgagccagagagcagatttgaggaacagagtcctcagggcacatggctcaaaccccaaaacaattcaagaacctggttgctaaagttagagagctgaaaagcagatccaatttatgaatggaatatttagttggaaacctgagtagatagtactgaggaagagcaagtgatcaaatggaaaagcatgtaccaa

SEQ ID NO: 48856 - DNA, 1607 bp, Homo sapiens
cgcccggctagtttttttgtatttttagtagagacggggtttcaccgtgttagccaggatggtctcgatctcttgacttcgtgatccgcccgcctcggcctcccaaagtgctgggattacaggtgtgagccactgcgcccggcccacttcattcactttaaaatgaagtacttgaccagaagcagtactgtttagaatgccattatggtgaataagatattttgtaagggaaaggatgctggtttttgacagaaatgttgtgggcagagaaggaaatcttcattgagtaaaagcagtgtcctttttagatggaagcggtccagtgtgatcatcctgctacagatggctgcccagaccccctgggagcagcgctttattggggcaccattgttggcctctcctgttggcaggttggacacttagccatgattgttgccaggtcagccttgacaggtggaagcctgtgtcactgagcacatgcatgaccttcattcctgttgctctcacagtaggatatgaactttgttcattagcgttctgagcaagggaaacagtggctgataaaataatgagtcattttgtccacttggttattgagagcctcctctgctgagattatacattggtcatcatttacatgggacacaaataccctcacactttgtcctgtttgagaatagtttattgacatagctcttttctatatcttaccacaagtttcccaaccttattctaagtttctgaatttccagtcaaaccatctgctgctgaccacaaatcagtgtggattcgtatttatagccatcactcctttgacacaaaatgtgcagtcatgtacactgcttcgagtgtatgatgagcagcctaagcgacttgggcaacttggtagccagtggtaaagtgttcagtccttactaaatcctagtagcaagcaagggctctttctcaaaagggagagtaatgatctccagaagttagcatagctttgctctaaaatcctagggttctatactgtgatttacctctagggcctgccatacctccacacatcactcatgaagtatcatcctgtatcttaagtttttgttggcgatactaatctctgcagttcctctaggaatgcagtattacttttggtgtaatattttggtagagagaggcagctctaatgtaacccctgaggtatggctttagtatgctacccatctctgttagtcctagggacaccatcaccaatcagccaccaccagagatctctacagctcacaccattctcttttcctactctacctctgcgtgtgcttataaagtatagccatgtgcccattgtttctgtcatgaagcgtcaccagttggctgctgtgactcagagatcttttcatccttcccttgggttcagggaatctatttctctgacagcctttcccattgttatttctagcctgcagcgaacaagcactaaagagctttttagggatgttgttgcccccttcaccaatgtatttctcaaaggcttggtaaaggagtgagttctctagacattcctgggatgtagttaggagatcagtgaacagatcagtcatacgtattaaatacaccccagtatt

SEQ ID NO: 48857 - DNA, 1542 bp, Homo sapiens
agccaaggtttctcaccctcaggtccaaggggttcaattaccgggcccttagggagatgcgagccccctaaaacgatgcaaagttcctggcctaatttttatatttttagtagacatggggtttcacccatgtctactgatcggaatgcctcgagcacacaaaatgttggaatttacaggcgtgagccaacgtgcccggccagccctatttatttcagcctatacattttgcacttgttaaaagtatttgaacatacaattatcatgttttctttaagcagtccctccctgttgtacacttggatagtttatttttttagacaaggtttacctccgtctcgcaggatggagtgctgtgatgggatcatagctcattgcagccttgaaccttggggttcaagtatctgggaagctgaggtgggactacagagatggggtcgcgccatgttgcccaggcagctctttaactcctggcctgaacggatccttccgcctcggccgagcctggacatagttttctagttttgacccacagaaacactgtgctgggtcggagtttgtcaaccacccttctccagccagcaacacacagaacatggcggggaagtcgcggttaccaggctccactccgaggaaaaaccagcgcagctccaggcactgtagcgccactgtgacgtcgccgaaggccggcgctattacgacgccggaaggcccgcgcctgtgacgtcagctgaggcgcgcccctgtgatatctcacaggcccgccccttctgtagaaccaatcggaactcgaggcgcagcggctgggtattccaggagagcgcatgcgcagacgcatggccacagactgccggtcagtgtcagcaggcggtgggttagggtccgcaggcccagaccaggccgccgacaccaataagctacaaggaggagctttaccgctgcctgtactactactgcctgcgctacttcccagcctgcggcgtagggcgcagcaagggcctgacgcttagcgagcaggcgctgcgcaccaagcggctgtcgcctggagggcacgttcaggcagaagctcctcagtggccacaagtccgctagctccggctacagcccttgccgcacactcgcgtcacctgagcctgtgtaggtgcgccccccaactcctcccccagccaggtcccggggacgccggcagcgtcccccacccctggcgccgctcatcctgggcaggatcggccccgtctgaggctgcaccgcattagggagctgcacccctcggcttgacctctgatggccgttgcaacaacatcaaagcctttggaactttgtagggggtacgaggggctaggaaaccaagaaaacatctttttaaaaatataagcgatcgggccgggcgcggtggctcacgcctgtaatcccagcactttgggaggccgagacaggtggatcacgaggtcgggaattcaagaccatcctggccagcatggtgaatcccgtctctactaaaaatgcaaaaattagccgggcgtggtggcgggcacatgtaat

SEQ ID NO: 48858 - DNA, 1285 bp, Homo sapiens
catctcaagaaaaaaaagacagttccctttgtaaaatgggtcaaggcttaagggcccctcctgcacgcagtgtccaggctcagccaggtctgatggcagaagcaacacagactcatgatcattggcctgggcacaggtctctgccacgggcacaggtctctgccccactgcagcttggccctcctctctccaggcctcagttacctcatccatgaaatggagctgaaggaattcctgctaaacctgtgcacaggccctacaagcagttaaatgctgaacctgaatgtaccttttttattttttcaagactgagtctcactctgtcacccaggctggaaagcagtggtgcaatcgctgcagccatgaactctgccccggcctggcagtgagttggggctctgtgaaatggttcaggaggggagaggaaggctattatcccacgcttctgctacagatcgcagtctctcccctctaaaccgcccttgcccttcgctggctgcgtctccctgctgtgaatggtcgtaattaccaatacgagatcgtcagtctgagctaaagacctctaactaggcagggagaggccaaggctggccaaggctcttgcactttgccccaggagagagccacagagccagcccaggcatcaccccagccagttggtttaaaattgtgtacatagcatggctgtgattcagtgagcttggttgtcttttttttcccccttcgcaaaattcagttactccttgggctaacagacagcaggttggaaaagataagctgagagttgcccaggcagtgttaaagagagaggagaccgaagaacagcatgagcaggaaggggcaggagaaatgtcaagggaaggcctgtccaccaaaggcgtcactgtccaggggcagtgggcaggaggtcactgctgcagggatgggttctttcagcaggactttctgcacagcactaggggcagaccatgaggtgaacccccacacacactgagtcctaactatgacatttccaaacagaacactctgaaatgtttgcagccgtgggtgtcatttacagccagcctgggttcaggaaagctcaggcaggtgcccccaagaataggtttgctgacttggcattcaggacagtaaactaaacccactcccctgacccccctttttttttttttgagatggagttttgctcttgttgcccaggctggagcacagtggtgcaatctcggctcactgcaacctccgcctcccaggtccaagcgattctcctgcctcagcctcccaagta

SEQ ID NO: 48859 - DNA, 1477 bp, Homo sapiens
aaaacaaagcagtttcaggtttagagggaggaaagtagctctccgagccaaaaaccaactcccaaggtgctccggtaaactcgtcctggaaaaatctcctatttaatctcaaaggcaaaacgagtccacgggcgcccacgacacatttcccaaccgcaaggattggtcacccgcgctgagacaccgccagctgcctatgacctagcctccaaagcggcagagtccccccttctctctccctcaactgccgtgatgggcacccctcggctctcctcccagacggttcggaagcagggacttctgctcctaaccccagccccgcagcctcgccctcagccacggggtggaaatcaggaccacaggcttcaaatcccctccccactccgggacgcttctgtccccccagggcaacgcgggatcaagtcccggcgcccctgccgcggccggggtctgtggtttgggtccgagagtcccatcccggagcgttccggggatgttctgtgagaggccccgcccgaccacaaatgttgcttcggaaccagcgtcctggacggggaagtgggagccgggccgagggaagccgccgcagagggaggcggccaagaaatgctccgcctcacgccttcggggcttggccggccgctgcagacgccggcaaccagcgcctgagacagagaagccgcgcactgggaggattaagggagccgagggcggcctggaacggggcaggcggggctgacgaggctggaatgtgggacgaaggacagcgggaggcaccgacgcgcaaccgcccccgccgcgcggacggcacagaccaaccgctccccccaaccccggcccgagacacctcgccgccccgctcccggagctgagagccgcgctgctcttggccctagtccttccgctccgtacctcgcctgcgtctccaccggcgtccaaagccccgctcgcccgcgtcgttcgggtaggtctcgactccgcggtccgctaccgcctcatacccaccctcctcctcgccccgctcccggcaccgccagaatgcacgttacgcacggcgtgcaaacgtcacttccgtggcctttggctcaggacgggaggaggtgtggatccaaaggtggcgcgtgcctgtaaccccacctactagaaaggctgaggcaggaggatctgttgaacctgggaggcagaggttgcggtgagccgagatcgtgccactgcactccagcgtgggtaaaagagagagattccctctaaaaaaacgaaaaaaaaaaaaaaaaagaaatccaagataagatcacagaactggcaggtttggtttctcctgaggcctctcttcttggcttatagatagtcactgtcaggcctccgagcccaagctaagccatcatatcccttgtgacctgcatgtatacatccagatggcctgaagtaactgaagaatcacaaaagaagtgaaaatggcctgttactgccttaactg

SEQ ID NO: 48860 - DNA, 2208 bp, Homo sapiens
aatttttttttcttttttgagacggagtttcgctcttgttgcccaggttggagtatagtggccgtgatctcgcctcactgcaatctccatctcctgggttcaagcgattctcctgcctcagcctccctagtagctgggattgcaggtgtgccaccatgcctggctaattttgtatttttagtagagatgaggtttcaccatgttggccaggctggtctcaacttcctgacctcaggtgatccacccgcatcgcttaccaaagagccaggattacaggcgtgagccactgcgcccggccaaaattttaaaaaatcagctgagtgtggtggtgcgcgtctgtggtcccagctactcgggaggctggggcgggaggattgcttgagcccaggggttgcaatgagctatgattgcgccactgcacttcagcctgggtaacagagtgagactttgtcttttaaagaaaggagaaaatggcttgaacgggctaagaaccttgacccccaggagactccctgcgctgatagagcctctagggctggactccgcctcccagggagccgggagcatcttggggaagggcctgtctccatctgtgtgtcccggtggaaaaacggtcacggtggggagtcactgtcattattcattgaactcaagcgctcctattttgggttttctcgttcggatttctgcgcgagcgagtgaggaagaactggacacccgggcggtgccctgcggctcggggcggggccagccgcggtggcgtgtccgcagccacctcagccctcctcccgccacatcctccaggaaaggctgctcaggccttccattgaggagacaaggacccgctgctctggggccagacacacgagtaagtcgtgaccccctgtgtgaagggataaggcgtctaccctgacgcgggtgagaaccctcttcacggcagactccgacgcccagttatgagagcgtagcggcgcaccaccgccgggtctctcggagagggcgcgcccgctggccagaggaccaatcagtgcacggcaggctcgcaggccgccccccccccccccccccaacccagggaccactcaggcgccggccgctggcgctgcctgctcttcgactgggcgagcttcctgccaatcagggcggaaccagcgcggcgtcggccagtagcgggaggcggtcgggtcaggccccagctgggcgcgagcgggtcggcgttgagggagccaccgccctcccgcctgcgcactgcctctcgcccccctccggccagcccgcagccggccgcgtcatgccaggcgctgctcggcggtagggagtgcccggggccgccgcctccgcccgcccgaagccgcgcccactgcccagagccagagggatggtggtagtcacggggcgggagccagacagccgtcgtcaggacggtgccatgtccagctctgacgccgaagacgactttctggagccggccacgccgacggccacgcaggcggggcacgcgctgcccctgctgccacaggaggtacccgggcgggcggcgggccgcggggcgtggggaggggcgcgggggagaagcgggcgcggggcatagcggtcctcggcgggtgggcggggccggggttgggggcggggcccgcggacttgcgcccctcccccgcccacctgcaactcccccgcccacctgcacccctacccacccaccttcaacccctgtcaattacacccactaggtgtgcttccccaccccctacaccctccgcccagtagtcactggggtgatttactcccatcgccatgtcccacttttaccgaagacaggagggagggtgggccgtgggagggggaccctggagccccgagagctgatggtgtgtctgaccaggcaccgtagctcgagcctgtaatcccaacacattgggagggaggatcgcttgagggcaggagttggaggccagcctgggcaacatagcgaggccccgtccctactacgactggaaaaacaaaggcattttgggttggatgaataaaaaaaagaaaagaaaaagatgtcttctagagaatccaacaggatgctgtagtggttgcccacacctagtctccagctacctaaggaacaaggcaaggagctgtctgcacataaggggcaggccagttcatagatgtaggcacggtcacctggcatcccatggctttcactcacaggctgct

SEQ ID NO: 48861 - DNA, 1910 bp, Homo sapiens
gtgcgcgccatcatgcctgggtgatttgtaaaatttgtttgtttattttaaacagagtctcgctctgtcgcccaggctggagtgcagtggtgcgatctgggctcactgcaagctccgcgtcccaggttcacgccattctcctgcttcagcctcccgagtagctgggactaccggcgcccgccaccacgcccagctaattttttgtattttttagaaaagacggggtccctgtgttagccaggatggtctcgatttcctgacctcgtgatccgcccgcctcggccttccagagtgctgagattacaggcgtgagccaccgcgcccagcaagtaaaatttcttttgtagagacagtgatcttgctttgtggcccaggctggtctcgaactcctggcctcaaggaatcctcctgcgtgggtcttctaaagattcagctgcttttggatcaaccgatcgccttaagaccctttaactcgaacaactgtcacatcctcggatccgcgaagggctgaaactcaaagagtttttgaagcgtccctcggcgcagtggctccgctccacctcccattcgcgctaccaccgcggtcgcagcgccaggatcgccagggggccagcgtcgctctcccgctgctgcgcgccggaagccggaagcagggactgagccacagactaggaaaggcaggcttctccggggctccccagtgccctagctttagcctggaggccgccctcttctatttgctcttagacgtcacgggggcaccccagtcccctcgaccctttggatccggctcacatttcctccggtgaagagccaaaggccccggaagtgacgtttgcacggcttgcgtatcgtgcgtgcgcaggccgcgccgggggcggggctagcaggagggtgtgtgtggggcgggagcggacaacggagaccagacctactgcagccacgcgggcgagcggctgtgtggatgtcggcgaagccgcgggcgaggtacggaacggacggactggtgtaagagcgtcgcggctctcagctacgggagcggggcggccgggcgtctcgggccgtgggcggcggggcggtcggtccgtgccctccgcgcggctggggcagttgcgcgtcggtgcctcccgctgtccttcgtcccacattccagccccgtcagctccgccttcccagttccaggccgccctcggctcccttaatcctcacagtgcgcggcttctccgtctaacgtgctcgttgccggcatctccagcgcccggacaagcccttgaaggcctgacgcggagcatttcccggccgcctccctcttcggcggctcccctcgtcccggctctcacttccccgtccaggacgctggctccgaagcaacatttgtggtcgcgcggggcccctcccatgacctctctggaacgcgcctagctgggacgctcggacccagaccacagctcttggccgcgacaggggcgccgggacttgatcccccgtcgccctggggggacagaagcgtcccggagttgggaggggatttgaagcctgtggtcctgacttccaccccgtggctgagggcgaggctgcagggctggggttaggagcagaagtccctacttccgaaccgtctgggaggagagccgagagatgtccatcacggcagtttagggagagagagggagggactctgccgctttggaggctaggtcataggcagctggcggtgtctcagcgcgggtgaccagtccttgcggttgggaaatgtgtcgtgggcgcccgtggactcgttttgcctttgagattaaataggaaattttcccaggacgagtttaccggagcaccttgggagttggtttttggcttggagagctactttccccccctaaacctagaactgctttgtttttctttattatatt

SEQ ID NO: 48862 - DNA, 1596 bp, Homo sapiens
ttgtgacactggttaattatttcacttctgggtctcagttacgctttttttttttttttttctttttgagacagggtctcgctctgctctgtcacccgggctggagttcagtggagggatctctgcaccctcaacttcctgggctatcaagcgatcctcccacctcagcctccccagtagttgggaccacaggtgcccgccatcatgcccggctgatttgtaaaatttcttttgtagagatgggggctctccctctgtggcccagggtggtctcgaactcctggcctcaagcgatcctcctgcctgggcctcctaaagattcagctgcttttggatcaaacgattggcttaagaccctttaactcgaacacctgtcacatcctaggatccgcgaaggactgaaacagagtttctgaagcgtccctcggcgcagtggctccgctccacctcccattcgcgcttccaccgtggcctcggctccaggagtcgccgcggtgccggcgtcgccctcccgctgctgcgcatcgggagccggaagtagggactgagccacagactaggaaacgttggtttctccggggctccccagcgccccagctttagcgcggaggctaccctcttctatttgctcttgggcgtcagagcggcaccctactctgtgtaagcctttggatcccgctcgcacttcctcccgtcatcagccaaaggccccggaagtgatgtttgcgcgccgtgcgttacgggcgtgcgctggcggtgccgggggggcggggcaagcagggggtgtgtgtgaggctggagcggactggggaacccagacctgccgagcgacgtgggcgagcggtgacctggaccacggcgcagacgcgggcgagctgcggctcggacgccagcggacacgcgggcgaggtacggagtggacggactggggctaagagctgcgcggcggggcatcttgggccgggggtggcggggctgttggtccgtgacgtccgcgcggccgggacagttgcgcgtcggtgcctcccgctgtccttcttcccatattctggccccgtcagcgccgcctgccccgtttcaggccgccctcggttcccttaatcctcacagtgcgcggcctctccgtccaacgtgctcgttgccggcatctccagcgcccggccgtgccccgacggcctgacctggatcacttcctggccgcctccctgtccggcggctcccctcggtccggctcccacttccccgtccaggatgctggctccgaagcaacatctgtggtcgcgcgggacccatcccaggacctccccggaacgcgccgggatgggacgctcggacccagaccacagcccccggccgcggcagggcgccgggatttgatcccgcgtcgccctggggggacagaagcgtcccggagttgggaggggatttgaagcctatggtcctgacttccaccccgtggctgagggcgaggctgcggggccggggttaggagcagaagtccctatttccgaaccgtctgggaggagagccgggggatgcccatcacggcagtttagggagagagagggaaggactctgccgctttggaggctaggt

SEQ ID NO: 48863 - DNA, 1734 bp, Homo sapiens
caatttgtgactcaaccattaatactttgtgacactggctaatttatttcacttctggatgtcggttatgttttttttgagacaggatctcgctctgctgtcacccggcctggagttcagtggagggatctctgcaccgtcaacttcctgggctatcaagcgatcctcccacctcagcctccctggtagttgggaccacaggtgcccgccatcatgtccggctgatttgtaaaatttcttttgtagagatggtgaccttgctctgtggcccaggctggtctcgaactcctggactcaagcgatcctcctgcctgggcctcctaaagattcagctgcttttggatcaaccgatcgccttaagaccttttaactcgaacacctgtcacatcctaggatccgcgaaggactgaaacagagtttctgaagcgtccctcggcgcagtagctccgctccacctcccattcgcgctaccaccgcggccgcagccccaggagtcgccgcggagccagcgtcgccctccagctgttgcgcgtcggaagccggaagcagggactgagcgacagactaggaaacgccggtttctccggggctccccagcgccccacctttaccccggaggccgccctcttccatttgctcttgggcgtcagggcggtaccccactccgctcgaccctttggatccactcgcacttcctcccgtccagagtcaaaggccccggaagtgacgtttacgcgccgcgcgtaacgtgcgttcgctggcggtgccgggggcggggcgagcaggagggtgggtgtgaggcgggagctggccgcggagcccagacctacccgggcgaagcgggcgagcggtggtttggacgccggcggagacgcgggcgaggtacggagcggacggactggggctgagagctgctcggctctcagctacaggagcggggcggcggggcgtctcgggctgggggtggcagggcggtcggtccgtgccatccgcgcggctggggcagttgcgcgtcggtgcctcccgctgtccttcgtcccacattccgtctccgtcagcgccgccttccccgttccaggccgccctcggctcccttaatcctcagagtgcggcctctccgtcccagacgctagttgccgggatctccagcgccagccgagccccgacggcctgacgcggagcatttcctggccgcctccctctccggcggctcccctcgccccggctcccaccttccgtccaggccgctggctccgaagcagcgtctgtggtcgcacggggcccctcccacaacctccccggaaagcgctggtatgggacgctcggacccagaccacagcccccggccgcggcaggggcgcggggacttgatcccacgtcaccctagggggcagaagtgtcccggagttgggaggggatttgaagcctgtggtcctgacttccaccccgtggctgagggcgaggctgcggggccggggttaggagcagaagtccctgcttccgaaccgtctgggaggagagccgagggatgcccatcacggcagtttagggagagagagggagggactctgccgctttggaggctaggtcataggcagctggcggtgtctcagcgcgggtgaccaatccttgcggttgggaaatgtgtcgtgggcgcccgtgggctcgttttgcctttgagattaggtaggaaattttcccaggacgagtttaccggagcaccttgggagttgg

SEQ ID NO: 48864 - DNA, 1663 bp, Homo sapiens
cagtctcccaagtagctggtattacaggtgcccgctaccacgccaggctaatttttgtatttttggtagagacggggtttcaccatgctagccaggatggtcttgaattcctgacctcgtgatccacccgcctcggcctcccaaagtgctggattacaggcgtgaaccactgcgcccggcccgatcgcttatatttttaaaaagatgttttctgcgtttcctagccccttgtacccccgctacaaagttccaaaggctttaatgttgttgcaacggccatcagctgtcaagatggggggttcagctccctaaagcggggcagcctcagagggagccgagcctgcccaggatgagcggcgccgggcggcgggggacgctgcggggtccccggtccctggctggaggaggtgttggggggcgcacgtacccagcctcaggtgaggcgagtgtgcggcaacggctgcagccggagctagccggcttgcagtggccattaaggagcttctgcccgaccttctgtttgtgcccgccaggcgacaaccgcttggtgtgcagcgcctgctcgctcagcgtcaggcccttgctgcgccctacgctgcaggctgggaagtcgcgccggtagtagtagcacaggcagtgggaaagctcctccttgtagcttactggtgttggccgccgggtcggagcctgcgaacactgaccggccggctgtggccacgcgtctgcgcatgcgcgcttctggacgacccggcagccgctcctcgagttccgattggttccacatgaggggcgtggctctctgtcgtcactggggagcgccttcgctgacgtcacaggcgcgggccctcggcgacgcaatagcgccaggccttccgcgtcgtcagagtgacggtacagtgcctggagctgggctgttttgtcttcagagtggtgcctggtaaccgcgacttccccgccatgttctgtgtgttgctggctggagaagggtggttgacaaactctgacccagcacggtgtttctgtgggtcaaaactagaaaactatatccgggcgccgaggtgaaaggatcccttcaggccaggagttaaagagcagcctaggcaacgtggcgcgaccccatctctgtagtcccacctcagcttcccagatacttgaaccccaaagttcaaggctgcagtgagctatgatcccatcacagcactccagcctgcgagactgaggtaaaccctgtctaaaaaagtaaaaaaactatccaagtgtgcaacagggagggactgcttaaagaaaacagaattgtatgttcaaatacttttaacaagtgcaaaatgtataggctgaaataaatagagctggccgagcgcgtttgctcacgcctgtaatgccaacattttcggtgccctaggcaggccatcacttgaagtcaggaactcgaggccagcctggccaacatggtgaaaccccatgtctactaaaaatataaaaattaggccgggcaccttgcatcgtttcagggggctgacacctccctaagggcccggtaattgaatccctcggatttgagagtgagaaaccttggctcagttcttcccagggggatcagcccaggggtaagcgaggagaggccagaaagcaggacccatgagaaggaccccctcctggagtt

SEQ ID NO: 48865 - DNA, 1561 bp, Homo sapiens
tcattttattttatttataaatagagtcagagactccctatgttacccaggctggtctggaactccaggactcaagcgatcctcctgccttggcctcccaaagtgctgagattacaggcctgagccaccgcgcctggtccaaaattacatgtttatcagcagtgattaatatacaagcacatcaacagacacacgcatagcacacacatgagcatgcacacgtgtgcgcactccctacacatctacgcatgcacacacccataccatcacacaccacacacgcgcacacagatgcacatacatgcactcactgcacacaccgttgtacacgatgcacactacaagccacatacacgcactacgcacacacgcacacgcacaacaccagaccggcacacagacccataaacgtccatcacgcactccacgcacgtccgcatgcacgctacccgtcccggaagcgtggtctccgccgcctgcctctgacgaagcttgtcccggccgcgccaccgtcggacgcccggggtcggaggtcacggcggcgttggaggtggcgtggttttttttttttttttcacccggaaaccgcggttgccggagcccgaactgaggcggcggcgggagcccggttggcgtctggtcttcgcgtcggccccgcggagccagacgctgcccccggcgcggggagaagatggtgcctagcggcctcgggcccgccacgcgccgccacgagtgagcccagcgcgaccgcgggcgtccgccgagcagctggcccggctgggcccggggcgcgcagctgcccgccggggcggggtgagccggggctggagggcgggctggggtcgggcccagtcggggctgcccgcggggccgggagcggggagcgtgctggtcgggagcggctcctccgccggcttttttcaccgcttctcagggtgcagaccccgccccaactgctggcgggggtcgcccagcatcggccgacctcggcctggtccccccacactggggtttgcccactcgcgtcccccgagccagggttccctgccggccttggagatggcgggacttcccacgtctggagccgaggcctggataattcggatttggcacgggaaacatcttggtcgtttgccatttttcggctttggggagtgtttgcgtttcttctccgtttggcagtgaaacacatctcagaaaggtgggagggagagactcacgtacgtccacaaagttaaatggcatagtggtgttccctgtgtcaagcttggtaaatatccggaatggggtggattctttcttcatgtttttaataaaatgaggagtgatcgcaaggtaatctagaggcatgtagtttcagttcccttgatggggaccatcagaaataaaaccaggcttgttgtgctgttttgagtcgtttgaacgccgtacccatcggacagctggtgaggaggcctttgtggaagaatctgatgtctgagtttagttctcaactagcaggtgacagccctcactggctgatgaatggtgagcttctctgaagcctgctttgtaaagattg

SEQ ID NO: 48866 - DNA, 1178 bp, Homo sapiens
ggaacattttcaaaactcagaaccgtatttgccttaccatttgctcactggagaaaaatgtcatgggaggacgtaagaaacacaagggtggggtggggtgcagacagctgctgccacggaatgccagtccctagatggcagcagtgaagacactacgcactttaaactgctagggctactgagatctatgacaccagatgtacccacaactatgacagtattcgtaagactaggttctcagccatcattattctaggaaaaggaccacaattacgagatttcttggctgcagcttttatgacaccaacaaaacaaaaccccaaaccaacaacccaatccgaaccaaccaaataaagaagaaacccttggcttaggcgccaagctcggacagcgacgtctcatgctcacagcaggaatgttccatttcctccccggccaacaccccagcctggcccattcactcgacttgggcagagacaggccgcctcggaggtgacggctcaggcccaggcccaggcccgagggagggggctactcacacgccgctccgccagccgacgaccttgtttttgtagcaggcgatttcgaagcgcttcccggcacgcttcatccgtaccacggccacattggttaggcggatctggttggtgggggtgaagatcgacatcgcggctgttcaaagacccagaagccggcgaaccagggctgacccgcgccgtccagcctgaaggccaccagcgcctcgcggtaacgaccgatcggcgcgcggcactgacccaaccaccagtgcgcggcgccgcgactcactagcttcaggcagccgtcacagtgtgtctggcaggcttacttactgcgcaggcgtcaggtggagcagaagccgggaggggaaaagtgagcgatgacgcctgcgtattgtggctttttacgccatctttccacgcccaaaaagggaggtgcttttccttggcgtatttactttcgccaatgagctgagagctctgacaggatgctcgcggatgtttagtgaccgggttaaaacacagcgttggcaccacctcgttccgcggaattcaagggccagacccactttataatataaatattttttataatagaattattttataataaatatttttatttactcacccttttataatagaaatattttaacataa

SEQ ID NO: 48867 - DNA, 1418 bp, Homo sapiens
aaggaaatgcattcagtctatggggatttcacgctagggcttcaagttcacggccctgtgatgggatgtgggcagggcctgtctgggacaggccgaacccagctccttacagggccgaatcctttgcccgcagccaaagaccccgaaggagcctgcctcggccttaaggcgcaaccaaggagcactggatggctggggcgctgaggacgccgctccggggcctccacgcctcgccacgcccctcggccatgttccccccatttccagggaggttggaacgccgtggttctcaaggaggacgcgcgagaagggagaccgcgagcccagctcacctctagctctcagctcgctccatggactcaatacccgatccgcctcggggcctgggaaagttccctccacgactcccacaggcgccccgcctcctgggctcccattggctgcttttgacgttgtgctccaccctttctgggcggggcggaaaaaatacttcccgtctctccttttcgcctattagctccgtcaaaggtcgagtccgtgacgtcaaagagcatgggccaatcagagcacaccggactgctttttttttttttcccgaacgaccgcagcagggtcacaagggagatgtccgcccccagtcgtagcctcggacggtttctgagcgttggtgtttggcacgcgccaccctctcttgctttggttccgccatgccgatgtaccaggtaaaaccttatcacgggcgcggcgcgcctctccgtgtggagcttcccacctgcatgtaccggctctctaacgtgcaaggcaggagcggcggcccagcgcccggcgttggccacctacaggtaggagcgcgggcccctccttcccccccaccccgcgccaagtgcgcacgcgcggcggccggctgctggcccgagtccccccgggccggaacgagtgtgtcccacccggtttgcggtcccacccggttcgcggtcccaccccggcatttgtgccggccggccagggactcacccaaacctttatgttttaaaagatttattcaggccgggcgccgtggctcacgcctgtaatcccagcactttgggaggcccaagcaggcaggtcacctgaggtcaggagttcgagaccaacctgaccaacacgttgaagcctcgtctctactaaaaatacaaaaatcagccgggcgtgtggcgggcgcctgtaatcccagccactcgggaggctgaggcaggagaatcgtttgaaccctggaggcggagtttgcagtgagctgagatcgagccattgcactcgagcctgggcgacagagctagactccgactcaaaaaaaaaaaaaaaaaatagagacaagggtctcactatgttgctcacgctggtctcagactctcagggctcaagcaatcctctcgcctcgg

SEQ ID NO: 48868 - DNA, 892 bp, Homo sapiens
tttactgaaacctgttttatcagcaaggtctttatgacccgtatcttgtgctgacctcctatctcatcctgtgacttagaatgccttaatcgtctgggaacacagcccagtaggtctcagcctcattttacctagcttctattcaggatggagttgctctggttcaaatgcctctgacagatggaaattatcgatttcctgtttaaggatgaaacagtccttgaaatcactgaacatcatgcaaataatttagtttcaatcccctacttttctcagccccaagcccacgtttccttaccccatggaggaggatttagaagccaagccactgggacctataatctgggaaaaaagccaagtggctccccatgaagtcaacttggttttccattctgttattaatttttcttactgcattttgcgattgaggattttgccttcttggttttgaactcacctctgcattacatggttttgaagttagattgcatccaaaatgtctgtttgttttggcaagggtggggccggcctgtgtcagctccatgtgcctattgccaaagccatctcggtcatgtttacattttcatttgcagattgccaacacagcattaatcaccagctacttggaaagagagcctgaggctttcacaaaagttaaaataaaatcaaccaaccaagcaaacaaacaagaaaaaacgttcaagccagtttgttggttaaagtaatgaaattgatagatttttataaaatttaaaaacctgggtttggcatggtggttcatgtctgtaatctcagagctttgggaagctgaaacaggaagatcccttgaggccaggagttcaagaccactctagccaacatagtgagactctaatgtctacaaaaaaattat

SEQ ID NO: 48869 - DNA, 779 bp, Homo sapiens
caatgaatgaatgaatgagtacaacagatactgcacatccataacaaagaatgaagtgccctcacatgctacatctaccctcacatgctaccttgaaaacattatgctaagtgaaagacaccaaacacagaaggccacacattgtgtgattcacttaatatgaaatactaatccagagagacagaaagcagattagtggttgccaggaacagggggagggagcataggaagtgattgtgtaagaggcataaggtttccatctgaggtaatgaaaatgttctcggcgatggttacacaacgctgcagacgtacttagtaccgctgacttctacacttttaaatgattgcaatggcacattttatgttatgggcatttttatcacaataaaaaaagaaaaaaaatctataaacgttttgaaccaaagaggagagaaataaacccaacaaaactgtggcagaaaggcaaatcaaggtcaaaagcacacatggggcttaaaggtcaagacgaagtgaaaaatcacccaacaatgagagaatatgaaaggtggaggcagggggcaggttggacatgggggaggcacatggagactggtatggaatgactctttttagtggggacgtggaggggttggagagagactctgaaaactttgaggtgttctgggcactggggcataagtgcgtttgagattgcattggaggtgaaggtttctgaatccaccaggaacagaaagttagcaaagggtgatctcttcgtaatcttttttttttttgacatg

SEQ ID NO: 48870 - DNA, 596 bp, Homo sapiens
gatttgcatctccaacagaagagaacacaatgagacccacaggcattgttagccactaaatcaagccttagtttggctaagtcaccagcctctgctgccatcgtatttttagggaatgaaaagaacagttctttttgctcagaatgctagatttatattgctttcacttagcaagttaataattgataagttggggcagcaaattaacactgaacaaaagagcctggcggtaccagggtcctgggaaggctgcctaaatcaatatacactcatgaattttgagtgcaaaaggttgagttgagaaagagcacagatttagacctccattaatatttgaaacacactctgcacaggagaggtttgctacagcccaaacgttaactgtaggggcttcagagaaatggcttctaaacaaatttgatagcaggagattttcccctccgaagattttgcgggaaaaatcagtcatctttgttgtttatgctgtcagaagccatctattaaagatctaatgagggtattttttaaccaattaaacataccaatgcaacatttatctgactcaatattcatggatgctagaaaaaggaaacgca

SEQ ID NO: 48871 - DNA, 977 bp, Homo sapiens
ggtaaccagaatagatctcttcctctccgatcgtcttcccccgagcaccttcctcctttcacttagtcagtgtaataaatataattggaagcacacacagctcctacttgcaggcaagcataaattattcctctagcactaggaacactcatttgtaacatagattaaatttggctctggactggggagggattacacctttaaaatttgtttcatcatttaaggaaatcactcactctccacatcaggatggattagaatgtgtcagtattaataccggacatttccctgttgtcacttgttgttagaggaacaattatttcacgtctgagtaaaaatcttactcggagggtaaagttaatgtagcatgcagagctgtgtggaaacaaggcttggacgtcttatgaacacaggcaattgcccattacggtgttggttaacatatttcttccacttcatctgttttactgtatataagagcattattgttttgcttagaagaggctttggccgctctgaactcggatcaacgtgacgcagactcacagttcaaaggttaaaagagaattgatctgtgagctttcgccaatctcttgctctgctccctgctctctaaaggataaatctctttttcagataaatccagattgctttttcaatagattggcttttggcctcttctgcagaacagtactttgacttaacctggacagcctccctgtagctatgaagaaatcatttctaacatctgaggttaattcggtaaatgaagcattggattttctttcatggaagcaagaaaaattgtttggatgaggttagcaaaggcaaggcaagctcaggggacattccctggggctctacccctggacgaggttctattgaacctttattgtaaggctaaatgagtaaaaatggggcctggggggagggtgggggaaccaagtagtcatttctgcattgccttttgcgttttg

SEQ ID NO: 48872 - DNA, 532 bp, Homo sapiens
tgctttgctctaataactttacaacatccttcttcctacaagatcatcgtgaaggggcctcctggactgatgcgcctgagcgagccccctctcctttctctgggtcctcgtgcagcctcgccctccctctccagggcaatgatctaataatgactgtcttctatattggcctgcagtctcctctccgctttccccgccttggaattgctattggcctctagggggagctcaagacctcatcatgttgtaggcccatgtccaaggcaggagtcaactcacagatattcagtaaatatttgtggaatgaagggacagatgactgaagggatggatgtcaaaagtaaggataaaccttggcttccgaagctttttctccgtcaacattttatgcttttggattctctcctctttgcttcgtgtttggctctggggcactaaggccatcttctacttggatggaaacaaatagacctgccattccccccaccatttctctttagaaagccaggtgcccagccgggtgcggcggctc

SEQ ID NO: 48873 - DNA, 962 bp, Homo sapiens
tagctgctctgtttctgtgtgatttttttttttttgccttgtgtttctaatgaaaataatctattgatcctgttcaaaagaggaacacacagctccaaatcattacctcctggcagtaactaatttttgagtcctatctgcttcaccacactcctttaatggcagttgaataaatatctaaaatgcagacttttcagtcctttttgaaggatagtgtcttccaagaagggggcgaaaatcaataaaaccaacaaatatttaccgagcatcaaactatgtgttcaatgccaagctagacaccctcagggtctttgtccttaaggaggttacacacagcagtggaaacaagataaggtcaaaagggtaattctgaactgcctgaaagggaactcaaacctgccatttgaccttcccttgctcctgatcaaataacagctcaggggaccagggatggacatgtgaccaaaggcagccagtgcgagttattgcttgtgtgtgtggcctggctcagggagataaactggtacaatccaattctcaccagaatttaggctaaaaggcatagaagtttttgccaacgggggtggtgagcactagagctgaaaggtcatattgatttagggaatagggcaaacaattttccacaaaaaaagggctaatctgcacaaagagatgaattgcacaaacccacagcacacaatcagaaagagaaagagaagacaggtttcagtttgcgatgcccagacacagtttcccagagactggttctactttgatttctttcctcggattctgtgagatctctttacaagacaacagctcctttttgggcctcagatggtttgactatattctgtaacttggaacccaaaaacccaaaagaagctcatgcacttatgtactaaatgccacattggccaggtgcggtggctcacgcctataatcccagcactttgggaggc

SEQ ID NO: 48874 - DNA, 511 bp, Homo sapiens
aaactgaaacccacaaataatccatacatttaattttggtggatgcttccagccagtatgaaaatttcccactgtgaatgtcaccgttgttcctgcccctcctctgtggcaggagcaaacattaccaaaacatcacattagcagggagaagggaaaaccagggttcgaaggatctggggactggctaatcatggcttatcagactgcaaataatgaagcctgactgagtcataagagggattgcccaatgtggtggcaaaggacagagtggatttgtaggatcccactctgaattccaactcataatcgcactctgacccctcgggccaccagctatatgtgacccttggctaactcagccaactgtgctgccatttcttcattctggactctgcagcaaagacacatgtggaaaatagaacaagaggcagggggcggtggctcatccctgtaatcccagcgctttgggaggccagggcaggcaaatcacctgaggtcagttcgagaccat

SEQ ID NO: 48875 - DNA, 749 bp, Homo sapiens
aagcatgcacaatcatgcacggctaattttcttatattttgtagaaacaggtctcactatgttgcccaggttgggcttgaactcctggcctcaagtgatcctcctgccttggcctttcaaagtactggaaatacaggcatgagtcattgtgcccagtctaacactccttttcacatgtaatgccgttaagccgtgtctctccagccatgggcagtaggacctgcacttatccctaatgcattgctttggttaaatttgtccccttcatcctgctgtttacaactttcaggatattggtttttatcatccaacatgcttaccaggatcccagcttcatgttgtacaattatttaataaaactctttgtaagtattaatgcaaatcacagattagaaagaaaaaagtcagaaggcaagggcagagctccaaagcgtgtcactagacacttcccactggattagcatttacttttaaatcaattcctttgaaggggagctctttaatcagtaactatttccattcacttgtccctttttttgcgaaatactgtgctttcaacattccagatgaagttaatcacacaaaacttgctcatggtggagccacgctggttgctagtgtctgcggcttcctttgcttaatgctcacatgccagcccttaaatctttcattatgcattccttttttacaaaaaaaaagttgccgggcgtggtggtgcacgcctgtaatcccagcactttgggaggctg

SEQ ID NO: 48876 - DNA, 636 bp, Homo sapiens
atccaaattcacacagctagagaaaaatgacaccaggatttaaacctagactgtctgcctccagagtttaccctctcaaacattcccctatactatgactctgtaatactccttaaatgtgcaggttaaagattgttgtaattatctttgctgcataactacccacccaaaaacttcacaaagaaaaataccaagttcattctgctcatggacacagtgggtgaggaatttgggcaggacaccatggggacagcttgtctctgctctaccgcgtctatccaaggcatcagctacaaaggctcaaaggctgagaatgactcaatggctgggactgatatcatctaaagctattgcactcacgtcactctctacacacggtctctccatgtgacctgggctgctcagcctggtggctgctttcgagaagcaagtgtcccacaaggcaggaagtagaagctgttggtttctgaagacggatactggaatccagagcagcatcacgtctgccgttttctattgaccaagcagtcccagagtccagattccatgggaggggcagagaccctacctctcaaagaattttgtggccatttttttaaaccaccaataagatcgtttagcctaactcctttattt

SEQ ID NO: 48877 - DNA, 2781 bp, Homo sapiens
tcccagcacctacaactgtgcctgctaagcctggtaaggcctaataattgttaaatgaaaaacaatcaatcactcaatcatagatgtgtcagattgtgagagaaaacacgtccttactgttttctctaccaccctccttccagtaatactaataaaatgtgcacatttgtattctaaagaggtgaaatcatatacacagcgctctagcacggtgcctggcccattgtaattaatacatgccagtttattttccttttcttcctccacaagtatgggctactagggaggacgaagggttggtgccgtggtgtttatgtgcctggacagaaagtgaagcgtatccaagaggctgctgagagcgggctgtcggtctttctgatccgtatagatcaattccagtgccctgaaaaacgcacagctattttacccagagaggctggtcgcttttgttgatcgattctcggctgcagtcagctctttaatacaactttttatgagcatcagccacattgcggcgggaggaggggctgtggtggaaaaagcagggaaaccgccccccactcccaaaaagtaaaggaagcccgcggggcagggactgcggtttgccggtctaacgggtcctcgagctggggcggcggtcccggccccttcggccccgcccctcgcccgcggccgcctccgaggttcaagttcggcccccggctgttaggcctcgcgctcccggatctgaagccgcccgtgcgtccctaggtcccccgctggaagacgaggcgggaatcccaggggtcatccgggcgcggggtcgctcgtccacgcactgtggtgccacgtggaggaaaagtttccaactctgccagttggtgctcccactgcgcccaggcggagcaaaggcccgcgctttggcacccgctccccgttctgtctcctccagtcgcgccccctcccagggacgccccccttgtaccccttctctgaattcccttctctcctcgcagcgcaggtagccaagggaaaacacccttgggggctggtggggcttcccgagaaggcggcctcgggccggccaggggtagaggatccagggacaagtgtcccgaggaggatgtggggggcgcgcgcgcgaagtggcctgggagcaggggcccacacgcgtccccgctgcgacaggcgggatcctccggcggcttccacgccctggcgcgccaactctgcccggccgcggccgaccccacgcgggcgccccctccacgcccccgcccccgcccccctcacagctccccaccgcccccagtgcgcaggcccggccgccccagcgcgcatgccctgggctcgcgagcgcggccagcccccagccttttgctttctacacactctacaactggggagggggcgggggaggagggagcccagccgtccacgtgatcccgccggccggggccgcgggggcgggagcgcgcgccgagagaggcgcggggagggcgggtgcgcgggagcgcgcgcactcgagcgagcgagcgaaagcacgaacgagcgagcgagcgagcgagcgagcgggcgggcgcggggttgggctgaggcgggcggcggcggcggcggcggcggtgggctggccgcggagggggaggagcgggagctgcgcgaggcaggcgggcgggcggaggatggggcagtgcccgggctcccgctgcagccgcccggggacacgccgtgcaccctccggctcggggctttctcggcggcggcggcggcagcagcagcagcgttagcggcggcggcgagagcagcgttcccggctgcgcttctccctcaggcggggcggcgagagaagcggcggcggcggcggcggcacaccggtgtctctcccgctggagatttctttctgctttcctcatcgactgactgactcaccccctcccttttttgaggaagggtgacctcttctctgggactggaaaaaatatttttgtgaggaggggggcgggtggcagcgacagggtttgcttcttctcttctttcatctccctctcctcccccctcgaagaccgaaaagcaaaccccacaactgctccagcagcatcctccttcccttcctccgcctcccttctcctccgccgctcgcagtttcgccctctcttccgctaatgattgcattattatgctcccctctctggggggtctcgcccctcttgggtcgctccggagccccggcctcccctggctgcatttcttaaaaatttgggagcctgggagtgagttttctccgaggcgtgtgtgagaggcggcgggggtgttttcctgcgcgaggggcgggtgaagttcattgcccccacttttcccgcgacctttttcggacccgattttggatcgagttgaggggggcgcgggcgttttcggggggcggggggcgcggcggagaatggccgcggggagggctccccggagcctcccagtctcttgatcaaagcattccgctattctgatttattgcttgcttggtgagttatttttttttcctctaaaggagacctgtgtgttcagccattactttgctcggcgctgctcccaggcatctccgaccctcggtgctgtggggagccccacacttgggctcctcgcctctcgccctcgctccccgtccctcctcccctctctccgccccttcccccttttctttctcctctctttcttcccctctctcccttctttcggccgccgtctcccccgcgccctcctcggggcggagggaagccgtgaagggggagggagggctcggtgtcaatt

SEQ ID NO: 48878 - DNA, 832 bp, Homo sapiens
atcagtatcttggttattaagcatatactctctgaaacattcgaatcaaaccagtgtaagtcagataaatatgtaacaggaaatttgtttctgactattcactccaggtcaatgtattcccagctgccttgtgggtatcagggttatctgttccaggatcagctttaggaaagcccctactcaaatctccatgtagcaagagtgcaggctagttgagaacatgtgataattaaggttaaacaaaaaaatcaaggcagaatgactagaaattaggacagcagggaaagcaggggaagcggttgagctggtagaaatgggtaatacctatgattatttctgggatcaacagatacatccctgttgtagaagtccaaagcagtccttctttttggtgtcttttcctgcctttggtatgataagcccccctaacatctggcacactattggggtgacattgtgaagttacctctgcccacagtacttactccagtttgatatttttaagaaatgctcactttccactagccatagtttattggctttcagaaagtgtctggcagtgagtatgccaaaggtcaagaattctggcagagtttgatttatctctgctcccttgatagcagctagccttggaggcatagaagctcttgacaagtactatgagtcagaaggccacatgtgactaggtccctgcccacctctccagggtcaaatagatcttgcctttttccccagcccctccctgcactgttcctgaagagggctgtgtttttctttccaagccctcccatttatttacattccttctatctggagtacttcttaccccctc

SEQ ID NO: 48879 - DNA, 2036 bp, Homo sapiens
gaaaaattcaaattttaaattgctagcatgaattttaccattcatggttctgttgtgcaatgccagttttaaatgcagatatgagagcattcaacttgtatgtagaatcactgaatttatacagtttatgttatgcctcataggcacataatgtattttgtttttaccgcacagtggaaacactgcatgaaatgaactcagaggtttttatttcacttgttgatatgcacacatttaaccaacactctctaccttcagattacaatgagtaaggaaggactgaaagggactgtctttccctttcctcctgtgtcattttcagtgtgattggctaatacagggaagtaatatgtgtaagaaaaggtatgttaggatttcttgccattcatgtttgttttagaacactatttccagctttctgcctttaaattgaagttttgatttgaagggaaagtataggctcccaaggttgtctgtctttcctctggcttcgtcgtaaccataacacacttatagggtagtcccccctttatccatggggaatacattccaagacccctagtggatgccggaaaccacagatagtactggcccctgtatatactatgctttttcctatacgtacgtggctgtgataagtttaattagggacagtaagagagctaacaacaataacagagatttaacaacaataactaaaacaacagttattaaccacagtactaaaagctatgtgaatgtggtctctctctcaaaatatcttactgtactctactcaccctttttgtgatctgttgatctgataactgatctgagacggctactaagtgactaatggatgagtagcatctatagcgtggacatgctggacaaagggatgattcatgtttgggtgagacagagcaggacagcacagggcctcatgctattcataatgcctcaaaatttaaaactatgagttgcttatttctggaatttttcatttaatattttcagattgtagttgactatgggtgactgaaattgtgaaactggagataagggggactgctgtactctgatttttactgaactgtcacatattgcaggctcactggagttctatgttactgggacatacaaacactatgtgaatggggcagccaggaattcgctcgcgcctgttgcgtgtattttttctactcatggacatgttccactgtgttatccgacttaacttacaaaacaaagttcaaagataagattatagagcattaaaccaagtgccgagcccttctgagtgcagggccctgagcgattgcacaggtcacacacccatgaagctggctctgaccttaatagataaggaagcacagcagagacataagctgggcctgatgccctgtgttttcacactgaggaaagcatgaattatctcttacgttccttgtttgaaactcaggcttcaaaagtaggaaaggttagaacatcaatccattgtgcctttccaccttttatctgtaacttgctgaaatgttttcttcctcctcctccttttcttgtcatgttggatatgtccttaatatatcagtgtcaagtgttgtgtctgaatgtgaacctgaattctattctaagtgctgaaattaaaacagtgtttctctgtttagtttctaatgtattcggggtactagagtatctaaaacagcattttaagaggctttaacattttttgcctttttttctcccgaattatacaagtcatttttctttttctgatttgttgtctcctgagaaagtaggcctccctttttttttcttgcatgtggcagattagtatcctgtggtccattgcaaccactacagtggttggtaggaagtagaacttgtagaaggtgcagttaaaactactattaaagtagcagggaaccttctttgccctctcagatgaggaccaggaagttgactttcacatttgaggtggcacttgatgtagcctatattcttttttttttttttttttttttttttgagacagagtctcactttgtcaccctggc

SEQ ID NO: 48880 - DNA, 983 bp, Homo sapiens
agcctggctttgaggtcagtgtgtgtgtgtttggacatgtgcgtgcacacagaccgtaagtagatgaggcaagaactccctaaaccaagtgccatactctgcagatgggaaactgccatccatagacccagtagaaaggctgcagtagcacagcagcacttgggacagctgctccaactcaggcccattacctgctcctcctaggagtgccccgatgctccctgcacctttgttcagctcttccttgataatccaggataggatcgcacagtttctggttggtgagcttgtagtcagaagcccttttcaagcttaacactttcagagggagggtttatccaaaagacaccatactgattcaatatgttaaatgttgaaatgcttgtgaaacaacgcatatatgatagagatttttttctatctcaaaatcacttggatatgagagaccagagctattagaagccccattgactttgctttgagattccattggaggtcattgaactttggagcctcactctgaagccaagaaatttcaactttgccagtaaccacattaaaatgtgtgtacctggcaatggtgaaccagcctcatttactggtttccattctttgtattggctattcattatttcatcaacaagaatttatttttttactgccaattttacgtccaactaggtagtatggaatgcaagagaaggtgtaagttatggccattcccctcatgggccttttaataaagcaaagtaaatatgtaatccacttacagtcagtcaagagcaatatttttatttgtaatgattccacattttagcttaagaaagtatttattattctgggaagaaaaacattggctgaattaatggcagattctgaatgggctttgagcaacatttggaatacaagtgtgtaaggtggggttggtgagatttgctttatttcctgaactgctatgaattagcaaattctaaaccagctgt

SEQ ID NO: 48881 - DNA, 1055 bp, Homo sapiens
gactccgtctcaaaaaaaaaaaaaatctgctggggagaacaaagtcaatcatcactcatttggttctccaactacctgagcctaaattttgattggcaagtttggttgggttcagatactttcactagaaagccgtaggcctgtgagtctccagatgaaaggtgggtttagatctacacatctcctgtttcagggcagtgagctgttttggacccatctctagtagaagtttcttggagctctccagccacaataaaggtacagtgttcctgttcactcactttggcagagccttgaaaaggagcacagagacggtcaaatagtaaaatctaaaaacccgtagaaaaccctagcagaaagtattcttaaagacccagctgtatttttctgttcataagacccagataagcatagtcttcccatttgacattctgactttaacatgagagggagtttcatgcccccttggtaggacattggagtacttgttgcagcgtgcaagaagtggactttgtccagcttatatttagaataaccttgccagcacattccagggagttgatcaaggagttttgccaaactgtgataaatcagcacattgagcagcctctgatggctgataagcttgggagtgccagttaattgacaagaaccgcacttgtcaatcttttgaggtcatggaaatggatctcttgtctttctgcccttccccaagtcttcacccgcttgctctttggtagattgagcatggccttgcactgcatggagcacacctcccacctttgttcttgtgtgtttgctgagtaattaatctcattgtgctagtatggaaatagtctattaaaacattccggaggacaccatggagagggaggaaggaggatgaagactggcggagggagtagtttgctctgtttaattggttctttcacctaatggtagtttgtcaattaaggggatacttagagaaagtgaaattaatccatgtgggtcaaatgcagctattaatttttaatcaaaacacaatgttcaacaaatctgtagctgtgcttagt

SEQ ID NO: 48882 - DNA, 3542 bp, Homo sapiens
ttacctcatttattcgtcttatttaggggaagcgcagttcagggtgggcagtctagtttaagccattgagtctagtttaagccgttgttcaccatcatgattttatagcctttagttttattccctgtcagccatagacatccccagagatgcaagaactcatgcaggaaaacccatttaattaggacccactgtgaaggaccaggaaacagaccctaaagcactttatgacggaagctgttgatcaggaaacaggatgttttcctttccctgggtttaggtctggctcatactcctttggggagatctgggggcctgtctccatctccacggaaacagaacctgtaaccttcccagaatcaggttaccctagagggcagtgacatttatatctgcttttttgtttgttcgttgttctctttcctaagacatgtaagtggcaggttttgaactcctggatctctgcccaggggcctggcatgttgtatatctgccattctgatgtgtggagggcctcctgtctacactctctctgccccatggctagagacagctcattctgagagattctttttttataggaaggcaaagctcacctatccctaacatgcaaaaattttcacttgaggaggcggggaactggtttagtaaagatctttgcgtgaaattgaatccagtccttgccatccttcatgttcaactcaagtcctccttctataatgaagtcttccccagccagaagtgatctttctctttccattacatcagggccttttccacattcccacctttcccccctcatactgttgactagttttatttcccattagtgctttgcaccctagtgctcctaggtccatttaaagacctaaatggctgggatcacatcttctacttggttatttcccccacagcattcgatcacttataaactgtgttaattttccccacagtgcctcacatagagtggtgctcaattacaacttactaagtccatttgaaaagaaatacactgttggtcaagaaatctgtgtgctgagtgcttcaagggacacaggcagtataaatgagacatcctgccctcagggaatgtatagtctgagtggggataagacgaggccacatgaaaagtctactaatagcggccagggaccatggcttcctacaatacaagcactttgggaggccaaggtgagaggatcacttgaggccaggaatttgagaccagcctgggcaacatagtgagaccctgtctctacaaaaaactttcccaggtatggtggtgggtgcctgtagtcccagctactccagaggctcaggtgggaagactgttagagcccaggaggtgaaggctgcagtgagccaagatcacaccactgcaatccagcctgggtgacagagtgagactgtgtctctttgaaagaaaaaaagataaaaaaagcaaccagtaatacaattccatataggatctgggccagaaaaaaataagtactgattgtcatgatcatggtgatacgttagttatcttgggtatatacactgtttttacccatccccataacaactctacaaagtagatggtgctagacattcttagtctcagctctcttgtctttagagtgaggacaaatgattcgtccagtgagtacagagtgctgggattcagacagctctgtgagccctcacgtgaggctcaccctgggttccaatggctcagagcttctcctcttgcttctctctcattacccttgtgccctgcccactcccaacctttcaaatatattaaggaggattaaccatattgttcactgctattaaacaagaccagagacagagtctttccagcagaggtgacaccttggtgtctgaatgagaaaggagttgtccaaagacatctgccccacacagaagaaaattagacatatcacatgcctgctttgttataatggcataaaagtatgtgtatgttttaataagtcatgtactgagtgtactcagactatagcatatccatgtgtattacggtggttaagagctcatctctttagtaacaaacaggggttcaaattctgactttaccacttacaagctctatagccttcagcaagctagttaacttctcaggacctgttttttcattgataaaatgagtggggtaatacctagctcaaaaatttgttgtaatatttaaatatgaatgtaaagcacagtgcctgaggtcactcagtgaactgtgattgtggtgagcatactgttatatcccttcctgagccacagaacttgaatttgtgttcagagctggagactccagaacatctcccaaagggaagcaatttaaagttgaagtagcctctcccttctgtcagtgaggatgccaggtcttttctgagtttcctgtaagtcctctaggatatgttactttggataaagtctcactactttgacctgtggaaagaaattactgtccaagtacacaatttattttgacctcccaacacctttggacaattccaggctggctccaggcttcatcagaacaattatgtcctctctgtggaaaacattcctttcaaatgaatcagtagttactcaccttttcttttcccagccatatttttcagttgccaacagtgggatcagtgaggggtagtggtgtagctaacattagcccaatatagataagctccagattatccgtcatcttgtttgaaaaaaggcaggcctgccaaatttgcctacagttcccagtgagggaaagaaacaacaggttctatgaagaggaaggcacagaactagtcgtggaagtcacttttccagactccctccgttactcaggaggaaacaaacccagagtgtcttcttcaaggttaaactccctagaagctgatggaacctggccagaggctgtgaactttgcacagagggcatcatcagaatcaccctctgctcagtggatcgctgccctcccattactctgctggcacgtacctgatttggttgacatttccataattaatttataacagcaataaccctgagatgagcctatttataggtttgtgcaagctaggtaagaatatagattaaatctcagatcattaacatacttaaaggacttgggagagttttgtgattgtcaaatgatgtgattaaaaggcctccaagcttgatgtgtactgggaatccacaagtttactttccttgccaagctcagaaacaacaaaatagcaaaagataagcttacattccacccattcaccaaagatgttgggtcatccggggaactggaccagggtcatcactgatggtctacagctgctgccccacagatgaggatctgtgagcgtggttctgacccttgatatgccagcaagtgtggcaccaagagtcccatgggaagaattgctgtgactgtccacagcaatagagatgagtgtgagaagcacacctattagttgaaaggatgctattatgacctggactgctgtgcagacccaatcttactttctttcctcctttttatgttctgttgttctggttgt

SEQ ID NO: 48883 - DNA, 1713 bp, Homo sapiens
tttatgtatcataaagttgacccatttttaagtgtgcaattcaattagttctttatatattataaatacaaatcctttatcagatatgtgatttccagatgttttctttcagtctatggcttgtcttttcattttcttaatggtgccttctgaagcatgaaagttttctatttcaatgaggtcctctttatctctttttttatggttcatgcttttgctgttatgtccaaattcaaaggaatgttttttaaaaataagtattatcaagtcttgttctctctctttctctctgacacacatgcatacacacacacatgagcaagcttaaagtcctgcatgaccccagatttcatctggaataaaacccaagtctgttgctgtggcccacaaggtcttccctgatctggcacctgtgcctggtctctcctcagccacatgttccagcctcactggcctcatttttttcctggaaaacgctaaatatgttcctttctctgggcctctgcttttgctgttttctctgcctagaatgttgtctccagcaattcttgtagctggcttcctcctttcatccaggtcccacctttagatatcacgtgcatcatgatcacgccttagattattcaggagatatttattctactaaaagagccttcttccagccaataaaaaatacccttttaaaaatttccttcgcagtactttctgagattattttgactttttaaaaatttacatgtgagcaccgtggagaccttgtctgggtgctcactgcccctttcttggcaccttgagcagtgcctggtacaaatgagcggctgagtaagtatttgtggaatgctcaatgaatgttaaactgagaagcagttcagagatcagagtcactgtttaaacaaatcaggatcttcaacaattctttcctaatgagcctttctttgtcaaactcatttcattccaatcactcctgtgtttcccccacgcttggagaaacaatctttctggtgcttcctttcattttttttgcagatgtccttgcattggttcatattcttttcttccttggaagtttcccaccccaccccgaattaggaagttcctcagggacagaatccatgtcaactactttatcttctgtctctccatgcctagcaaatgctaggtgtttggtcactgagtagatgaatgaatgtacatccctgaccttcacccttgttccttgagtggagaaaaaagaccccaggctgtgtgtactcttcatttctggaatgagggttcttgtacatcccatcatcagctctcctgggcttttattctgaaggctagtggaggcacaactgcaaaagactttgcagatacgacgtgtgaaatgccaagaggaagaaaaattgaaagcaggagttgcatcttgccatgtgatgtgaatacctttctggcactatgacagtctcctcatggtgggcagtgggataccatgtgagaccaagcaagggcccaagtcacctgcagctctgagatgcctgcagaattctgtggaaaacttcccaaatgcacttagaccccagggttttgatgatgttgatggttctctgttcagttttttagtttctgtcaaaatgtattatctaaactctttactcagtcctacctacaaaatacactttcatatttcttactaatcactttactactgaagtaaattttactagttcactt

SEQ ID NO: 48884 - DNA, 4690 bp, Homo sapiens
gtgaccttgagcagtttccttaaccattctgtatctcaggttttaatctgtaaaataaggataacgggagtacctagctcttcagattgtgaggattgaatgggatatacacataaagctctcaatgcctggtgtgttaaagtgttcgcagttgttacttttttaaatgtttttactacttttgaaatttagtgttcaaggtgaactttttacagaagagccagggcaattggatgcactttgggggaaaaaaaaatcacttgcctcatccccatcttctccatcgcagtgaggactgttctcaagtgggcacacaggacacctgtctccttcatctgcaaggccccagtggctgtgctggggtttgaggtctctcgttcagaccaggtatgtgagggcttggttatcatgcactgctcctgaatccaccatctccatgtccacatccttggcagggagaccagagccaactgggaactctgccacctggagagacctttgaaacactgtcgccaccagtgttccatttgtgtgtttgcagaatgccaagtaagcacattctttttcaccctctgacatgacctcagggttactttctgtggctgttgacaaatttttagacatcccagttttatcagcggaaaccttgaagagtgacaaatggttcttggaagagttggtacatactataaaaatgtcagctggctcatttataacccagtgatgtccagtgtctgagccgtgctatcagcatggtctatagataactcaccctcacgatgctccgctctccccaagtactttgtgcagctgttctggttgaagacccagttgacatctataatagatatcaaatggagagcctcttattttatcactctctgtgtttcagcactggcggtccccatggactgtcagaaacaggcagccagcacgttatgggaaaggtgacttgctgagtccctgtgccctgaggacattattaagtgctagggaaccttgttagctcataaagttggttcaaaccaattattgttctgcgaccattaccattgccaagaatgtaactcttttaaattcttgcccataaagccgatctttccattacattatatcatagagcaagacttctgatctggccgcacttgtatcccaccggctgcaaagactaaacattgcatttgctgctcaatattggttacccttcagtgcttcatggaggcagcaagactgctatttatagatttactttctgtctccctagttcagcacagtcagttttgacacactgtcccagtaatctgatcagccatgctgcttttaaatgaaggtctaggccttggcctctgcagagagggtgacagctgtcagatacagatagtaggctacagatcctggctgctaaaaccctctcattcattcctgttacagatcattgaccacagcttgaagccatgctttacagttggccgattagttggcaagagatctacatactgtattagcaaggtcaaccactgagataaaggcaaaaacgtaaacccctgcactatttttaaaccagtagccatttgttaaagctggttattttggtacttgtctccgttcccctcttttttttttctcccaaaacaaaactcaagaaacttgttaaaactcttcggcagctaacgaagatgcctcagataatgagatggttcaaacctgagaaggaaagatgaggtctttctcagaaactcatttaggaacctcggataggaagccgtgttagctgtgcttataccttgttttaatcagaacgtgtctggaaatcttagtccagggagacctggatgaaagtgcagccagtttgagtgctctggccatgacagtaggttaggcaggtctggcctagaaagaggtaagttatgattcatacaagtttaaatcctcgctcactcctgaatgaggtggttgggcttggttgtcagctcagatgattggacccattttgtaggtgtttccttctccagagtccttccttcccccagcatcttgtctgtaggtattctaaagccaggcattattcaacacactatattggacttgtgtaaagagaacttgcaccctgggaaaccttgtgttaaagtgattaattgacttcttcatattcagtgaagatccttgctgtttcagaatcgacacaaacgaccaaaccttcaatctcatctttactcagaaaggggtccacctataagattttgaactctccttcaccatctgaccagcctcctctctgctttcacctctcctatgccttcactcccactgaacgttcctttaacttcatgacagccaccttcccctttacccttctctgtgtcctgctaagactatgtggacccagctggggttcccattctttttccaggttatactctctatggtctctattttgtgtcctcctccctctcttctgtgaccttactgcatcttcctgttgcattcccatctcccatctgatctcttgtctttcactctctacctcttgttgacttatgaccaagcacagtttccttagtgtacaggggcacccaaggcccttgacaatatgtctgtccaccatcttgtagtcttgcctcctgctttgtttcttctccacctctctaaggccccatgcacacatttgctgaacacaccctgccctgtcaagcttctttggctgcctttgctattcctccaccacgtaggtcctttagaatggcaagccttacaatgtatagtatatttagtatacatacccagtaaatatttgtaggacgagtgcatgaataaaagcacaatgtttgacattgttatcagcattgacccaaaccctttgagctagatgagcaataaagattagaagaaagaggttaggtataaccacaaacaaacttgagattgaaggctcgctagaagtagaactttgggtggatttctctctgtgacttgattttcttgcctataaagtgaggtaagtgatatctgctttataggttgttgggaggatcaaagaagaaaaaagggaagtaaagtgcctaacacagtgtctggcaaatggaaggaacttgatagatgttaattacctagctgtgccatataactcccaccccatcttcagtgttctgtgaaatgtattttcattttacccttggaaaggtacaggacaggatggaagaccagtttgatgggagagaaggctgggagttacataaacccccatggttttctgacttttcactagagtcaataaggagatgtttaaacagactttggcccacaaaaggtgactcactctcacattctcagcttcctgctcagggaatcagtgtggaaactgggcttccacttctcagcttcaaactggagctgggaaactttcgcctctgtggaggagccttggggaaatctcagcccagctgccatgaggtgtgcaaggggaggacgtgtcagccctggaaactccacaggcctctgttccagatgcacagggcagtcacgtctttgcaggggtgaagcaggaggacaccctccctcctgttctgttctagcagccatcatgaggtgggacttggagggaatctgatcctgttaggggaacgatccagtccggtgcagagcagctttggggtattaatgactgtgtgttccacagggggaacttgtccatttcatttatttgcaataaaatatatgagaggaacatctgcaggcagcttatatatttgtcaaatttagaagtaattcaggcatatgatggggagccatggcgattttatgaattttctattgttatgcattcgagttcccatggcatcgtttggcctagctatggcagcccagagaacagaggcggtgctagcagacccacgtgacacatgccgcgggcttgggcggatgcctggcatgtgaagtgatccagggtgctggcagatgcagacgaggtgggagggaggtggaggaggggcatactcatgttttaggaggggaaatacagggtcacctttgtggacggcaaatagccaggtcctgaaacttgcttctaatgaattccttacatgctgttgaaatggcaggaatcataatagcttatttcatgtgcctttgaagggttccagcaaatggagtctaagagaaggcagggatggggggtgggggtggggaggcaggaaaagggggggcgagagtgaaatattactacttaaaacatattcttagacataataaagcattaaagttaaaatattgttgagacagctttcattatgcatgttccaggcctcattatggaataagcagaagtgactgtgcagccgagacctaacaatatctgcactgaattcctattatgtaagaaaggctttctagtccctgccagtgtcgggatgtggtggttggttttcaataaaggtcagaatcggtgccacactgaatagagctaaaagtgtgtttcattcttttgtaggccacgggcactgttggggattgatctgaaaatctggtctgttgcgggcctttgctctcaagggagattaatattttagctattcctttttgttcagtgcttctaaatgtatttggaatgaaaagaaaggttaaagaggggctctgggacggctagcttcagagactagatcatttcatgaagggaaatcaattaaaaaaggtt

SEQ ID NO: 48885 - DNA, 1105 bp, Homo sapiens
ttgagcccattgtcaactggaagacagagtgtgacgtctaaaaacccaaacagcaaagagcatctcttccaaaccacccaatctggagaggtggggcagttttgtggttccggcaccgacaccgtccctttcacacggtactgagccgcgggctgcttcggggcggccctccccgccccgtgccttgccgggatggcagagcggatcagaagctgcgcgcgctctgcctgcgcgctttgcctgcgcgctttgccgccgcaacccgcgcagcagccaatccgctggtgcactgcaggtgacctcccccgggcccgggaataaattgtcaagtttccccaccgtgggtgtctttgctagccggcgagttgcagtcttctgagctaattaggagacggtcatgaggagcgaggcgggccggggcgctccgcgggccggggcggggctggggcgggcggcgcgcagctcctgggccgaggcatccgcgagccgcgggtagatcgctcgcgtctgatcgccgcccgggagctcccgcggagccggctgccaggactcgttccagctccagtgcggggctgcccgggcgtccagaggcggcggacggcgtgccggcaagtttccccggcacctgccagtgcccgcgaacccacctcggaagccagacccggggaggcagaggcagaggccggctggctccagccgtggtaccgcacggctgccaccctcggacttccgtcttgagtctcctgaggctgagaagcagcagatgccgaacctgccccctgacgtggacgtacacctcaagacctaaaatgcgccctgcctggagactttgaacttagtcttctggaaatgcggagaccgcttcgggtggttttgtttttgcatcctcttcggctaggtttggctttgggattctctggctacctggatacgcctttcctttgtgggcaagtctcccgcggatcgcagcaccagcagccaaccctggggcacaccagcctttaaaacccccgagcctggagacgcatggagctagagaagaggacccaactcctgaccacgtaaggactctgattccacctttcccgtgatggagagaaatata

SEQ ID NO: 48886 - DNA, 924 bp, Homo sapiens
agaattttctttaagcacattgtctgataggattggcaattactaaccaggaaaatgagtagcaattaggagttcagtaataaatggaagtctattgtcctaattgagtggaattactgactggtaatggcaacactgaattcttcagtttaattaagagtttatataattatagtgcactttttatttcttgggggagccatggggtaggaattaaataaccagtgtgatggttaagaaacccatttaatgggtaagtaaccaatgagttgaaatgaatgtgagtgccttgctcaagcaatgcaaacttagatgaattcctgataaagagatgtaacagcttgggccaagcaagactttcagctgctaattcctgtctgataaaaatctgaacggcttagaaatgattgggtaatctctaaaactggcacactgaaactgttttagagataccagagctccctctctcctgccggggtattaaccccgatttgtgctctctgtcgctgtgttttccacattcttcaagagtgaaacgagtgggtcatttgagagtgcttttgcagcctggggtttctgtatggaaaatcttgtgattgagctgttgagctgtaaatgttgatagctgaaggggatagacaagcttcatcgaagttactcaaattcaaagcagagtgagtatgtaggtgtgcaatttgggaactaatctgtaattataaagatgttattttcctctttggtggtgtattgtttcctttactattatgttctcaagaaattgttccccttgtgggaagcagtgaaattggagagaaatccctgctcagaggataattacttatatttttggtgtaggtttctgggaatccttttaaccctacattgggatgcacatatttatttccataagaagctccagcaggt

SEQ ID NO: 48887 - DNA, 690 bp, Homo sapiens
agatttccaaactctttatcaaatgatcccacttggaaacaagacatgaacaggcctaactactcttaaaatgcaaggtttgtctgagggcaaacatgctggaaaagatggtggccaccaccctgcctctacttttcttttcctttcatctttcttcccaccgtctttggttccctgcataggctgtgtagtgggtatcagtcagcacttgtctgctggttgcacaatgcagattactcacttctgcccaagtaactccctgaagccgtactgtaacaatagagcatataaaaaagaaactcaggttgatcttggcccctgtccaaggggattagctagggagcacctgaaaggcctgtgttgaacacactcacctgtaacccagttccatggcctggatctcaaggacagggtaatctcagtaccttttaatgacctagtaaatgtggtatctttctgtctttacactcgacctgatggctcatagagtctcctcattatggagctggaggagtactttgaggtcatctaggccctcactactcaaagtgtggaccatgggtcagcagcattggtatcaccaaggagcctgttagaaatgctgaacctcaggtccatccctggatttatagaatcagaatctgcgacaggttccccagatttctcatatgcattatgacaggtggggtt

SEQ ID NO: 48888 - DNA, 1115 bp, Homo sapiens
atcccaaccccccagggcaggtgcctctctcaagatacctgagactaccaggcacatcctcagggctcccaggcagcttctctttatggttgcaacacaccttgaaaatgacatattggggcaaaagaatttcaaaacagcaaaacctttgccatcatcctctcacatagctagggcctctgcacgtatgataacaagacagctaccttagacttatgtcatgccatctaacttacaaagtgctctctcaaccttgcaccagaggaaaccaaagctccaggaagtgacttggctaatgtcaccggttggactgtagcatgatcaggacctgacccctggtacattgacacctgacccagtgttttcatcgggcacttttaccttacaggttgctaaggattaatgatgggatgttttgattcttagtctataagtggatcctctcccaggaggctccaggtctccggatgccaggcactcatgttttatttggtgttgcagctgtgtttcattgtagtaacatattccaaatgctatgagatcaccctgagtctcattgaagaaaagtgtttcaaaagtatgcagagaggtcaaagtattaggaaagttctagaatgtacttaaattctcagtttcttccaggagcccctctgtaacaggctgggtcgtaattagagtatttggatcactgtttcttgaacacattcaacacaaaactgtggcaatgcagaattcaaagagtggatcaggacatttgtgtactaagtagccctgtacatactggataatgattttctttcgtctgttcgccctgagttctctagcgtataccctgtcttgggtaagaatatatcctgaaaagtcatgtgtcaggttgatgtcctttgagtcctattttaaattcacaagtggtatgtgctgagaaaaagcagatcctctgataaagcaaagaactgtgttgtgaaaaaagttattctatccctactcattcatttcttctgtaaatcaggattttaggtatttttttccttaaagctagttatatctacgtagaagatttctgcatacttctcttttttgtttgttttgtttttgaagaacaaagtatataaatg

SEQ ID NO: 48889 - DNA, 650 bp, Homo sapiens
ggatgctcacgatggtgctaagtggaggtgtgggggtttctttttgctgtggacagtaaatagtgagaaagtggtgaaattattccttcctgcggcagggattggaacttgctgcagagagtgcttccttgtcagcctcagagccagttgacagcttcagaggcgtggcttttgtcctcctctctgctgcacccccacccccacgctggccttcttagcctgggtctggcgcatcagggcctattagtactgatgctgggctgtgatgttcctctcctcggggagcacggcagcagaactgaacaaagtcactggtaatctgtgcttacagcctcccccctggggagaaagcctagccagctggcactctcacgctgagcacattcacttcccctggctggtcggcagcctggcaggggcccagaggctggccggctgcagggctaacctgcaccagcaccccaggcagcccagctcaggatcacacacgcattgttctctgccttccagactggacactggctgaactcacagcttggacggtgtggctcatctgcttaggccttcccagggtagctctctagaaataaaaattacgaacgctggatgaagaacaattggctggctacattgaggttaatacaggacca

SEQ ID NO: 48890 - DNA, 901 bp, Homo sapiens
cacagaagactctcatcagttatcagtcagtggattcagctcatcaaatgtgaaagacccccaaattgccagctccctgtggtaaacccatggcaatgactaagacaaccaaacacagtgcttgccctgaatgaacttattctagaaatatctgagaccttgttatctttctcaggcctctcctactggacctcgtttgtcatgtgtgattgcgaacacctttccctgatgttatctagagatcctgacaggcatgttctgctaaaacagacctcccaggctgtccccaagtggcctcaaattccccagctggggcaccttaagtttatcacgttaggcagttaacaggacaaatataatttctgggccacaaggccagtctgggtgaacgcatgacataagggtgttaaaagtggaggggaattccgaaaatagactttactcttgtcagaatggtgccaggggctggcccagcctgtggaatgcctcagcgctagagggcttgggcagtaaggcacgcttccctggggagggtggtggtggctggggagaggagagccaggttcccaagaaagtaatttggcacctgctctatggcaatcccttacaggcgaagagagaaaaaggaggctttgggacagataggggaattttctgatacaagcagtccccttgtattttcttttcattgtcgtaatgatttgtaaaattccagaaatgtattcgtgcccctacatgacttgaaaatgccgctgtctcactaagagccatgggctaaaacacacccgaacagcggtcagaagtgaggctcgctgtctctgaggtgaggacaacagcctggattcccgagtcaggctcacatctaagcctggcagggcctggagggcggcaacgtgtggtt

SEQ ID NO: 48891 - DNA, 1592 bp, Homo sapiens
atcctcttcagagcacatgcactcctcagagggcatcagtgtacatatatatatatatattttttttttcttctgtatgcaaagaagagtaacttgttcccccaaggtgaaggatttcagcggtaggcaaagcaacaccactaccaccccaacccgcccactttgcttttccagaattaaacgtagttgcctagagctgtcatgacctacagagaaagctgaggaagtgttaagtgaatcatgaaagcaaatcaacagacctgctggtatttaaattttagtgtattccagtgtggatttcttggtatttgtaatgcaaaaactgggaacgggggctccacctcctctcccagcagatccaaccctatgttccaacttagtcccagcatattcgaccccatgttttgtgtgaatttactttaaagtctttcacactcccgaggccgtcagcaaagcactcatatcttatgggcaacccccagccctcttcgcttataaactaactgtccgtggctttggggttgttccctaccagttttattgggcaggttgttagctaagggattcattctagaaccagaggtttgaggcagacctctaagatcctcttgactctgagtgtgtggaggagagtgagggaaaggacagaacccatggcccgcgccacctcagcttctttcagtttctatttgaaactgaaatcacagaagagctgtcagatggcagctgtgcatttggtggaaatgagaattccagattttatgctaattcagtttcaggttcctttgaacctgcagtttatggggccgtgctgaaaactgcaatctgttttggataaaagaagggattactaaagactttttagttgtacaaacattcccagcctccaaaaggaaaggggggagaccagatttattctttcattaaaattgtcatgttaagttttcttctgctttatcaaatagaaaacttttccttattttggcaatgatttttcttatttcaagtttttttgttgttgccgtgatttattttcatttcagtagcactctttctcgaacttcaaagtccttgtcacttcctcccagaggcaggaacacaaaggtggtgcccatggatgtatctcatcctggcatgtgctcaccttcttccattctcgcagtgttgattgaggctgacccagatggttgtttcacttacctattattgctttgtaacaaaccacgaatttggagcctggaaatacaatgctgccattagggcagggctctgcagagaagcttcctctctgttccacatggcatctgctaaggcaagttcagctggagctggcggagccacacccaagatggcttcttcacgtggctggcaagttgtcaggggctgttggctgggaactcagctagccctgtggtcccaaggcctcagcttacttccatgtggtactgcttgggcatccttactatatggtaactgtgttacaagcttaaataaccagaagctgctgggcccaaactctgaatctccagcatatcacttcctcctcattctattcatcaaaacagtcacacgtcagtcacaaggacataagt

SEQ ID NO: 48892 - DNA, 3378 bp, Homo sapiens
tcaaaccgagcacactgcggtcagtcggctgtggtggggaaggaggttaggtgaagacctttgtgtctgagacccagaccgtgatccccgtctccattttccacaatgcaatgattattttgtattgagcgcctactatgtgccaggccttttacatacatgactttaccactgagccctcacaaccgcccagagagcctgctctttgcagatgtgactggcttggtggcaattcaaccccaggctgcgggcctagtggcctttccctgccatggcgcaatcttggaagcggcaactgcggggagggcgaggagcggtgcagtttccgccgcgcccgcccgcaaggaaggcagccggggggagccgagggctcgagccgcggggggagcaacagctgtcgatgtcgcgcctggggaccgcgcctccgctgggccgacccggcgccggggacgagaggaggggcggcgaggggcggggcgcgcggggcgggacggaggaggggcggtggcaccggcggctcgggctcggcgcgccgaggaagtcccgctccgagagctgcgagcgtctggaggaggcgcgctcggcgcagtcggggagcgaagtccggagcaaggggcccccgcgtagccgccgccccctcctgctaccgtccagccagggagcccgcggcggccgccgatggagttcacttgagctgtgaaccggcgggagaggcaggcgcccgcaagccgagcgcgggccggagcccagccagccccgggcgctcacccgccagcccgcaagctccggccagaggcgccgccgccccgcgccccgccgttgcagcgcctcctgggccgcgcgccggcgagatccgcacaaaatccagactcccggagcggctccctccagcaccgcggcgggcccaggaccaggcagcccgcggcgcggctggagaggcgggaccggctgtcggggagccccgggcggccgccggggagaagccgccgcgcgccctcctcctcctcctccctctccctcctccctccctccgcacatggtctcctttgtcctgtcgccgccgccgccgcctcgctcttagctccgcgcgccgcggcggcggctcaggccgctcttctccgcctcgccctcccgccggccggcccgggacgcgccttgttagcccccgccgcgccagcgcggccccgcgcgccgcaggagcggcggggagacagtggcgagcgcgggccgggcgatctcggcgggcgcgctcctcccgccgcccggggcctcggccgcgctggatgtgtgcgcgcggcgccggctctcggtcgccccgaagctgttgcccggttcggatctggttcggcgcctccgctctcggactttggcgaggaaggagcccagagactcttgtggacagagccgggtcgagagttgggcgttttctcttcgtgtgttttggtggtttcccccctggtctttgacgatcgcccttcgggagccctgctaaagaaccaaaccatgaacttggggctgaccggaccgtttaaccctttgcaaccaggtaatgaagcccccggggcgcggctcgcttgcctacctctcgcggtcggaagggaggcggccggatcgggggtcttttgttgcggcggccgggccggcgggcaggggtggcaggggcgggcttctcccgtctggcgcgcccaagcgccccttcgctacccctcctcccttctttcctcccccctctgcggccctgtcgcccgcctttgtactttcctccctcggccggccgggctcggccggagctgcgcggtcgtgcccgggagggcctggcgttcgccgccaagctccgatgtgaggagggggccggggcctgcgtccgcttgagctgggggccctagcgtggcgctgcccgctcctggggtcgcgcttccccagcgcggaggtcgggatcccggcccgcacccggtgccaagggaggcgaaaggagatctgggctcgggttcggcagcgggagaaagaactcgcgcttaagtttccaggaggtttctgttttgttgttcgaaagccccccttctcgcctgtgcgggtgcggagggcggcccccggggtctgcgtccgaagggagtgagggtgggcctgaagcaggaatcgctgggtcccaccccgtctgcacgcacggctttttataagttttccttattctccgcgttcccgcctccaatctgtttcacttacttaactttcctttaaacgccaactacggcttctagcaatattttttttacatccaaaaaaacaaaaaaacatattcccccttcccttaaataaaaagcagccaaaagagagctttggttttctgtcagttttagattcaaccacttcatgcccctaccctccaaaaccgagcgaggggatgaaaggaagtgagtaaaatcttcaagtctgtagcgggtagaggtgcccccgtgttcgagagaaggaagagctcaattcgtcggctcattctgggctcgccgcttttccatttgaataataattttttttaaaaagccaggaaaatggtccaggtaatagaaggaaatgcagactattttctgaaagcaacgaaaatgataaacatccccaagattcagacccaaggaacaaatcatttgtacaaatgccctaaaaccctaagtagaaggaaagttcgttgaggaaaagcaaagggtactcgtgtcgtttcccctgaagattttggcaaagaatctctcttctgacttgttaggacagtggccggccacagttgtaaccacctggataggagagagaagggatccagaatgttttcacggtcagccagagccccattgcagtcgtcatcttttgggtgtttttctggggaggcctttctgagacaccccctttcccagttgcaagaggcatggtgtccagccctgtgacttgtatcagccaagtaagggcttagaaagcttttagtcgaagatacactcctaagcctctctgaatatccggtcagacttacttccttaataacttactgatcggcatcataataatggcatcctcaagtttggttcagacatgaggatcacgtaagtgtctgtctgagaatcccatgtggagctgacaaaggtggcagaagcaaaaggcctgttcacccacagcttctgtccttttcactcgaacacacacacacacacacacactaagtgcaaataaaaacttggtcaggaaccatttactttccctgtttatgctttttgcattcagagacagtaatttgtttttacatttcttggggccaattagagtcactttaataggtaatcccagaattttcaaaggttatgtcagtttggtaaaacactttaataaacaggctttttt

SEQ ID NO: 48893 - DNA, 564 bp, Homo sapiens
cctgggctcaggcagttctcctgcttcagcctcctgggttggtttgtttgtttgtaaatatcaacttcacctgatctgttcaaagtgcccctgcacctaccatttccaatccttccactctctatagccttgtgaacaggcctactcatgtttagcgtggttctgacagatgctaggcctgtacctagggctctgctcatctgaatagagtttgaaaccatgaccttgggccaatgttatgctgtaaccagctgagctaacttgctcaaccgcttctgaaagacaaactgttccatcgagttccttcttggcaggtgctgcatcaccaatgccggcctgccatctgtgtgaagggctatcacagcacacaacacacacacatactgggcaaatgtgccgtgattaccactaactattttgtaaacaaagtactgtgttaattctgttttaaactgctttatccaggattgtagaacaatgggcagaagtgttttgaaatctttttttcttctgtattgaatattagagttttaaggccataaaattaacatgtaaattgagttt

SEQ ID NO: 48894 - DNA, 841 bp, Homo sapiens
aggacctgcaaggctggtattgttactgctgtatagaggttcaaggagatgacatgccagaggccacacgactgacgtgtgtgacagccagaatttcattcgtgtgtgtgtgtgtgtgtgtgtgtgtgtgtgtgtttccgatggagtctcactcttgttgcccaggctggagtgcaatggcatgatctcagctcactgcaacctttgcctcctgggttcaagctgttctcctgcctcagcctcccgagtagctgggattacaggcacctgccacaatgcccggctgattttttgtacttttagtagagaccggttttcaccatgttggccaggctggtctcaaactcctgacctcaggtgatccacccaccttcttttgtcaatttatccagtgatcaggtatttgagtgcctacctgacattgtctgagagacagtggacactgagatgttgtacatagctttgcttgtagcagttcatgacctgctactgggctagtcagatattgaccctgagtctattggaccgtagctcactttctttttatgttgcaaaattgcaaacctgtagaaatgttgaaagaacagtatgacaaacacccatatacccttcacctagatccactgttcttaacatttttctacatttgctttagctctcttttttttagataagtcatttcaatgttaaaagtatcatgatgcttcagtattcatctgctgcactttctgcataatctcataccattatcatacctccgaaagttagctgtgattctgtaatgttatctaggatataattcatattgaactttccttgcttgtttccaaagtgtgctttt

SEQ ID NO: 48895 - DNA, 584 bp, Homo sapiens
aaaaaaaaaaccagaccaaacactagtgttgtcactagacatttctggtgtaacaggcactaccggcctgcagatctgacatttgagggtgaaatggtttttgtgtagctgctttctctcacagtgtttgtaaacttgaacccaagtgcaccgttcacagtctccagctccagctcttcactaacacctttattccttgctgttggccttgggacccttactgttccccttgctgtgtagaaacagatgcagtcagacccacataagctggactttggactgaaacctgagttcctgagccgccctccaggccccagtctttttggagccatccaccacccccatgacctggcacggccttcaactttgttctctgccgctggtgagtgtgggtttgggtggggggacagagctgagaaatgtagttctcaggtaactaaataaatgaggtttgggctctgagctgccgctcagtcaccacctacaaaaatacagttaatgccagcttgcaaggcaacatcgcagcacatccagggagttgggaatcttcattgatacactctctttcattaaaggaggaggca

SEQ ID NO: 48896 - DNA, 781 bp, Homo sapiens
aaggtgtgtgtttctccttttcgtgtgggtgtcacacagttggtgtctgtgtgcctggaagcacacacctgtttctgcttccagagttgtctctggcctgcagttctgtgcttcccagcttgatccgttcctctccaggaatctcctctccctccccaccctgacccacctgttggtgagatgcaactgactttctgccacattttttacttacaggtggtacctgtattattccctccacctctgcagggaagagggtgaagaaatgagaggcttaggggctccaaacacaaacttgaccagttttacaattttgttagcaacaatcttgagagaatcaatacaaactttaggtagcttggtactttgcccttcaggacagttcttccctggtaatgttagattgttggggttaaccattactgtgccattacagatgagcttcggctgccctctagtggcagcagcaacctggatctcaggaacaaagatcattctagcattgggaccagctctgcgtcatgagtatgtcatcagtgcctagcatattacctggcatctattcagagctaataactaactaatattgattaacaaactagccaacatgcactgctttttgtttgtttttgagacgagtctcactcacctaggctggagtacagtggcacgatctcggctcctcctccgcctcgcacctcccaggttcaagcaattcttctgcctcatcctccctagtagctgggattacaggtgtgcactactacacccggctaaattt

SEQ ID NO: 48897 - DNA, 1699 bp, Homo sapiens
gcccggcctgaattgcaatcttctacttacacatcttcctaactaaacagtttctaaagatcagagatcctatattttcccccttaatctctttaatgtacataaacaatggaatgaataaatcaatgaatgaatggctgaggaaactgaactacaccaaagtgtattggcagactaccagactttttaaacagctttattaagatataattcacataccatgcaaatcatagggtggtgcaatcaccaccacaatctaattttaaactatctttatggtgctacaaaaaagcctataaccatgaccagtcactttctattccccacccccaaacccactccctagccctaggcaaccactaatctaccttctcagaccgttaactttagcataggtataagtcgatcacagagccacaaaatccacccgatatctgggccatgatgtgaaatttggtaggtaatcgtcccacgttttcaatttgtaacatagaaatggaggggggagggactcacaaccgctagtagcgtttgtgaaaagtacctggtaacaggctgtgctggaggggaattcagcccccataaaagatcacggattaggaattacgtaagcataggtctcgggcccttttatcttggacgcgatccttccacgggatcgcctccggatggatgtggcgctgggagccacgcggaaaacctcaagagtcagaaacaggcgttaaaggcaggcggcattttccaaaccagttgggtctcgggcgctgccgggcggtagcgtctcccggagtcgcgcgcgcatgacgtagagggcgcgcgatgacgcgacgcgcggcgcggtgcacgctgggatatttaagtctcctccgcggcgcggagccgcgatgtctccggcggctgcggcggctggagcaggcgagcggcggcggcccatagcgagtgtcagggacggccggggccggggctgcggcgggccggccagggcggtgctcctgggcctgtcgctggttggcctcttactgtacctcgtgccggctgcggctgcactggcctggctgaccgtgggggctaccgcggcctggtggggactgagccgcgagccccgaggttcgcgccccttgtcctccttcgttcggaaggcgcgtcatcggcgccccttgtcctccttcgttcggaaggcgcgtcatcggcgaacactgttcgcttcgcctctggccaagtcgacagccaacggaaacctcctagagccgcggaccctgctcgaaggacctgaccctgcggaactgctactcatgggcagttacctgggcaagcccgggccgccgcagcccgccgccgctccggagggccaggacctgcgggataggcctggccgccgcccacctgcccgcccggcgccgcgctccccaccgccgcgctccccaccgccgcgctcccccccgccctccccgccgacccatcgcgctcaccacgtttacccctctctgcccactcctcttctccgaccctccaggaggccttccccacggtaagatgcgctgattttgtcagatcatcctctggctcggctggcttgaaatcgaggacttgacttttaaatccgatttgctttttcatcaagtcccaaggggattgtgtgtggttttgccctccttaacaccttggtgtgtgccagctgtctcctggcctctgactcttg

SEQ ID NO: 48898 - DNA, 993 bp, Homo sapiens
cgcgccgccacgcccgacttccttacagtctccgccactaccactttgtacttcggttatttaatccttcaaaacactcaaagttaaagcattttcatcccatcttaattcgtaacccagggaaggtcggctcatactcatttcagatgagcgacttgctccagtcccgccgtgcacggcagcagagctgagaccagatgacaaagcgctgaccgtcggggttcacttccccgtccctcccctcccctcaccttggccaggtgcggccgcagcttcttctccgcacggaggaggccggcgctggcgatcacagcatccagcacggcggagtagcgctgcgtttcgcacaccagcgcgtacagctgcttcacgttctgtgtggccgaggaagacaagctgggtgggggctcccccggccctcctcgccgggccccacctcccgaccccacccgggcccgtccgaccccaccccgggttcctcactccccacccctactactcgcgcccaggtccgctacctggaagttgctggagtacaccaaccccttgatagagccctggcggctctccacgccggccaacacgcctgcagctgcagcatacagccccatgttcccgcgcgcctttacggctctgtggcaaaacgcacccggctcggcgcccgcccggacttccggggtcaaaaagcacgaccttccgggaccggaagtgccggtcgaagtcgccctgcaaggcgtgtgtgtgatcgcgcacctgccggggtagggagtgcgacgctgcagcccgtttcgccacttcttctctggttcttaagtttttgccaatctgatgggcaaataatgggattttactgctgtttaactgaagttactgaggttaaatatcttcacatgtgtattagtcattatatatatatatatatatataatttttttttgacacagagtctcactctgtcgcgcagtgtcgcaatcgcggcacactgcaacctcc

SEQ ID NO: 48899 - DNA, 929 bp, Homo sapiens
cgtggtggtgcgtgcctgtaatcccagctactcaggaggctgaagcaggagaatcacttgaacccgggaggcagaggttgcagtgagcagagcctgtgctactgcactccagctgggtgacagagtaaggctctgtctcaaaaaaaaaaaaaaaggtttcccagagcccatctagtagggccacacggtgatggcatctgtctcttggctcctgtgtggtcaccggccatgcccttccctgacctcagctgctagccctcagcacatgtgactgtgacgtcgtgtggcagctgctgagtcctgagatgtttttaatggctgtttgattcccaggttcttcacctaccaacgaggggagagagctgtggttctccatcattgggggagtggaagggagctcccagcgcagccgtggcagccaccttccaggagcaggggctggaatgtcctgtggccgcatctctcatggacgcggctgaaacgtgttttcacaggtgctgttttctgttttccgtgttcgtaacagaagggaggggaaagcgcagctactgacaagtagaacactgctactttttttaaggcagtttcttgtttttttagacggaattagtccttggcttccctcccagtcccagccctgcttccggctgcgaatgtccctgagtcaacaccaatagagattgctttgtgtattttgtagggttctctgttttgaagacagaattatgttacaaatgtttttgttgtaaataaataaaacacttccttgtccttgcaagatccagtataagtgaattgcgtggactcagctaagcttccagagtccccaggtgggcagggggaggccatttgccagtggggctggggctcaagctctggagccagcggttctgattcacctgataacgaaacgctgcacaccaggcttg

SEQ ID NO: 48900 - DNA, 2082 bp, Homo sapiens
tttttacagataagcctcaaaaacgattcttctggcacccattaaaaaaaagcaaataaaagctgcacaacttttcactaaaagataatgcttatgcaagaaatcttagtcatgacgagaggatgcttcctttgtaaaacatccaatttcatgttcctaaaatacaacataaaaacttcacgtcttggtttttttgtttgtttaattttaacaaataccaatctccttctaaaccttcaaaatttcaaacctgtgtctgcccagggaaggcaggcatcagctcctccacaggcagtttccttccctccctttcctctaagcggggaatctcattcctagttttctgccccagggtcctgtcagttcatccccggcctaaagtcccctcgggagacgaaaaaaacgccaagtatccccgcagagatcggggtaagacgcagttgagtcttgcacacgccgcatcacgaggccgcgcgagtacaatttcaaaacttaagctgcaggtttcatttaaatttttaaaaaatttttgtaaaaattaaaggagaaaacctagctccccctccccacgcctcctcctccctctcgggtcctcaaggcctaaagccaacccggggaaggtaatggggatgggggatgcgctcctcgccggcgaggccccgggacaaagtgcggggccccgggggcggccgaagcgggcccttctccttccagggccggtgcgcgccccccgccggatcccctggaaggatcggcgggcgcaggctgagactcagcctccaggcccgcgagcggccggggcgcgctgacagctgccccgggccggggatgcgcggctgacctggtctcgcgagccccaggccctaccccggcccagcccggcccagcccggcccgcgcggctggaaaaggatactcccgggtgcggaaggcctcctgagtgtgcgggatggtgaagagcggctcctctccgggcaacggcttcaccagcgggaagggcttgcggcccaggagcggcgccatcgcggcggcggcggtggggactggcggctgctggggccggccccgcggcgcagcactaggccccgcggcccggagcgagcgccaggcgcccgggggtggggtgggggaagggaggggtgagagggcggcgcgaactccggctccctcaccgccggcgcggccgcgcgacagtcatggagcggaacgccacggcgcagagctcccgcgcacaccgccgcgcctcccagcagccccccgccgacctccgcttcgggtcccggcggccggcagtcacgactcctcctcagcagcaccggaggaaattattgaaaaatggcgggagattcccctcctcccccgggcccggccaacgcacacactaacttgctcccccgtggcgccggtggcgaatgctccaataggcggagagctggtcagcgctcacagcctattggctcggaggagctgccgctccgcgcctgggtcccgcccccctgcccctgtcgcgtagttgggttgcagcgcactagagggcagtctgaagaggtgaaaggtcacgttatgtaagcgcccgtgataggcgtgcgggcctccgacggcagagttaaaagtgggggacagcgggggatggagaggacgagaactcaaagaggtcaagccggagaagcccctcgcatatacagatactgcgccatctgtcaccgacggcgacaccgacatccgggcaccactgtccgtgtggtgcgccggagggggagggtgagcgcgcggccaggggctttgtctttcctcttgggcgcctcccccttcttaaaggcgccgtgctcggccacgcccggggatgcgcgggtggggctgggctgcagggaggggttggcgggaagtggccccgggagcttaccctaccaaaggttctgcggaaggacaacgtgggggccagctttgctcaccccagagttaacttctgggcgggagtgtggttgagatctgggtagaagtatactgcttgtttctaggggctggctggaaagtagaatatagaagcttctttggagaaatagattaaaagacgtacttagtt

SEQ ID NO: 48901 - DNA, 1989 bp, Homo sapiens
gggctcaatcggcatcttccatgaacattttagacacggggtctctctccgtagcccaggctggagtgccgtggcacgatcatagctcactgcagcctccaactcctgggtcccagcaatcctcccaccacagcctcccaagtaaggatgtgcactttaaaaagaccactctgctacttggaagtgagaaaaataaaatcacacagtgcaaatgatgaacggactggggaatgaacaagagcagaagcagggaaattagagggaggctggtacatagtttgcaaaggactctcctgacagccgccggggcagcaagagaaaatgcctaccaagctcgcggcgcaggggccggttactgggggaaagggaggggtatccctctggatgacaccaggcttgctcccttgacagatggactaacccagaaactcacccaacttcaacgcctgaatacgcagagcgctcagcctggcgggctgacaccactccagggctactcgctattatcaagaggaagcctggaaacgcaggcggggccactgcccaggaagaggggagggcgggccccgggctgggccgggcgcgggcaccgacgccaggcagctccagtccgggccggaagccggaatcccctcccaggcggcgcgcggcagcagccgcagcaggtgggcgggcccgcgagccgggaggaccgctgattggccgcggccggcgcgccctctgacctcacgccgacgccagcggcgccctcctcccgccttctcccgcacccccctcccccagcgccggccggtcggctcccacctgacccgccagtcccacgctcctcagggcctggatccgcgacccccgccagccccctaagctccggcccctcaccatttccgcactttctcgatggccgccatcaccttcttgatgtcgtccttggcccggctgcgggtctccgcccggaccgaccggcccgacatggcggcggcgggagcggcgggggccggggcactgctcccaagacaccggggatcgcgcgcctcacgcgccgccgcccgcccgccgccgccgcagcgtcacagcggccgtcgccccctccgtgcgcgcgtgcgcgagaaagcgcgcgcacccgcccgccccttggggctcacggcctcagcgcgcctgcgcgccccgcccggggcgtccctcctgagtgccccgggagtcccctgagccccctacccgggccggggtgcgaggcgggttgggcgcacgtgcttgtggtcagggcgaggtgcgaggtgccgccggtgggcaacctggttctcttccctgagagtttggaggtcggctccctgctctggccagcgtgttaggaacctgaccctgtggaaccgcactcctgcgccatctctgtcctcccgcctctcctgcccagcacctttgccctctggctcctacgctgtgctccaaccacgcctttcttaaggatggcttccggtctttgcacacacctgttcctcacctggaatcccctcctctctttaccagatgaactgctttcccagcattcagaccacattcttgccttttctcgagtatctagtagtcccaagtatttgggaggctgaagcgggaggatcacttgaccccaggaatttgaggctgccgtcagctatgatatgatcgcacctgtgaatagccactgcactccagcctgggcaacatatggagaccccatgtctaaacgagaccccgtctctaaagtaaataaataaaaagatgtctattttgtgcaagactctgtacctaaagctgaagacatacgtggttttggtttcaaagagcttccagtttgtttatttattgagacggagtctcgctctgtgactcaggctggagtgcagtggtgtgatctccgctcactgcaacctccgcctcccgggttcaagcggttcttctgcctcagcctcctgagtagctgggattacaggcgggtgccaccacgcccagcta

SEQ ID NO: 48902 - DNA, 1563 bp, Homo sapiens
actgggtccagcttcccaaagcatatttaaaatgctatttgataaatgctagcctaggcggagcatggtggctcacgcctgtaatcccagcactttgggaggccaaggtgggtggatcatttgaggtcaggagtttgagatcagcctgtccaacgtggcaaaaccccatctctactaaacatacagaattagctgcttggaaagctgaggcaggagaatcgcttgaacccaggaggtggaggttgcagtgagccaagatcgcaccattgcactccagcccgggcaacaagaacaaaactccatcttggaaaaaataaattaattaaacaaataagtaaaatgctatttgataaatgccagcttaagtaggggaggggaggtgtaagatgctatggcttttattcctagtctgcagcaaagaaaaaagaggtgttatgacaaccttaatcttgaagctgacctctaaaaatagggtaggtgctgttactcccagggcagtgttcacagatgctacagatgctcaataaatgtttgcatgaatgttgaatccagtgcaagctcttgtcctctttgcccccacccaattgcaggcaggtgtcacccacgcttgcagtatgcggagagggtcctgtagcagctgtttcaggacacagcttgggacagaaagcagattggtagtggctgttctcacctataaagaaactaatttccatgtgctccagagaaatgcctagctagccctgaacttgagacagcctctgattatgagtcagcctttcatgatcaagcaacatagggcaagcatatgtcatcttactggcgagggggccagaaatagcttctgcctgactgaggagtgcaaaagctgaaccagcatgtggagtgaaaagatgattctagaaataacgggatcaaaggtggcacatttgttgttcagacccagccgatccaaaataaccgcagattgcctaagcacctgctgtacgccctagcacagtggacactgcaggtgatgtgaagttgagtaagacacactccttgtccttggggtgaaggtgaggaaagcagtagaaaggcagaacatacgtgccaagagagaggccagcccttgagacttctccagttctgcccatagatccccctggttgaggcacacagcccctgtgtctgtctcacccttgtccaaatcctcccacgtgaggtttcttgtctgtagcttccttctcgtccacagcccagcgctcctcccagctgcacaggttccctgcacacatgtctcccccagctcacccagccagtcgtcttcctggggcaaagtcccagagacccccccaaccttgttttctccctacatttgtccacctagtcctacattccccacctcatcttccactggggctcggtctgtgtaagagagtgatcaaagtgggcacctaccacctattcctcatagcctacccaaatgctctgtgttgataccctttttttttctttttctttcttttttagacagagtttcgctcttgtcacccaggctggagtgcagtggcgcagtctcggctc

SEQ ID NO: 48903 - DNA, 1453 bp, Homo sapiens
gaagagcgaaactctgtctgaaaaataaataaaaagagcagggctgcccactgactctctggtgtttcccatttctagtactaacctcttctatgaaacttttcagagacaggctcttgccgtcacccaggctgaagtacagtggcgcgatctatcacaactcactgcagccttgaattcctggactcacgacaccctcctgcctcggcctcccatggagctgggactacaggggcgtgcacaaccacacccagctaattttgcgtagagatggggtcttgctatgttgctcaggctggtcccaaactcctgggctcaagcgatctccctgcctcggcctcccaaagtgctgggaatacaggcgtgagccacttcgcctggcctcagtgaaacttatttcaccgtgtttttcacttacatatttaggtgttcataatacagatgtacttctcctttactggactccttacagaaaaagaccccaaagcctatcacagggtcatagatgcccagtaaatgctgctgcacatcacagaattggtgctttttccgagatcgcggccacggagcaggctgaagagtttacggtgctctcctggccaccccggggacggcctggcctcggccacagagaaagccgcagtaaggggcccaggttggagccagtcccgccccaggaggtgcgcctaacccggcaaggcgggtccccgtctctggaagcgaagctcacgttaccagaggagaaactgaggcccatggagtcgccgggccccaccagccgcgggcccaaaccgcaggtcggaccacgaggaggccgggagccgggacaccgcgggccgcccccacccgacccggccccacttacaggcgggccggccgctcctctcctcccccgcgcgcagccacccccgcgctaccgccgccgtcgccatcagggccagcagcccaagcaacaccgacagccccatgagctccgacatctgcgagagctccatgttggtggaaccactgccacctcagctagtgagtacgcgggcgcccgcacggctctgccgggccgcgcacgcacgcgggggcgcggcctggccgttggggagcctcaagcggctgggcctggccgttagagcgcctgggggcggagcctggttgttacaacgccttcagggcggggcctggccgttaaagcacctcaaggggtggggcccggctgttgtggcgctcgaggggcggggcctggagttagagcatctccacccgccgagcctagttattagagcgcctcgagaggcagagtctggagttagcgcgtctcgaggggcggggctgggttgttagagcgtctcgaggggcagaacccggaggtagagtgtctcgaggggcggggcctggaagtagaacatctcgaggggcagggctcgacccttggtgcgtttcgaggggcgggtcgcctggc

SEQ ID NO: 48904 - DNA, 881 bp, Homo sapiens
acaggcccatgtcataacacccagctaatttttttgtagagatggggtctcactatgttgcccaggctggtctctaactcctggcctcaagcaatcctcccgccttggcctcccaaagtgctgggattacaggcatgagccaccgagcctggccgagaattctggactcccagggaaagagtggtttaagacggaggcccaagggccgcagaaaaaccagaatagcactatgaagcaggcactggatttcgcaaggagcgggtcagtcagaggtgagctcagtgacagcagagtcagcgcaggggtgaagctggggtgtgagggtggaggaggagcccaaacgtggggagccaagaggggagagggaagagaggagggagagtgagcacgtgtagatgactctttcaagggaagaagccatctggaagggacacggggtcaaggggatgtttgatggggaacttctggccgcgtgggagtgaaaacagcagcgtatacactgcctggaccctcccttgcggtgagccacggccagcctgtctgcagcagcaaagagcatgcgtgaaaggctgggcgcacctgccaccgtcacagcagagaagcggccaacggcagacgaaggcagttgggtgggcactgctgggctgcttaccagcccagcaagctgagtcaagggaccgaaactgtctgtgtctcagtttctcacccgtaaaatggggatgctgataattattacaactcattctcattcttacatagtgttatatatttataatatatattatatataatgtatataattatataatatatataaaatatatataatgccctgtagcttccatgcctcggttccagctctgccttcttctaactctgaa

SEQ ID NO: 48905 - DNA, 2326 bp, Homo sapiens
ccagctactcaggagggtgaggcaggagaatcgcttgaaccccggaggaggaggctgcagtgagtcgagagcacaccattgcactccagcctgagcaacagagtgagacccccatctcaaaaaaaaaaaaaaaaagtttgtccagggctctcagaaagtcagggccaagtgaagcccccctccccagcccagagaccccatcctctggactgtttctcatggaaaggctgtaaccatgtggcttcctgggggctggggcaggctttgtttaacactgataagttcttcccttcactcagccgcggaaccctttgcacctatgctgagacagatactgggacaggacacatggatgaatcaggcagggtgcccacagcttagcgggagagataaggaaagtaaacaaacaacccgagacaatgcaaagtggaaagtccttcttgccccaggagcggtgcaaagtgccagggagctcccaggacaccaagacgatttcagagtgtgggagtatgactgttggatcaggaaaggaagaatcttagaggataggagcctgcagggggtggcagagcccttcctgcttgagccctaaggcccgacattagtggcgtcaagccaagtaagcccttctcctccccactcccgtgaagcccaccttcaaacctttggcgtttagggaggaggaggggtcttgacatttgttgtatgtgtgtcacgtgctgctatgactatgacagtgagatacagatgatctcactgaaaactcagtgaacctcagaaataggacctattggccgggcgcggtggctcatgcctgtaatcccagcactttgggaggccgaggtgggcagatcacttgtggccaggagttcaagaccagcctgggcaacatggtgaaaccccgtctctactaaaaatacaaaaattagccaggcatggtggcatgcgcctgtagtcccagttacttgggaggctgaggcacaataattgcttgaactgggaggtgaaggttgcagtgagccgagatcgtgccattgcacttcagcatgggtgacagagcaagactgtttcaaaaaaaagaaaaccaagaaaaaacaaataggacctgtcattcccattttcacaaatagcaagcttcgactccgggaggctagagaatttcccaagcccacacagttaggacatgctagggctggactgaaacctcactctgtctgattccgaacctggggtccttccagcaacttgtgcaatagctggagatcagtgtgtctgggtgaggaccccaggtgacatcatgcctcagctgccatcagaaatttcttctgcaggctgggtgtggtggctcacgcctataaccccagctctttgggaggctgaggcgggcagatcatctgaggtcaggagttcgagaccagcctggacaacatggtgaaaccctgtctccactaaaaatacaaaatttggcgggtgcctgtaatcccagctacttggtgcccacagcttagtgggagagataagggaagtaaacaaacaacacgagacaatacaaagtggaaagttcttcttgccccaggagaggtgcaggaggctgaggcaggagaatctcttaaaccagggagacggaggttacagtgagccaagatcacgccactgcactccagcatgggcaacatgagcgaaacttcgtattaaaaaacaaaacaaaaccaaacaaaccccccccaccgccataatttggagttggggaactgtggacttccagccagccccagctctgcttcttttacgctctgtgaacctgaatatgtcacttgccttctgagcctcagttgctcatccataacatggcggtaataaaacctatctcccagggttgctaggaagccttaaataaggtgattcacgaaagtgcctggcatgtagataaatggaaaccagaaaacacaccctctccctgcttggatgaaatccagcggggcgaggacagagaatactgcgtgtggtctctcctgggctttgcattcccagctcagtgcagcctttgatcctgcagcagaacctgacctgaatgaggtcccaacacagggctggcggatccaagtcctctctgcctctgctgccctgccatggggagtggggtgttcccaaatgaatgagaatgtgacctccttaaggatacatcatgtattggataccaacttagtggcaacaccctggaatacctgttatctccacaccaaccatgaaagttaggactattggcctcgttttttgttttgccctttttttttttttttttttgagacggagtctcgccctgtcg

SEQ ID NO: 48906 - DNA, 2455 bp, Homo sapiens
agcacttggggaggccaaggcaggtggatcacctgaggtcaggagtttgagaccagcctggccaacatggtgaaatctcgtctctactaaaaatacaaaaaattagctggaggtggtgggcgcctgtaatcccagctactcaggaggctgaggcaggagattctcttgaacccggaaggcagaggttgcagtgagctgagatggcaccactgcactccagcctgggcaacaagagcaaaactctgtctcaaaaaaaaaaaaaaatttttttttttttggtagagacaggttctcagtatgttgcccaggctggtctccaactcctgggctcaagcaatccttggatgagaaccttggcctcctaaagtgctgggcttacaggcaggagccactgtgcccagccagagatttactattaatatttgggtatttgggaagaaaacacagtcctctctaccccagctatctctgactggggttacatcagccttgagtcagcctctgggtgggggggcaattttgggggtgcgctctgtcccttaccttgccagctccccagaacctctcctctttggtcacccatcgtcagggttggaagtgaggccccctcccaaatagagtgatgtgtagtatataatgagcagccaaagttggggttgggtgggaaatgggagacccttaggaggaggagtgccggcatccggtgtaccaggaccttagatgccctgtcccaggcagtcgcgtgacatttggggagggagggagaagggacgggaatttgaactttccacacgggtccgacgccctggccgatcgggttgcaacatgacctgggccaggggccagagcttgtgggccaaggttactccgcctccagccaatggggtcgcagctgggcggctgcggttgggggcaggcaacactcccctcacagtccccaccccagctcctgctcccccgcagggcggcaggtgccgatctgtagccagcggttctcagaaggggaggaggcgccgcggaggaagaggaatatttgcacagagaaaagatcaaggccggccgatccccctttctcccctacgggttttcggttgataatttatactggcccctcaactccggggaactttgctccagggcactgggccaggcctcgggttcgcgccctcctctgggacgcggggcgtggagcggcagcggggcgcggcctgtgcgctctcggtggcactaagcgggggtcccaggcagcgacgggcgctcagcctagtgtggcgacgtgggtaggcgaacccaggcctcccgggcaccggcgtaacctctgcgagctgcgcctcttggacatttctgggacatcctcctcccgccacccttaatgtagcagatcaagaagaggtgtctcagcaattgcggggaggtggacgtgagagtgggccagttccagtccactttggttatgaactgggacaatcaggggcgctgggagtatctcagggtccaggaatagggcgggcttgggccggggctgctggggagaaggccgaggcctgcagggggtcgggtggagtggctccagagtggagagtggggatgggcgcgggtggcctagggaccaggggcgcctggcatttttgtagggacggaggggctgggaccagagagaggggaccagaggtccaggtagaggtggggcgcaggcggtctgcgcttcggggaagagggaatgggggaggaatgggaatcagaaatgcgtgggtccgtcaggggccagcgggctgggccgctgtaggaggacctcggggctgggagaaagggggtgtccagggcgtgatcggagcctccgggagccgcaggaccgggctcgggtggggtgttgagggccccagcgcgcagtcctgccccggaccccccccccatccccacctggaagccaaggccgtcagggcccggaaccgccctcacctgtaggccaggctcaagcactcgaagaggcgtgtgagtgtggggtcgatactgcgcggcccgaagtcggagggccccacggacccctcctggtcgcgccgccggggcagcgagtcgctgtgcggcgacgacaccatgaagtgaccgctgtggatgacctgcgagcggagcaagccgcccgcgctgcgccggagactcgggtcctccgagtctgtgtccgagtccgagtctgggctgggcgcgacccgcgggacctgcaagcccgcggccagacctgccagcgcgccggccatggctgtcgccgccgcaaccgcctggtccctgctccgcgcagcgcggggaacagctcttggccagccgggcctcattaacatagccccgcccccacaccataggccgatcgggtgggcggggcctgggacggggcggggcttgtattagcataatccttacgccaggtgagaacccggtgctctggagctctggcgggttggcc

SEQ ID NO: 48907 - DNA, 443 bp, Homo sapiens
gggaggtggaggttgtggtgagccgagattgagccactgcactccagcctgagcgacagagtgagactctgtctcaaaaaaaaaaaaaaagacgaagtgagaattagtcacacagagagggcagaaggtattctgggagggaagagctggagaaacaaaggcgggggctggggaaccagagtaatgagtcattcaactggctggggtgccagcagggtgccagcagcctacatagctgccatgtccccagctccctcggagcacaggcagccaccctgtgactccatgctaggcttggctccagtgggcaccgaggtatctgtatttctcagagagtagcccatggacaactgccaggctggggattctgttatgagtttgcaacaagataaacacaaaaattcagagtgtctagaagcacttatatcaattaaaaaaaaatt

SEQ ID NO: 48908 - DNA, 1704 bp, Homo sapiens
agggtggctgggaggaagccctggctttcccccctgggcagagcagcaggagtgccggccaccacttctgtggcccccacctgttggctagaagcctaggggccagaatccacataccccaccctgccatctcccttctttctgtcccagccaggggcagttttggtcctcctcatcccagggcccacctggacagggtttctccactggcatgtcacctgcccagggcagggagagccagagggaggaaggccctccctcctgactccctgggccccctctcagctcctgggagaacctcccagaccaggatggaagcccagcccagtccagccagtgggagacacggggcttccaggacccgtgtgcacttcaccttctagcaggatgaattcttggattcctgatccggagtcctccctggggtacgagtttgcctccttcctcctggcagctgaggctgagcgaggaggccacataagcctatgaaccccttcaacccagctgagccagagacgcgcgcctctatgggcagaggggaaactgaggcccagcacagaggcggatccaattccccttgggtgaggcccctgcacccacctgatgacgcgggggctccacgccctcacctggaatccgctcgacctgcagaggggcgcggcgcggccaggggcgggcggcgggcggcgggggcgctgcggggatgcttgggaccgccggaccgcgcccggcgccttctccgcgcgggcggcagagggctccgtgcgctgcgccgcgggcccggcttttagcagcgggtgtggacgcgggcacccccgccccgctccgaggtgtcctttgccccttgatctggtgcctccttctctccttagcacgtgggcggcagccgctcagccgctcagaggcctgtggggcagccatggcccgggccctgggctcgggcgcctgccaatccccgtctgccgccggctcgtgcccgctcacctttaaccccctctactttccccgggggctcggtgcccggcccccagccgcgggctgggctcggggagggaggagccgcaggtgtggggccaccccaggtgggcagagaaagacgctgggaccgcctcgggctcctcccagagccccagcccggctttgaacctcctcctagtccctgagtccccccagcactctctctcactctcatccctcactcttactctcttctctccccgctttctctctttctctctctccccctccctttcctctccctctctcttctctcctccaggctcctctctccctctcccctcactttctctctaccccctcttctctctcccccttctctcatctctctcattctcccccttcctctctttccctctctctctcctctctctctgtctctcactctgtctctctcctctatctctctcactttctctttctctctctattcccctcctttttcactctcccccctctctcctctctctctctcattctccccctcctctttctttctctctctctctcacactgtctctctgtcccttgtctctccctgccccgtctctctccctctgtcttctctctttccctctgaccctggctctcctctctctctcccaccctcctctctctctcctttactttctctctatcccctcctctctctctcctttctcttctctttttctctctccctctctc

SEQ ID NO: 48909 - DNA, 2275 bp, Homo sapiens
gaggatcctttgagcccaggagttcgaggctacagtgagctatgaacgagccactgcattcttgcctggacaacacaatgagactgtctcaaaaaaaaaaaaaaaaaaagcaaagatgtggagacaggaactggcaggagagttatctgctgagggacaggagtgggcttggttgtctgcggagtatggggaaggtttacagggggcattgttgtggggtattgaggctgaacaaagggggatcagcgagaaagaggggacaagctgaggtaggaacctcccattggcgctgaccactgccttttaggttgaagaaggcttgtaacacaaagtgggaggggccgagggagggctggatagagggagtatctaggagacccccgaacacttagtgaacacaatgggccctgaggaggcagagcaaactggggagctcagaaaggcttaccagagaaggtgacatttgagctgggcttcaaaggtgcaataggagttctgaaattgagggagaaaataatggaaccaaagagaagtccacaggcaaggtaagggctaaaataaatggtgaaaggggccaggcatggtgactcacgcctgtaatcccaacactttgggacgccgaggcgggtggatcacttgaggtcaggagttcaagaccaacctggccatcatggtgaaaaccccatctctactaaaaacacacaaaagaaggctgcacgcggtggctcatgcctgtaatcccagcactttgggaggccgaggtgggcggatcacgaggttaggagattgagactatcctggctaacacggtgaaaccctgtctctattaaaaatacaaaaaattagccgggcttgggggcgggcgcctgtagtcccagctactcaggaggctgaggcaggagaacggtgtgaacccgggaggcggagcttgtagtgagctgagatcgcgtcactgcactctgacctgggtaacagagtgagactctgtctcaaaaaaaaaaaaaaaaaaaaaaaaaaaaaaaaaaattactgtgatcccagctactccggaggcttaggcaggagaactgtttgaacctgggtggcaaagattgcagtgacctgagatcacaccactgactccagcctgggcgacagagggagactctgtctaaaaagaaagtgaagggactgtgtgagtccagaggaaaagggaataaccccctagcctgggaaggtggagagggcttcctggaggtggtgatattccagatgagtcttgaaggggaaagccaattttagttgttgtaaaaatgtagaactgtttttaaaaaaaagtagaagtgttacttttatggtctgtcaacaaggctgtcctgccgcttctcccagacattggcaccatgcctgcccaccatgctatggctggatagggagagtccttgctcagctcttcccgcccctatgccttggcttatggatttctgtttgctttcatcattttctccttcaacttgagaactcctattcaacctctgaaacccagctcaaatgccacctcctctggtaagccttcctaattgctctttgtacttttgtagcagtgtattaaggtggaacaagctcagttgtcgttgttgttttttgagacggggtcttgctccatttcccaggctggagtacagtggcaaaatcataggtcactgcagcctcaacctcctgggctcaagtgatcctcccacctcagcctcctgagcagctggggctacaggcacgaaccaccacggccggctactttattttttatgtttggcagagatgggggtctcattgtgttgcccaggctgggtcactcattgtctgacttaatttctgagtgtctatttcctgagatggggacaatggcttaacctatttgtaaagacaaggtacaggacatatcggggatcacatgggaatcacaaagccatcatgaggtgacacctgccatttgtcttatactagaattagttgagtgggaatgggactctgccttaatccatgaactccctgagggcagggacagtgtccccacagggcctaacccagtgttcagcgcagagcggcatcgtatgctctgtggacactgtacaaatgagaagaaacgggactgtatcatttacctgtaatgtgactttggggaggcgacatcatctcttttttttcttttttttctttgtttgagacggagcacggagtctctgtcgcccaggctggagtggagtggtgctatctcggctcactacaacctccgcct

SEQ ID NO: 48910 - DNA, 1382 bp, Homo sapiens
ggcctcttttcacccttttgacaatttttaaatttttttaaatagagacgggggtcttgttatgttgcccaggctggtctcaaactcctggcctcaagcgatcctcccttctcggtctcccaaatcgctggaattacaggagagagccaccgcgcccggccagcaagtcagcgctcaccatctccaaccccattttacagaagagaaaactgaggcttggggagggctgcaaggcaggagccctcggcgcccggccaaagtcagaaatttgttgttgccatccgaggggaaaacgtgcacgggctctgcaaattgtaaccgcccggggtgggagagtccgtgcctgggggcgtggtgagccagggccggtgctggggcgcagagcagggcggctcagattccgggaggggcggggagatcgggttgctgggcgatcctggggtgctggaggcggcgcggcgcggccggggcggggaggggtgcggcccgcctcctccctgccccacccccagccccggcgccgcggctcctttaagagcgggaggggcgccccctggcggcggagcggtgcgtgcggccggagccggagcggatcctggagccggagcggagcggagcggagcggagccggggcggagcgggccgagcgggccgagccagcagccgagctgggggcgcgggcgggcggcatgtaccgggcccgggcggcgcgggcggggccggagcccggcagcccggggcgctttgggatcctcagcaccgggcagctccgggacctgcttcaggatgagcccaagctggaccggatcgtgcggctcagcaggaaggtagcgcggggggctcgagcggggggcgcgggggacgggcagcggcctgcgggacctgccgctcgagggaagggccgcgcgggccgggccgcggggccgcccgtgggcgcggagcctggcacgtacgagtgggccccgcggagccacccccgggggagggggcgcttggagctggcctggggcgggtggggcgccggggacccgaggggggcgcctgtgcacccccaggatggccgcgaggcgtgtcctacagcggatgctccggggaggtgtgttccggggggctgtgttgtggggggccctggctcgcacacccacgttctgtaagggccagaaagaggaggcgccttccactgggagaactaggggcctgtctgacacctggaggggccgttgggggttcacgcattctgggggcgcaagagggggctttgtgcctggcgttggggaggggtgctggaagctgccgtgtgtattgcataggccaccgtaagagaaagttgtatatttcacgggagataggcccgggctggttgtctgtggggggcagaaagg

SEQ ID NO: 48911 - DNA, 2233 bp, Homo sapiens
ggctctccaccgatcccattcttaccctggaccaggtctcacctgcggcttggggaagtcacagaaagacaagtttcgtacaaccccagaccttttcttttggtagtcaacaattggtcacattgcacatttcaaggttacagaggcccaccatacacatgcggggcaggaggagataaatcttgcttggggctaaacaataaagctacagcgagtgttccagaagttgaccacatctggaagcaagaagacagactctggaagaagcaccctagagactccaggaacccccttcactcctgggctttcgggactctacagcgtggggcctctttctcagacatcgaaaggcctccttttctggaccacagtggagcgatgtgcaggtcatcggctaagctgggcgggtcggggagggcagggggagtacagttccttcggatcccagcaaaggtagactatcaatggccaagggttcagaggcaggaaaaaaggccgtttctggggggttggctggggacactccccttcccttctctctccgattaaatataaaagccgatgatgatgaagattgaaaagatgaggaaaatggcagccgtgtctcgggtatcctcccagcggaggcctttcatggaccgatactcctgccgtttgcgaagggcctcccgccgggccctcaggcgccgttcccgctccagttgttccccgtagtgggcctggtagaaggcgtcaaagttgaacatcgtgcggttggcgccgggggaggcccgagaaccgtcgtgggtccgagaggtgggcggcggggtacgcggcgagccggggtcgggtgcgggcgtcctggagggccggacgccaggtccgcgcaggtcctcgtcgctgagtaggccgcgatcatacttgcgacggagggtggcactgcccagcaccacgtaggcctgggagatgcgcgtgaagcgctcggcggcctccgcgctcccggagttgcggtccgggtggtagagaaagcactgacggtagtaagccgccttgatttgggcctgcgtggctgtggaggggacgccgagcagatcatacagcgccgtgcgcgaatacgagcagtcgccctgggaataagtcctcgctcctaggcccaggctgggtgcagaattttgtggaaagccacgggcctgcagcaacctccaaggtaacagccgctgccaccatcgccagcgcatggctgccatgttgaattgattcggcaggcggtgcaagagaaaccggccaatgagaggagtcggttggtcgccctgtggccagtcacgtaaaggggggggcggggcggtcgtgggggtggaacatgcgtattactaagcggtcgccgggctgatgacataaaaaccgggtgccggcaggcgccagtcgcaggtgtgctgctgaggcgtgagaatggcgtcccgcggccggcgtccggagcatggcggacccccagagctggtaagtcccggggcccgcggacacccctctccccacttctgcggccaccgcgtctgaattattcctctacatgccattttctctttttcgcagttttatgacgagacagaagcccggaaatacgttcgcaagtgaggggagcctgaatactgcggggcgtccgggggtcgggaagcggcaagttgcccctgttgctggcgttgcccggaaaggccgtagaatttgggggtgcgggaagggaaggacccgggtgggtgccgatttctgtctctggtaaatcaactttaagttgccgacctctctgggcctcggtacctcagcgttgaggtaggggtgatcgcgcttgctttccgtgggtggttttcaaagtcgaatgtgacaatttgtcctaaacatgtggtaaaagaggcgctgggcggtgggtacgggcgaggggtcagtcctggtggggggaaggaagtaatggccgtaggatgcttatcgtggcgccttgttgccaataaatctccaagacagcagttggtgtattattgtctgaatttcatagagggtagtttgtataactactgagttgtagccaggtgggagtggctcacgcgtgtaatctcagcaatcgcagcactttgggaggctgaggcgggaggatcgcttgagctcaggggttcgagaccagcctgggcaacgtagcgagcccccgtctccgcaagtaataaaaaaattagccgggtgtggtggctcccctctgcctctccagtag

SEQ ID NO: 48912 - DNA, 777 bp, Homo sapiens
cttggccaatgtaggttctattttctatctagaagcctggggcctggcttcctctaggactcatgggaaaacctgtggaggagtgggagtggggaggccagtcaacagcagatgttcttttgaaggtccctgccagcatcttgttgcaacagtggtctcgcacacacccccataagcccgctgtgccctccaccacccccagctgtcacttctgtggcccacaccctcttgacctgaagccaagcacatcccttcccttccccaggactgccaaagcattggagctctggagccaatccagccccctgctgcccagtgtgtctgggcctggcacctctcccagactatgggcacaggttagctggctgccaggcaagctagggacactgttccagctttcccttcttccctggaaaatctggcccaagacggtccgatgtggcctggcagagggaacagccacaccctgttccagttgtcccggcttcaactttgggtgccctgcagaatgggcattgatggcgccccacttcacagaggaaaagtaaggaggtaagtgctagaggaacttgcccagagatgacaagtgacaggggagtctgcctgactcctggtctagcctgcagggtgagtcagtggggtgggtcacaggtatgcccccagagcccagtgtctggccccttagggagagggcaggaaagggaggctcagctcctgccctctgagagccctggtgtcacaccaagcatcactcattgagacgcatattaaatagta

SEQ ID NO: 48913 - DNA, 2086 bp, Homo sapiens
aaaggcttgtagggacagcaggtcaaaggtgtggagagcctggggatacaccctgtggaggggaagggcccagtttccagacctaggaggcccagatgaagaacctggggccactctgccagagaagagcaggccccagggttgtgaccacgtctctgaagggctggcctggctgggtggcaatctcggagaatgccaggaaggagactccaggaatttccaacagtaggagcacagaagaatgggctgccataagaggtggtgagctcccggtcatccctagtgaacaagcaggccccttcatggaaagggtgcaggcgcctaggcatgggccagccccgatggagatctacaacatgaattaatgaagatggcaacgtgagggaataaatggggttgccgttcagggtccatactcagagtgagggatctggaagtgagcgtgagaagcgggaccccccctgccccgcctcctctcaggccccgcccactcccgcccagccccaaaggagccccgcccactcgaaagctcaccctacggcctgtctgctgggccaagatcttggcgatggagttgaagttagttttgctgccgaagagcccgtgcaaaaagacgacggccgggagggctgcctccccgtccagaagcctgtaggaaagcggaagcggcctggcaggggaaggatcgaggtcagagtctgagccggcggagacggggaaaggggtagggggaaagagctttgggggagaggcctgggaggtgacaggcccaaagggaggagatggggccgtcggggcccggcaggaaaaggaggacagaggatggcctcccgcccggtgcccttgactgacctcggctcggcgccccctcggccgccgctgctgctgctgggtgcgacaggcaccctcgcgaagctagggccgtgggggccgagtccctcacgcgggagcctccaggctcgggtccagcggagcatgcttgcaagctgttggccggctcgcatctcacaaggtacgtcctccccgcgctccttctcccgccctagctcgcagccccgcccatttccgtcttcagccgccccgcccagttccgacttgagccccgccctctccccgcccccatcgcgggattctccgcccttggtcccgtttccttacgtatccccgagaacagtccggccccgcctccatccccgccccttacgccattacgtaatccccgcaggctttgcgcgggtcgccctgagcgccgcacctggcctcgccctaggctgggcaacccgcggtgcttgcccctcccctcgcgaagcgccgcggtgcgtagaatctgggaattcggtctgcgccgctctgtgcgtgctcggttctggttgcagcttagggctcggttcccgccccgcacctgccatcgctcactgacctgggtggctgccatcgtttctgtgccgccggcgggggcgagcggcgccagggtggctctgggcggcggagtgccagtgtggtggcgccgtgctccactgccgggggcccgggcaggttgggcggagcacggacacccacccatcctggagtcgtcgatctagaaggagctcgggggcactctagagctcttccccaagccccttcgtcccttttacgtttggggaaggctcccccagtctgatcccacctgcttttctgcccatactccccattctcatactcccctatcaggcaccctgcctttcaaggtcttctccacaccccacctcctgctggggtgctgtctgtcttccagatagccagttgcccgagtcctatacttttttttggtgggggtcttaccctcgcccaggccggagtgcagtgacgcgaccgtagctcactgcagcctcgacctcctgggctcaagcgatcctcccgcctttgcctcccgagaatctgggactacaggcgcagactaattttaacatttttttttttttttttttttttactgaatcatggttacaatttttttttttaggccgggtgcggtggctcacgcctgtaatcccggcactttgggaggctgaggtgggcagatcacctgaggccaggagttgga

SEQ ID NO: 48914 - DNA, 1332 bp, Homo sapiens
agactgagtttcaccgtgttgggcaggctgatctcaaactcctgacctcaggtgatcctcctgcctcgacctcccaaagtgctgggattacaggcatgagccactgtgcctggcctcaaaggtgctttcaaattgatccctgccatacaccccaccctccaccaggtaatctcagcctggcccaagatccccacatctaggggcagaagcagccttgagatatttactcagagtcctgggccccagccctgatcaggtggctgatgaaggcaagcagaaaaaccagttggtttgatgtttccacttgaacattccagagaaagtggtgggggcaggggaggggtcgttgctacctgggaatggatctgggggtggtgtcatcctgggggctgcccagccctctcagcttgttaggaacaggccaggaagcgtgctgttggttggcgaaggcctccttctaggggaggccagaggggaggacttccggagcccctgacatgtggaggtgaaggtgggaggtgaaatggactatcgctctttggaggtcgagtgtacactgccccatccgtgttcccaggcttcctgtgaagtgggagggtgccgtccttattctgctgatgaggaaagagaggcttggacggcgaagtaacccagctccaggtcactcagccagtgcacagcccggattgtttccttcactgactcctaacgcagtgctccgtgtatttcatcaccacccttcaggccgtggggaccaagggccgaaggggtgcggcctgaggcggccgggacactgcgcctaggtggcgcggtggcattgaatgggttaaggaggggaggtggcgggtgtcccttaactgcacctggcccagtatcggtcacgtggccagggtttcacctgccccgctgagcagggacaatcaggctgcttgttttgtggccggtcgccatggtgacagcagcttgccaggggcggtcatggggcaaattcctgctggccagccgggtggggcaggagtgtcagctgtgctggcaccagtcggggcttcccgaaagacccctggagctttcccgtggggctgtccctggggggcccctatgtgactccgctcgaaacctcctcccatctcaacccccacatcagcccagcttctctcctcccagattttgaacctgagttgatgtattaagcagccgggattttcatatacgttattgtgtttaatcctcacacagcaacctttcccatgtgggaatggtaatccctgcaggtctgctgccggctgcgcctcccctactactcacccaacactttgagaacactggctcctt

SEQ ID NO: 48915 - DNA, 1034 bp, Homo sapiens
gcagcccgaaggcggccagcaggatggccaccacgatgagggcgcgggccgcctgaaggtcctgtggcagtgccagcagcgagtcgtacaccttgcactgcatctggccggtgctctgcaccacgcagttcatccacaggccctcccagatgttctgcgacgtgatgatgttgctgccgatgaaggccgacacgcgccacatgggcaacgcgcagcacacgatggtgcccagccagcccagcacggccagcgcggtgcccgtgatctccaggcccatggacatggctgccgcggcaaggcccgctccaccgggtggctccgggtgcggggagacgaggggccggggccgctgggcctggcgggagctgcggcgccccgacggacggacggacggacggactgactcaccgacggcgcgcgctaacggctcggctccatacgctctcgccgcggctgcgcctgcacctgcctgtggctttgtgggcgggcggcggcgactgggctggccctgggctggggccggtgcgtcttagctaagtgcccagcgctccggtgggggcggtaggggcggagccgcgctctccagggcctaaggacagtgacgtggcccctgcctcccaccttcaccgagcgtcctgggaggaaggacttggccctgcgcggcccacaacgccggggtaggggggttgccaaggaagggcgggacctgacccagcccccgcccctcggtccttgtccctctctgctcgggaatgaattctccggggcaaaaccgaggacgggatgcgtcaggggcttggggtgcaaatcccaaagaatttgacacggcttctctctcctcaccactttgggcgcttttggcacgtgccgcgtggggatgggggcgctgccaattaccccggaacggcggggcggggaggaccagggtgggcgtggccgcggctgtttgcaggagccgcgcacctgctgctctgcccctcccgtacacacgtcgcacaggctcagcctgagtccgggcggtggggttgtccagc

SEQ ID NO: 48916 - DNA, 509 bp, Homo sapiens
tatgtccagagaaattgtacagagaaaaggtagatctgaacttgagcctggctttgctctcctgggtcacgagcgcttgagccagtccttttaccaccttgagcctcagtttccccatctgtgagacaagagttgtcctgagttgcttgggtttggggcttgtccctgagcctgggggaggtggacctgctgggcagggctgcactgagatgaggccagcaggacagagcttcatgcccagaggccaaacttcagggactttgcaaataagactttgcctctgggcaaacacagctccaatcagctttttgctcaatacctaccatgattcctacaactcaataataaaaagacaaataaaccaattaaaaaatggccaaagaaactgagcagacatttagaatagagaaagaatgtataaaaatggccaataaatgtgactagggggcggtatctcacggctgtgatctcggcactttgtgaggccaaggcaggaggatcgcttgagg

SEQ ID NO: 48917 - DNA, 1322 bp, Homo sapiens
cccaaagggcttaggattacggcttgtgagccaccgcgcccggccccacagtgacttctcaatagcacctcctccaggcagcccccctcaggaggtcatggcccctgatggggctgccaatccagagctgtggggcgggttctggaaggggcaggactgtagggttcttagccaggcctcacttcgtcctcacagccgcccccgggtgcaaggctgattccccactttacaggtagaaaaatggaggctggtctagtggaggcaaggccccaaatgagtttacctggtcgtagtccggagcccagcggtcatagaaatggagcttttgggccaggtcggggatgccatgcgcggccctgacccgcgcccgcacctcgggcaggctcccaccctcctcctgggccatgctcctgtggggacaccgttgccctgtctcgaggtccacctcaatcgcccatcccctcctttcccccttccctcctcccccttcagaggaggctgccaggcctcctgccagcgcgacccctatcccggcccctatcccagatggggacactgagcgcagagagggcgggcttggatatttacactctggggctgcagggctgggggaagggcaaggtgggagaagggggtgccccgcggctggaggaaggacctatcttcctcttttccgccctccgactgagagagggtcggaggtgggcgacatccggagcgaaacggtctcgaaggaggccggagtcagaactcaccgccaatccagcgcgcctcgggcgtgtgggcaacaggactcggggcggggcctgtgttgcgaccctggccacaccctcaccgcctgcccgcaatgattggttttccgctgagagaaaatagccagtcaaaggaaggcgctggcagtctgcccgccccccccccccccgccagccaatgagctcaaggcttgtggccctcctccagccttggtagagcagggactgcggagatgttttcctgctgtgcgggtttaggggcttctcggtggtctggccccggcctccccctccaccgtcaggtagcagcacctccaccatccccctccaactgccctcctgcctcctgaagtcctttatgcttcctgaaagcatgaggtttgtaggcactggggagtctctgaattcttatgggcaggagagggacctaggattagctttcatttttactttgtatttatatttacttattttgttttatttttgttttgttttatgagacagggtctcactctgtcgcccaggctggagtgcagtggcttgaccatagctcactgcagccttgaactc

SEQ ID NO: 48918 - DNA, 1636 bp, Homo sapiens
cctcccgagcagctgggactacaggcatgcaccaccaggcccggctaattttttgtctttttagtggagatgggatttcaccaagttacccagctggtcttaaactcctgacttcaagtggtctgcccgccttggcctcccaaagtgctgggatgaccagcatgagcccccatgcccagccatttatgagctctttctgtgttgatgcttgcggactgggttcgttttcaccaccgcttagtcatccctcaagcctcaagctgacacacccagctgatacagctcccctttcctggggataggaaataacattgccatgcacatgtctctttgttcacaagtggatgtttctggaaggaatgctttaacccactggagggtagtgaaaacaattcagctggttgtgaaatagaatgaacagatattagaagagcatactgcatgtagtaggagtaattattgttttgttaggctcttgcttcagtttcacatgtgtgtttaatgaacagctttgtgcaatactttttttttctttttttttctttttagagacaagatctcactctgtcgcccaggctggagtgcagtggcacaatcctagctcactacagtctcaaccttctgggctcaagtgatccacctgcctcagcctcctgagtggctgagttgacaggcatgcactattatgctcagctaatttttaaaaatatttcatagagactgggtctccctatgtggtccaggctggtctccaactcctggcctcaagcgatcttcccactttggcctcccaaagtgctgggattacagatgtgagccactgcgtccaggctgtttaatacaattcttaccatgggtggcacccagagactaaaaaccagaagggcactactgaatcagggtacaggcagtgtctgagactctggttagcctacagagtcatcaacgcacgtgtgctgtagacttttttgtttttgcaaatgagggtgagatcatatctcactgtggtttcaatgtgcattcctccctaatgactaatgaggttgaacctctttccatcagtttattggctcctggagtttccttttctgtgaatggcttttgctgttgtattccattgggtcgtttgatttttttccctttccctatttttaactgacaaggaacaaccgtatatattaatggtgtatgacatgacattttgatatagggatgtattgttgaatgactaagcaagccctttaacttatgcatcacctcacatactcatatcattagtttgcagtgagaacatttaaaatctactctcttggcaaccttcctcccttccttccatccttcctcccttccttcctcccttccttcccccttcctccttcccttcctctctctctttctttctctcttttatccctcccttccttcctccctccgtcctttccttctttctttctttctctttctttcttcctttcttcctttcctttcctttccctctttctgtctctcttttcccttccttccttccctccctccctcccttccctgcttccctccttcccgccttccctccttcattctttccttccctccctccctcctgcctggatcttgttctgttgctcaggctggagtg

SEQ ID NO: 48919 - DNA, 915 bp, Homo sapiens
aacctgggcaacatagcaagatccccctctctaaaatatttaaaaacaaaaacaaaaaacagaaagaagaaacaccaagctccaataagtatacagacatatttatcctttttgcgtattttttggcaaaaaaaaaaagtgaagatttgaaacgaaatgaagttttaacttaggaacatgacataaaaaaagattttggtcctgatcatttctccgtggttttgcctccagcaacccaggcatgacgagacctgcacagggcaaactcctggggatgacgcgacgttgctgttaccgggaaaccggcctcgcagggcttggggaccaagcgagtctttgggaactctccacccactagcgcggggcgcccaggcgcgccccggtgtctgctgcccccgtgcggccgcgctgcagtcctgcaccctcagggggcgcacctgagagccgatgggtacccaggctggcagacctcagaggtgggcttcctgcttctcctctcatcctgggtcctggggcggagaagggcagaggccggtgaacggcgccccactccccgcggcgttgtgcaaggcagcggctactgataactggggtttcccgcctggtcctccctgctgccctgcaaagtgaaactccaaagccacacagagcaatggtgcatggatggccttgaacctggtgctgagtaagaaagagaagggcgcgagcggggggaagctttggactgagggttcaaggctcccagttgattgatctacgttggaggctcctcccacagcaggtcctgctaccttcaggtgcaacctggtaggtagggccgttattcatttctttcttttttttggacaggatcttactttgtcacccaggctggagtgtagtggtgcaatcaggcttactgcagactcgacctca

SEQ ID NO: 48920 - DNA, 2044 bp, Homo sapiens
tgctgccccaggcccagtgggggatgggggctcacttctgtcctgccttcctgctccccggtctgcacactgggttcagcactgagccagcgtctctctccaggccccagctcttgggctcaggccccaggtggggctgccagagctgagaggcgcggccccttccccagagcgctcgcctgacataacctattagcgcttctcgcttcaatccagctcccccagccagcctccccacccaggccagactgtgccggtcctgttgtctctctcctgagctgctttgccccgacagggtgagaaggagctggcaagatgcccgatggccccaagagtagctgtgcctgttcgcccctcccctgctaggctgccctatggtcaggtggacttgatcattgaccttgaccagtggccgctgtggccacgatgacttcctgtctcagagtccagagctggggccgctggacagtcgtgggactgaaacttagaggacaaggggctttcctgaagtcctgccctgtgcctcggtccttgccttctcagctgcacttctttttttgttttgttttggagacagtcttgctctgtcccccaggctggagtgcaggggcacgatctcagctcactgcaacctccacctcctgggtccaagcaattctcctgcctcagcctcttgagtagctaggattacaggtgccccgccaccatgcccggctaatttttgtatttttagtagagacggggtttcgccatgttggccaggctggtctcggactcctgacctcaggtgacccgcccatctcagcctcccaaactgctgggattacaggcatgagccaccgcgcccggactctcggctgcacttctaggggctgatggagggtgctggggagaggcagctgaccttgggcagctgttggtattgagaagggggctgctgggagacttggggttattatctaggatggaggccctctgggtggcaggagggggaggctgcagggtctcaggaccatgctgggggctaatgcaggggtctctgggcttccccagctgccccccatatctgtgctagatgggtgaggatggccgggcacctgggaagccgtcgtgtctgggatccctcgggaggctttctccagccccctccatccagcgcttgcttagcagtggtagtgccttctcttctttcacccctcttcgcctttgacccaccttggcttggggttgggggcttgagatcccaaaagtgcctgggattggggggttagcggtcagccccaagtcctccacctagcagggctcttgcacttcctgggttgagcaggaggaggctgaggggtggggcccccagggaaggctggattctttgagatccacctggggcaggactgtgtcccctgataattctcctccacagtgaatgcagcacctcctcccactggttggccagggctgtccagattacttaattgtgtgtgtctgagagtgtctgtgtgggttagggagaggaaggcatttccccaagcccctcacctgcagcggcctgtggctggagggaccccagactctctactcctgttgggggtcctgcctgtccctggcttgtgtggcactgggcaggtccctgggctctgtccctgttcccgccatgagggtgcctgtgggctctgctaacttctgagcctgagtgaaccttgaccccctcttggaccagggccccgcaggcgtggattgaggcgctggagaaggcatgatctggaaggccctgggcctgggtgctgcagctgggccctacggcttcgcctgcatatagtgcacgcatctggatctgtgtcccgcccctcaccccaggctcacatctggagaccaaaaccagctagccggctaaacacagagcatctgggccccaaagagcctgttcccaggttaacgtggcccatctgggcccctcgcggcagctccgccccgtctccacggcagaatgctggctgcacatctggacagctggagccctgtggtcaccccgcctctccccgtgcct

SEQ ID NO: 48921 - DNA, 948 bp, Homo sapiens
aaccagcgaccaaaacaaagaggcagattacgaaacccagatcgagggaaagaggccactccgagcttttctccaggacaggggttggcgaaattgggccaggcctgtgggtcacagcctgcctggcctggactatttttgtaccgtctggggggtgggggctgatgaaatcccagctgcatttcaccaaaacactttccccttaagcccgggctccatgtggttcaaattcattgtcacttaactcatcactcaaggctctgagccgcatccctccccctccaagaaaaagacgaaaacacacagtctctggcatgcgggcgaggtgggcgtgaggggccatgacaaacagactgactgtcttgaccttagccgcccctggcctcctgctctccatcttcctggccccttccaccccgtgcttgatgtccccaaaggctaagacaggatgagttgctgtccaagctccactagggttgagttgggagcctggacaggggaggcagtcactggatcactggttctccctcccctccacagcccgctgctggaaatgggaagctgacatgtcccaaaggtcgatgcactggaatgcccggaggtcatcctctgggagtgtccacatatttgtgaatgtgtttgtgcccatgagccaggagaagccgatcttctcttgccccgtgttgcttttctcaatgttggctcacagctgatgttcatcacctcagggctgtgttgaggttggcaaagggacttcccatcggagaggaagggaagggctgccgggaggggaccctggagggcattggagtctttatcgaatatgaggacaggacgtccggttttgaaactatgcactgatcctatagtttccatggtagggcggccagatggctgcaggtgcatttagtgacaggccccctaacctgtcccagctatgtgtgtgcc

SEQ ID NO: 48922 - DNA, 620 bp, Homo sapiens
ttgggagagcggctggaggctttgggtgacctcaggttcaccccttgcctaaacagcgttggggagatggtgcaaaagacctgctgctgctggcgggtcccggggcctcatgtgggagctccttatgggggcacaaaccctgacctggggctagccttctgtgtcccaactcaggccctgcaccccacccattctgagcttctgggctcatttctccccaacttcctgaatctgtgttgccaaaacctcagcttctgcttcccttcccagccttagctcctcctcccactaagagctcccaagggaaacagccatgcggttgatgcagggcaaggtgtgcaaaggtcgttcactccacagccaggccccagcctcatctgcgtcatgctgcatgctgccaccaagtggcggggctggttattagctggtatggcctggaagggtggtgcaggtggttaaatatgttgattgacattcagaatgaaggaacacctgcctttgcctggaggaagcccagtcaagaggcagaagcaggcaggcaatactagagcattctaagtccagtgttcagggtcaccgtggcgcacacctgtaatcccagctccttgggaggccgagac

SEQ ID NO: 48923 - DNA, 1035 bp, Homo sapiens
tgaacccaggagatggaggttgcagtgagccgagatcacgccactgcactccggcctggacgacagagcgagactgtatctcaaaaaaagaaaagaaaagaaaaagaaaaaggcagtttctaggacacgtttatgacagtttaaaaacctggcccctgcccactaaatgcttatggtgccttcaacccctgtgaccaccaaaaacacccttgaaatcccagttgccccccaggaggcaattccaccatccctaagcttgccctgaccctgacagttacatggtccctgtgtccaggaagggactgggcctgctgtgggtatgaggagtctgggcagtctctgcctccaccccagctctctggcccgagcaaaggagctggtattcctcatctgggcaccccgggcccccgcccgccttcctgtcctgccagcaggaccgctcccaccacgagccagcccagaggacgtggcagtcccacagcctctgcacttggcgctctggcagccctgcctggccagacccacgctgtctgtagcccctgaattcctggcctcctgtgagcagcgttggtgggaggtggaagactcccccagggatccaccaaccagccgggcaggtccacttggggccagtttctacctcggaaaatcctggcttcctcagcgccgacccccagcagccctggcctcctcccctgctcactgctgactgcttggcaggcctgagtcaacagacattgccagggaaacagagtgacgtcatgtggtggagccgcgaagggcgcaggctccccagccacttcccgtccctgaagccctgagcacactgcttaacctctgctctgcctcagcgttctcatctgcaaaatgggaatgacaatagtgcctacctttcctgctgcaatgcataaaaaatgggctgctaagtgtgaagcactcaaaatgttaagtgcctgctgtagatactattaccgttgtttgtttgtttgtttgtttgttttgacagagtcttgctctgtcgcccaggctggaatg

SEQ ID NO: 48924 - DNA, 2145 bp, Homo sapiens
cgaaccaataaatacataataaaaagtaatggttaagcggaagatacctaggtacacatcacaacaaaattctatgaggttctttcaaagtgtgcttagataattaaggtttgtcaacatcgtggcatccacaattactaccatctcaatcacaaacctggaaatttacccgtgtaattaattcccactgcataaccatgttttgttattgctagatgatggaatccacaacagtatccaattctttttccaaggcaacgacttctgcaaaaaaccgagatgtgcagtctctcttgctaagtcaccgatcacctatactctctcctctcaaaaccccccaatacccaggcagcgagtaagccctggaaggcaggattcgtgtctgcatcccaccgcctcgcacccccttccggggcatcctcatcgtgtggccagctcctgcctggagaaggaggtggcctttacttgggtgtcacccggggaccacttgggggtccaagcgggacaggcctccgaggtccccgccatgtatggaggccgaaaggcagcgtcccaggcgaactggagagggagttccccccagctctccaggtcacctcccgccgacggacggaaaggccggcgcgcacgggcgtggtgcggcggggataggaggcagccacgggcgcaccccagggccagcacataatgggccgcgtaggccgggcaggcgtccagctgggacgccgccgcaccacgtgggctgcagagcgcacggggcaggcagctgccggtgggcccagggccgggcgctgcgcggccagcgtccgtgcgtgcgtgcgcgcgcgcgcgtgcgcgtgcctgcgtccaagggatttgcgatcaggcggcgcggcggacagccccggcggcggggcggggggagttatattgcggggtccttcctcgctcaccctggttcctctcggagcggagacggcaaatggcggacttcgacacctacgacgatcgggcctacagcagcttcggcggcggcagagggtgaggcgggcgtgcgcgggccccgtcgggggctgcgggaccggcggagtcggggccgtcagggtggcggccgtcctgcgctcagccggggcggcgggaggcgggggcccgcggaggcctaggagcggcgcctggagggccggggcctggaaatggcgcgctcggagacggggcggcggcggctgggctcccggggtcttgcttgcggggcggatcccttccactgcctcccgccaacgacaacgtgttggtttttgccctgccttggccgcggcggcgccgatgcccggagacgagcgcccgcttccagccccatcccccctacggtaggaccagtgcggggctgagctgtggcgctggggtacgggccacacggcctgccccgctccggtcccggcctctttcgcggccctctgttgcctgcccgccttgcaggcccctggccccttcgccacgaggccggccgactggggaaggtcggcagccaagaggggcgattcccttccccttacgtgtgaggcagggatttggcggctctggcccggggatggtacgactccttgcgggcggggggagaccaaggagataaatccatcgtagcttctttgtattaatctttcttgggtcacagtgccttgacaggtgctacgtgctctttggcacaatttcatttctccttggtttctcgctctgatctggagaaggaaccgcatttagcgtcgtcctgattgttgtcaaatgcagacaactatgtataattgaaacactttgcttaaaagaaacatctttgaatagagagctcatggtgtttaattccaggactctgcacttttttttattttattttttaaatacaagttgcctcgttagaatataggctatgaacatcttgctgtttgtcaaggacacacttgggctttgtgttttcttgcagaaaggattactttcccaggataacaccacaataatacacactgaggtgttcagtctcctgggttgcagtccaaaagtatctttgtttggtaaagaatgatcacttttaataccttggtttgggaacggctcagacaaaagcttgtttcggggcaggagtgtagctaatgttcatgatactgtaacgtggaa

SEQ ID NO: 48925 - DNA, 1624 bp, Homo sapiens
tggcacagggcagggacagggacaggcctagccaagctgggactaagacaggcgaaaaccccatgggacaggcgtcgtgcagtgggggctgcggggccaggcgaggcctccccaggagagacacacaggctggggcagggcaggctcctggaatcggcctggcagggggagggtgcacactcgcacatgccccactgaggggacagggagcactgcaaaggctcagacacgggaaatagctggccctgccttgggctgcagcacccgagctgggtgcaaagcaggggccaggggagaaagcaattagctgggtctttcttccagatccagcatcttccaggtaccagaacttcagcaaaggtaggtaggctcctggagaaagggggaggccatggtgggggccacacccaggggctcaggcccaattctcgcctcctcccgcaggaagcagacacgggtcggaggaagcctacatgtgagtgaccttgatcctgtcccccctgcctcgcctctccccctgccccacctctccccctgccccacctctccccctgccccacctgcctgccacagccctgggcttcctggtccaggaaccacctcttgcactagaacgaggcatccaggttcccctccttctcctggcaggcaggcattgggcgacactgttgtctcttaggtaaccctgggtttgggggactggactttgccctgctctgggacacagagtgtcaggggcgggggatagagactcattcagcatcacccagtcaaagacaagctacaggacacccagaatccctcgggggtgttgcatcatctcacagatgggcaaacgatggggaatggcctaaggtcacatagcaaggtggctcaccaggtgcggtggctcatgcctgtaatcccaggactttgggaggccaaggcaggcagatcacctgaggccaggagttcaagaccagcctcgccaacatggtgaaacctcatctctactaaaaataaaaaattagccaggcatggtggtgcgtgcctgtaatcccagctactcgggaggctgatgcaggagaatcgcttgaacctgggaggctgaggttgcagtgagccgagatcatgccactgtactccagcctgggtgacagagactctgtctcaaaaaaaaaaaaaaaaaaaaaaaaaaaaagtggctccagcccctggtggctcaggggtcccaggaagtgggggtgggggaatcagagaggagatcctggcagacccccatggcccccaagaggagcaatggtgggagcagccctggcctcaccgcccccttatggagcccccaacccgatctccagcctgccctgaaacctgtgttgtatatgttttcttggccagagaccccattgccatggagtattacaactgggggcggttctcgaagcccccagaaggtgaggcgaaggacaaagccggaggtggaggaagtggtgtgggagctcagggcagaagccatacctccaggcaggagaggaggctgggcctgggttcgggtaaatcggcagagccggttgggtggacagaaggaggctggtgctgcaggcgggggccaagaagggatagggggcgggcgggtcagcgtggg

SEQ ID NO: 48926 - DNA, 619 bp, Homo sapiens
aattagctgggtgtggtgtcgcacgtctgtaatcctagctactcaggaggctaaggcaagagactcgcttgagcacgagagttggaggctgaagtgagccaagatcacactactgcactccagcctggacaacagagcgaggctgtgtctccaaaaaaaaaaaaaaaaaaaagagagagagagagacttggtaaacacagggtgatatgtcaaggtgtcaaccaataagcaatgacagaggcctcagttggcactgcccacatggccttggctagccacggcttccagacggggaaatgatcctccagtagaaacacatccatgtgcctgccacaagctgttagatgagtcagccctggcccaggtggactctggaattggtgtgtgctggatgttggcccttctgggcacatgacaattcaatctgaatgggccaacccagtttctttctttttttttcatagacagggttttgctgttgcccaggctgctctcgaactcctggcctcaagtagtcttcctgcctcagcctcccaaagtgcagggattacaggtgtgagccaccatgcctggccagtttctttctttcttttttttactgagaccaagtctctctgtt

SEQ ID NO: 48927 - DNA, 1445 bp, Homo sapiens
ttgagccaaggagctggacatcagcctgggcaacacagcaaaacccccgtcttgatttttttaaaaaaatttcaaatgtaaatgttattgaacctaacagtcaaaatattattttcaacatgtaatcgatattttttttaaaagattgaagtttttgaaaacactaggtcatacactactatacacaaaaacttttgaaaaaaccaactaggtcagagtaggtggccacccggggtagccctaattgtcataagcattgtagtgagcgagactccgctcgcagagtttagaccggccactctcgatccatgtccgtcgccttcttgaaatcatctcgatgccacccggggcctcctcctccctcgggattccccaaaacgagcccctgacccccgagtttctccggagcacggcccgccactcgcccaccctcacgtccaaacgcgcccattctttacggcctgggacctcaccacggcagttcgtagtggccggcgctgccgggggccttgctgaaggcaggggcagggtcagagtcctgggcctccacctcgcccgcgccaccacagacggcctccacctccattctcgcgcctcctcttcccgccacccgaggcaccgccccttgacgccgccacgcaagccccgccccctggcttccgccgggcgcgagcggaagttacgtacccgcgcctctctgtgcctgcgaagagggttccggtggtgccctggcggccatcgctggaggccgcggttgctatgggagacctggcgcccggcctgggagcgacaggaaggcgagctgtggccgcgacgccttccgagaaagcaggtcgctctcggaacggacgtttgtgtgtggtttctgtggaagatccgctccgcggcggcgtgggaggagcagggcctggaggggttgcggccaaacgcgggcttcggtgttgggacacggacaacgctggcgtccgggcgctgctgggcagcggggtccggggatgacgtctggggctgcccgtgcccacttttccagattgctctgaatgtcctagtgagctgctcccgttgggtaggctcctgcgcctcaaccgcgctcggtactcgacgtttattatcagggaattctcggctgcaagatgggaattccacccccaccccattttgcagaggaggaaactgaaaccgtccttttgtcagatgaaatgcaatgttcattccaggaaaatagggactcaaggccggtgcggtggctcacccctctaatcccagcactttgggggacagagaccggaagagcgattaagcccaggagttcgagaccagcctgggcaacaaagtgagatccccgtctctacaaaaataaaaattaaaaaagtagccgggcgtggtggcgcgcacctgcagttccagctactcaggaagctgaggcggaggagtgcttgagccca

SEQ ID NO: 48928 - DNA, 606 bp, Homo sapiens
gcaggagaatcacttgaaccccggaggcagaggttgcagtgagccgagatcgagccactgcacttcagcctgggcgacagagtgagactctgtcttaaaaaaataaaaaataaaaaaaaataagggacctcaatgattgggaaaatggaatgcaccgggaaggttaagcaatcaatatcccctgactcacttcaagggcaccggagtcccggactcatcgcccatcagcggcacagcctgtctatgccccaaccccagcctataacaggcacggaggtgggcgggtccccaggtaatcatagtcctgggtgtctcgactttagcccgcccctgcccaaataccacctttcccccgccaccacccgcaaatatttacatcctgtttatgcccaggcctcccagggcctcaatttcatgaataaaatatgagtttctaggccgagccaagaaggaaagaaacccccgacagctggtggaaccagaggcagtttaatgtttcggttgctgtcgcctcccgcgtggtatttggaggaaattttaattggcaggtcaaggtgatttgggagggagactttgcttttcccttctcctctcctctcctctccc

SEQ ID NO: 48929 - DNA, 805 bp, Homo sapiens
gtcccaggtagctgggttttacagcatgagccactgcacccagctaattttcctattgctctggtggatttcagtggtgcttgtggttagctgggtgggctccaggggcctgggaaaggacgggcttgggctccaaatgcccttcacactccccggtgcatctcctcctttccagatcttcctttagctccgtgtttgcaaatcttccactgactcattcgactgccaaagtggaagaatggaatcacaggaagctgcatttgggaaggctgcagagcccagtccccagatctgctgtcctcccacccggatagtcacagatgacgtttgcaagtgtgacacagtcccgtggaaattcctggtgcatgagtcagcttgagctgccatagtaaaataccacaggctgagtggctcaaacaacacaaagttattttctcacagttctggaggctggaagtctaaggtcaaggtgttggtgaggttggttgctcctgaggcctctctccttggcttgcaggcagctgccttcttgctctgtcctcatattgccttcctctgtgcatgcaaattcctggtgtttcctcccctcccctcctctcccctccccctccccccccctttctctctttctctctttctttctttctttctgggtctccctctgttgcagtgacccaatcatggttcactgcagccttgaactcctgggctcaaccaatcctccagcctcagcctgctgagtggctgggactacaagcatgcactaccatgcccggctaatttgtttatttttgtagaaacgggg

SEQ ID NO: 48930 - DNA, 675 bp, Homo sapiens
agtctggtctcgaactcccaacctcaggtgatctgccagcctccacctcccaaagtgctgtgattacaggcgtgagccacaacacccggcctcatgcagttttaagcttaagcttctctcgtaacaatcctcagccatgtcagctttccttcacacagcaggggaggccttgttatcttcccttgggaaatccggggaggctgcatagaaaaagcccccatgcatcttggaaacccccaacgaggggaagtccccctatcacctggcagcagagagctactatggccttcctttaccactgggctgtttccactagcactgtaccaagccagagggaagtaccggagcttcctccaagaccgatataccccaaggtggggagaactggataaaggcaaagtccatgcagttgaaagtaagggtgtggccaccggcgtgatagccttagctggtatctccgtggtgatgcaattcccagcctgtgccacctgccaccctgtgcagcctctgctctgctaggcagaaaggtcacagcaacatccaatcatttcagcagaagcggtttgggtttaagtttcttttattagtccccaaagcagcacatgcctgttgcagaaaaattcagaaaagggaagaaaaaagtcccacggattccccccacccaaagcccaccac

SEQ ID NO: 48931 - DNA, 998 bp, Homo sapiens
ccaacagcatctcaccttcccaagctgccgtccttcccaatgaccagagacatctttgcaagcatagcatggctggaggatgcgtttcaccaaacgcgatgtaagcaccaccaggtgcccagcgcggaggtggatgtgggcgaaccctggacgccccacaaaggacagctgcggcctgggaagggaaggagatggagcggggagagggggaagaggttgctccgcgttttccgcccgcccgcctgctttccgcgaggcactgaggcctgaaaaccgcgaggccgcccacgcgcgcctgacccgcccccccctcccgcccgccccaggccccgccctcccgcgcccgcccctgcgccggccccttttgttccctcccggagccgggccgctggctccgctggctccgctggctccgcgggcgctcagctcggctcggccgcggggcgcgcaggcggctgctgggcggcctcggtgcgcgcctcccgccttcccagagacgtggcgcgaggcccgggccctgagcacctatcgcggggatccccggcgccaggagggggtgcagccggtgggcagcgccgcgcagggaggggccgcagcatcctcgccccccagcgcgcccgggcccgagaggaggaggccggggctctccgggcctcccgccgcttagcctgatgctggaaggacgaaggtaggggctgctggaggggccgagggagggggtcgcgcgggcaacaaaggacggagagatgcggggggcggcggcctggccgaaagcggggctgcgggcccggaggcattgtcggggcgtgggcgggggcgggagggttcgaggccggccggtgggcgtgggcgggagctggctggggtgtgccccaacttccccgttgcttgtaggagaggagggggcactgcttggggtgccagggttgggggctattcccgggctgcgggtccccctgttgaaggcatcaccagcctcatcggggtccctaccctcg

SEQ ID NO: 48932 - DNA, 1161 bp, Homo sapiens
ctctgtgcttccctgatctgcagtgccagactctggctggctcggaggacagccagcctgggcaggagactggaaactcctgccaagagtggcagggagcctattggttgtgttttgacttttgtcatagtgatgtgtgccaggctgatttttttttttaataggtcttttcttctttggcctctgggtttattattaaaaagaaatgttggagagaaagaagctagcatttaatgaagtccctccaggaggtggccccaagcacgctgtgcacacactaacccaaagcagccaatatttgtttgatggatgggaaactgaggccagaagtcttgtctctgggagacagagaaacaaattcccaggacaaatttctgtaggcattgcagggaaggagccatctgtttaatataataaacattttcaacaaaggaagggtaggaggtattcatgtataagctgcacaggcggccttcagcagagctgggtgcagaatgggggtcctctgttgtcagggaggtccgactgaggacgtctgcactccctgccaccgcagcaagtccctgagtccgtcactgaggtccccctttgtaggagtagggtgtgcaaactgcaggtgtgcttgctgggctggctggggctggggccaaggggcagaggtgagcatcccccttacaggggctctttttgcagatgattgagtcgaatgacatttcagaggagacgatcaggacgaaggaaactgtggagggtgagtggccaccaggccgggcgggactctgggctctgggaagaggctggctggctctgccttcctgctgggtcacattttggtttgcatcatctgccatttggtaagagtcacctcctgtgtgctgtgagctatgtactcctgcaagggaggaggccagtttacggagggataggcattgcaccagccttccaagttgctgtcttttttttctttttcttttgaaacagatttaacggaatagtaaacttaatggaatatcaaaccttattatttgtttggtttatattttatttttatttatttatttagtttatactttacttttatttatttatttattttagacggagtttcgctctgtcgccaggctggagtacagtggtgtgatctcagctcactgcaacctc

SEQ ID NO: 48933 - DNA, 3004 bp, Homo sapiens
taaattcctcccccggttagcttggcctatgccccggaatgagtgaagacagccagcgcgtgaggctggaagcaagatggagtcagccacgctaaacttctgtcactgtcctaatctttgcaaaggcagtttggccaggaggctgtggggagaccttgtgggttttgccaggacctgggagattctcgatctatgtttggctgtccttctaagccagaagctccctggggttggggcctgcctggggtgagtccctccctccctgccatgcccagtctagccaaggtctagttcagggatcagggcaccacgtgggggaaggactgtgttccttgtgctgaattaggatttatggctttggggccggatgggaggcgtgcgcactgattcagtaggagcgctgctgtggtgtgtgtgtggttggtgggagcggggcgggcggggggcgggggggctggttggggggacaggggtaaaagcctatcagagggaggtcccatcagacaagatgggaccaagagtccagttggctctgctgcgactttcggcctgtcactgccttcctgcacatctcaggggtgggagggggacaaaggctgtaagagtaagaggtacctggcccaagccttaggactagaacccgggccaggcgggagtgaccagccgggacactcagggcctccgcgcgttccagctgggtgaccttgaccctccaacttcagccccctgcgcccggctgctctcccagtggtggtggggagcggtgggggtagacgggggcgcgcccaggcttttctaatccggcgctggtgggggagaaccgagggcgccaccgcccctccccgcaggtccggggccgaggggtgcggcgcgctctccccaccgcggtgcccaggtccccgggacgcaggggcgctgggtagcaaggggggtgcgcaggggcgcggggcgcggggcgggctaatcccgtatgtaaatggcagccaatggagggtggtgttgcgcggggctgggattagggccggggcgaatggctggcaatcttactgggattacagaacaaagagcctccccgcgctcccgctctccgctcctctccccgcgccgccccgccctccgccgcagcccgcgccgggggtgggggccgccgagcgccagccccccggccggccgattccccccccgcgccccctccccgcgcctccctccccgccctcgccgcgccgccgtcctcgcctccctctgcctctccttcccccattctcccggattaattaaggaggcagcggcaggaggctgagtcctggccgcgggccggggccggggcgccgctggcaggagcgcttggggatcctccaaggtaggagaaacttttgcggggggcgggcaccgaggcccttctccccttctcccccacccccgcccccgatcccctccgcctccgggggggggggtccccgcccctccccctctcaaggtgttacaggagctggggccggcttttgggtgcccggggaggcacgtgactgggattataattcgggcccggggggaggggagggacggccgccccccacctgcccgggaggggccgggagctgggagctgtcaccccctccctccttgccaccggctcttctggaggtggggggcgtcccgggccggcgcccgcaggctgctgcagttggcgaatgaggtcagtcgcgctgcccgcggtggcgggcgccggggtgggagcagagggggctgggaaggccgcggtccccgcctttcccccctccaccttctcccggtctgggccagcccctggcccgcgcccccaactcccaggcggagtccagtccagccaggattgccccagcagggtggttcctgtagtggaccccccgccccggccccggggagggggctggcctgtgtggtggtggccgctgaatcccgggtggaggggactcagaaggtggcagtggggggaccacaaagggttcagaggagtaagttggggatactcggtctgtgggtggtctctgagttcctgcagatgggtggagaggacagaggaggggccacagggtgctgaacacccacccgccccatcctaagtaccctgggcatgatgggcttgacacctctcctgggctcctcacccctggccagcagccagggagtgagaccctgcctcgcctggcgtgggcccagggaagggggccgctgtgccgctgagagttcgttccaccctcctggcagtgctggagggggctggagctctggcgtctggcctagtgaccctacctcccaggaccaaggtcctgcggtgggagtctcctgtgtccccatcccagctgaagcgagggtgctgggacataggggtctcgctgcagggcctgtgaggggagcactgactcttggatggagaatgtgccaaggggtaccccgggatggccctgggcctggcgggtgggagtggagggcaggcccccgcagtttttggagaagtgggcatttgctggggtttctcttagaagaggagaggggtgtctagaagccaccctggcgcgccgctgccatggtcggcctctgtgtgtctggctgccccgtggccaggactgttgactccttggcactggcccggggccttgggacttggaaggtgccccaagcagctcatttatttcagcagtgtcattccagaggggaagggcaccagcatcgattatttattctaagcaggaggaggtggctggaggctggtggctgctggcagggaggggctaggtataaggtagttaggtggccgtcatgaaccgccctatttggggcccaggagggtgtgagatagactctgacctcttctgagcaggcatctgcggaccaagggacaggcttggccccaaggtgacagggtatcggaacccccatcctgcctctggggtgtgggaggctcaagtccacacctcgttcttccacagcctgttctgagggtgacctagaaattggcagttct

SEQ ID NO: 48934 - DNA, 4868 bp, Homo sapiens
gggcgtggtggatcgcgcctgtaatcccagcactttgggaggctgaggagggaggatcacttgaggccaggagtttgagaccagcctggccaacatggtgaaaccccatctctactaaaaatacaaaaattagccacacatgccagtgcgcacctgtaatccccgctactcaagaggctgagtcaggagaatcacttgaacctgagagacagaggttgcagtgagctaagatcgcaccagtgcactccagcctgggcgacagttttttttttgtgtccaaaaaaaaaagaggtgcggggagggccagagggcatttggggtgggacggggcagggcagggctgggtgactggaatggggtgactataatgaatgctttggagtaggtcagggcaggtggggaggccagatgccaggggagggagggggcatggggatccttccatctggggccaaggatggcaaggccctcagacaacttctagcccaggttctccattgacagatggagaaactgaggcccagggaggggcagtgctagtgctgaggttttacatagcaggtgggctgttccccagcccactgcagggcatagcctgccctgggacacctgtcctcacccgttggctcagtggttgcaggggcatgggtgggtagaggtcggggagtgagccggctcaggcgggcagggctgggggccccgtgagccagcgccccaggattagatcacccacgagtaatgggcttttttccgtccagccttttcccgacaagaaaaggcctgatgttcctcatccgtgttgttctgagaaggcatgtttatgtctggcaagcgaagggttcttgggagacaggatcccagggcccccctgcactgcctggccccaggggttggcaccgccccagagctggtttcctcccactgtctcctgacacccagcccccacgcttttcagatgcctgcctgagaacaaataaatacttctgcaccatgcacatgagctcagataagcctccggggctcagccagaactgggggcaccaaatgcccgggttccctgacccctagctgggtgccaagcctgcatttcccacccagcactccccaaccgccccttgcgtggagggacagagatatactgtgagcaacacgggacctgatgtcaggggtggacagcagctcggcgggtgatgtcagcttgagcaatcgtccccgtcatcactgctgttaagtgagcgggcacttggtgtccccaggcccagcgccaggccctgttcacacattctcacgtggggctctcacagagctgagagcagtagaattaccatcacccttttgctcagtggggagaggaaagtttgagcattgtgtgtgtgtgtgtgtgtttagagacagggtcttgctctgtcacccaggctggagtgcagtggtgcgatcatagctcactgtagcctagaactcttgggctcaagcgatcctcccacctcatcctcctgagtagctgggattacaggcacatgccaccacgcccaactaatttttatgcttttagtagagatggggtttcaccatgttggccaggctggtctcaaactcctggcctcaactgaaccacccacctcagcctcccaaagtgctgggattataggcatgagccaccagccccacctttttttttgagatagggtcttgctgtattgtccaggctggagtgcagtagcgtgatcatggctcactgcaacctctgcctcctgggcccaagcaaccctcccaccccagcctctggagtagctgggactacaggcacatgctatcacactaggctaattaaaaaaaaaaaaattatagagatggggtctcactatgttgcccaggctggtctcaaactcctgggatcagaaacctggtggtcattccaggtgcctcccttgggaccccccgtcgccagctcctggtcccaaagctctgccccgtcctccatcccctgctgctgtctgcttcatgcctggctgtctctggcctgggctgtcgcagagacttggcaactcctggctccccaactccaagcatgacccgacagttcctccgccgtagcttcctgggatccccctcactgcccacgtctcacccctgccccacaccctgcagcgaggctgaccttccgagatccttggcctcaccccaatggccacgctggtctctgcccaccacttcctgccctgccctgcacactccagccatgcagagctggatttgttccccacccacccacccactcccacagcctctggccccgctcaggcccgaccaggacacgtgggcggcccaggctggcggttgggtttcctgggcagccagtaatttggcactccttcaaacaggtctttatttattcagcatttatttctaggggaggtgggtgctgcggtggggcagggaaggcgcctcccttgtagaagagcagggcctgggcacagtgcctgtctcccctcctcacctgcaaacgccaactcccctgggagggtcccggcagctcaggtgtcacctcctccaggaagccccaccctgactgcctcacccgccgtcctgggcttcttccatgccacttatttttatctttcactgaagcataatttacttccagtaaagtacatgagtacatgaatcttttttttttttttttttttttggagacagagtcctgctctgtcatctaggctggagtggcgtggtcttggctcattgcaacgtccccatcctgggttcaaacaattctcctgtctcagcctcctgagtggcttataggcgcgtccaccatgcccagctaatttttgtatttttagtagagacggggttttgccatgttggccaggctggtctcaaactcctgacctcaagtgatctgcccgcctcggcctccctaagtgctgggattacagtcgtgagccatcgcacccagcccaagtacataaatcttaagcatcccgtgtgatgaattttcccccgacttgtatactcatgtaaccatcactcagctcaaatccttgcactgtgttttaatcttttttttttttcccagtagtctatttttttggtcattttccctgccagcctgggaatccttcaagggcaggagcacctgctgttgggccctgtgcggtgtgggacacagtgtgagagagtattggtgcctgtgagctggtggctgtgtccccacccctgtgattgtccccacgtgtgtgtgtgacggaggctgtggccgtgggaacatgtggatctgtgagcctggccaggggccccagtgcaggggcaagcgccccctcctccactggaagagagccttgtccgatcccccagccaagggcctttgcagggagccgtggccctgctggagagtccccgccggctgacagcccggagattagtctccaaggccacaacgccagttgccataggcacgcaggcccgcgtcaggactgcgatttctcatcctggtcacgcaggcaggcggccgcccctgcccgcctgccaggagccaggctcaggctttaaataacaagggtggaaacctgaaccgcggagccgtctgcccggcggatcctggcctcccctcctggtagagcaggcatggggcggcctggaccccgcatactgccggcggcggcggagtccctccgtgcccgccccgggggacgggagagaaatggagaaacctgagtttgggggctctctttgagtgctcctagtacctgatgcacagcccgagctgagaggagacagccccttttcctaaatcccgtcctccacgtggaggaaggacgccctaccttccagaagcctagatgaagggcagatggggcttcgcatggccaggcctcagatcggcttcccccagcccctccagggaagaggcaggcggctccctcacttccccttggaaggcagcatgaatccctgtacttcctggactgcccctttgcccccgcctggggccaactttcctgtcatggggtggagcagctgtgttggatggttggttttgctttttgttttgctctattttttatttaaaaggaaaatttttttagaaatgaggtcttgctctatcgcccaggctggagtgcagtggcgcaatcccagttcgatgcattcttgaactcctgggctcaagccatcctcccacctcagctttctgagtagctgtgacgacaggcgcgtgccaccacgcccggctcatattttaaattttttgttagagatggggtcttgcgatgttgcccaggctggtctcaaactcttggcctcaggcaatcctcctgcttctctggctcccagagtgttgggattacaggagtgagccaccacgcccagcctgcttttgtttttaaaggatgaggtttctgttgtttctttccaaattgtaaaagtaatacttaccttaggtgacttagaaaatacagaaaagtagagggaagcaaagtcaggcatggatcccaccctgagatgcacggtctggagtttgcatcccgggctgcactgtgtatgcccctgaggtcatcctgtccagtgttggaatcagcctctgctgggcatcaggttgcctgcacctactccttgtttatatgtgggtgtgtgtatctgtggatgtaccaagtgaaagctttggggaaacatctttgcatgtaaatctttgcatttgggataattaactcaggattaatttatagaattataagtcctggagcgaagggtgggaacagagttaaaattgaacttcctgaaacacgtcacagcgtcaccaaatcgcttggctgggaggactgtgtgcacccagggcccttctgtggggtgggccaggatttagtgtg

SEQ ID NO: 48935 - DNA, 1149 bp, Homo sapiens
gtaccatctgtagttgcagggcaggattaaaaagggacagttttgctgtttgtttgtttgtttttttctgtcatctgactgggtgtcccaatacctgatgtctcctaaaactttttttttttttttttttttttgagacgggcctccttctgtatcccaggctggagtgcagtgatgcaatctcggctcactgcagcctcaacctcatgggatcaagtgatcctcctgccttagcctcccgagtagctgggacgacaggcatgtgccaccacacatggctaaattttaaattttttgtagagtcagggtctctctgtgttgtccaggctggtctcaaatttctgggctcaagtggtcctcctgcctcagcctcccaaagtgctgggattacgggtgcgagccactgtttctggccttatgcacacttttcattgagaacaaagttatttgttgtaagagaaacaccttgataactgttcacacactaaactacccaggtaaccagcacccagatcaagaaacagcattgacaagcccctctcacccccttccagttactaccactctccctgacccaccacgataaccgccgttccatctcctggcttcagaatgtggcctccttttgaaccttacataaatggaattctaccatgtgacctcagattctttcatcatccttgcgagattccaccgtggtgttgcgtgtctttgtggtttgctcatacgtctgatgccttttccaatagacggggcacccaggaggagtcagtggaaacacatgtaccgtggaaacagatcaggtcttgcgctgaaattcggatacctctgaattactgcccatcgtcaaagaaataaagtttatttccctaaaggatgttttgtggtgaataggaaagaatttgcaatcagcgtagctgttaagcccacaggagagcaagttgtattatgttgtgagcctgggttgggtgtgcagagatctggggttcagtctgacgcctctgggccgtggtttccctagatggacatgcaggtggttagatgaggggcccatctagctcagtgctgtgatgctaagcatatacttctcagtgctaagaggttgttttccaaagtgtttgaagtttgctcttaagatcttatttaggc

SEQ ID NO: 48936 - DNA, 1009 bp, Homo sapiens
tggcagaacaagactgtctctacaaaaaaaatttttaaaaatcaggcatggcagcatgcacctgtaaccccagctacttgggaggctgaggcaggcggatggctggagtccaggaatttgaggctgcagtgagccatgatcgtgccactgcattccagcctgggtgacagagcgagactccatctttacaaaacatttttaaaaaaattagcagggagctactcgggaggctgaggccggcagatggcttgagtccaggagtttgagggtgcagtgagccataatcacgccattgcattccagcctaggtggcagagcaagactctgtctctttaaaaaaaaaaaaatcttatttaccaacttggctcatttctaagtggagcaaaaatgcagtgtctcacttctgctctgcctgaattacctccaggccagatttcttggtggaaggaaggagccgtgtagatacagccagagtctcccaggtgcaaagaccctctgagaggccttgataagtgggcagcttccactgagcagcccccagagatggagactcagtgcccacacagcagcttgttcttccattctgggacagttcttcccattaggaatgttcccttgtgttggctgaaagcctgtgtccctaaattctctgtcagcgtaatggcaatgaacctggacttgggtcttcaggaaccaaagccatggagtcaaggatttggagagatggtatatgcatcaccgggcctaacatgatggtctttttttatttttaaattgagacagggtctcactctgtcacccaggctggagtgcagtagtgtgacctcagctcactgcaacctctacctcccaggctcaagtgatcctcctgtctcagcctcccaaagtactgagattacaggcatgagccaccacacccggccatccttctttttttttttttttttttgaattggagtctcactctttcacccacccaggctggagcgaagtggtgcgatcttggctt

SEQ ID NO: 48937 - DNA, 1062 bp, Homo sapiens
ctgtagcctcgaactcctgggctcaagtgatcctcctgcctcagcctcctgagtagctgggaccacaggtgtggaccaccacacctggctaattttttttatttttgtagaggtggggtcttgctatgttgcccaggctggtacactcctgcttctttatgtatgtatgtatttattctctttttagaaaattatttcattgaatcgtcctttaagcacacacttttctgaagctctggggacacttggggagaagaggaggggagggttctagctgtcctgtagggccacattggtcctgggtgcaggacaagcccaggcaggagaaacggaccctgctgaggggtctcctctttgcctcttccctgggtcccagctgggtggtctcgcctgttcactgccgggcagggttgggcagtgcagagccgagcccaccgctgtgtcatcattccacgggggaaggggcttgaaggctgcgttgtggggtgatgggaacccggatttagttggtatgacccgagctcaggtttcagctttgcgacatccttgtggtggggtcttcaggtgggaattcctcctctgtaaaatgagagcttgtgagaattaaactggtcccggcatttgggaaacagccctgtgactccttccgtctcttccctccggagggggcggtccttgagctctactgagcccatgccagcgagagtcgtcatggccgagcccctgggccagattccaagttccatgccaccttggcacttacttttttggctccagtcctctttggctgtcccctctgtgaagggcatctaaggtggtggatgggggaggggagtttgtttgtttgtttgttttggttttttcttttttcgaaaaggagtctcactctgtcacccacactggagtgcagtggcgtgatctctgctcactgcaacctcgacctcctgggttcgagcgattctcctgtctcagccacctgagtagctgggactacaggcacctaccacagtgcctggctaatttttaaatttttagtagaggtggggtttcaccatattggcc

SEQ ID NO: 48938 - DNA, 659 bp, Homo sapiens
tgaatgctcatgcaagctcctctctgcctgctccttctctcagggagggacaggggagggtgatgagtcagtggactaaatgtccccatggggatgaaggacagttggggtcaggtttctagagggagggctggaaggagggaaggagatggccagagaaggatgtgggacacagaggtgccgccatggatcaccaagaggttcaggactggccagagggaggagaagaggtcaaggtacgtgtggggcacttggatgacgcatctgtgcctgcacacagctgaaatccccaggaaataagacgggagcagggtgggtttctgcagccgaggtgagaccaaaatgccagctcactgccaccctcagtaaagactaacttgccctttcccccaactcccctcccagaagtagctcactctcctctgcctgccacacatcggggggtcagggaaagctccccctccctgaggagctggtgttccctaggccaggggccagtccctgcagagattaggagctgggaaatcccctcctcccatcccgcacgtccacgcgtgccagaccctgtgctgtgggcttttcacacacagcctcttagacgcttagcctgtgaggtgggtgctgttgtccttccttcccattttgtaactgagcaaaca

SEQ ID NO: 48939 - DNA, 2141 bp, Homo sapiens
aagactccatcttaagaaaaaaaaaaaaaaactacagttccctttgtaaaatgggtttttggtagagacagtgtcttgctgtcattccggctagagtccagtagctgggactacaggtgtgggccaccatgcccagctaatttttccatttttatagagatgggatcttgctatgttgcccaggctacatttttttttaaatcatgagtttttgaaggaaattggatagggcaggctgtggtaggggatggattggacaagcccctgcttgaatgcctgcatacagtggggaaaagggggatcaaaatgggtcaagccttaagggtccctcctgcacgcagtgtccaggtgcaggtctgggatggcagaagaaccacaggctcatgagcactggcctgggcacaggtccacaggtctctgccccgctgcagcttggccctcctctctccaggcctcagttatctcatccatgaaatggagctgatggaattcctgctaaacctgtgcacaggccctacaaggggttaaaagctgaacctgaatgtagcttttttattttttcgagaccgggtctcactctgtcacccaggctggaatgcagtggtgcaatcgctgcagccgtgaactctgcccgggcctggcagggagttggggctctgtgaagtggttcaggaggggagagaaggaccattatcccacgcttctgctacagatcgcagtctctcccctctaaaccgcccttgcccttcgctggctgcgtctccctgctgtgaatggtcgtaattaccaacgtgaggtcgtcagtctgagctgaagtcctctaactaggcggggagagtcagggctggccagggctcttgcactttgccccgagagagagccgtggagccagcccaggcaccacccgagccagttggtttaaaattgtgtacatagcatggctgtgattcagtgagcttggttgtcttttttttttcccccttggcaaatttcagttactccttgggctaacagacagcagactggtaaagataagatgagagttgcccagccagcgttaaagagagagaggagaccgaagaacagaatgagcaggaggggggcaggaaaaatgtcaagggaaggcctgtccaccaaaggtgtcactgtccaggggcagtgggcaggaggtcgctgctgcggggatgggttctttcagcaggactttctgcacagcactgggggcagaaacatgaaggtgaaaccctacacacactgagtcctaactatgacatttccaaacagagaacactctgaaatgtttgcaactgtgggtgtctttacagccagcctgggttcaggggagctcaggcaggtcctcccgagaataggtttgctgacttggtgttccggacggtaaactaaacccccttttctggggggggttggggggagacggagttttgctcttgttgcccaggctggagtgcagtggcgccatctcggctcactgcaacctccgcctcccgggttcaagtgattctcctgcctcagcctcccaagtagctgggattacaggcacccgccactatgcccggctaatttttttttattagtagtagagatgaggtttcaccatgttggccaggctggtcttgaactcctgacctcagctgatccacccacattggcctctcaaagtgttgggatgaaaggcatgagccaccgcatgcccggcccattgctgctttacagatgaggacatcgagtggttcagggacttgcccagggtcgcgagctgattgcagagctgggatttgaacccaggcaatcagtcttgggtagaccactgggcttgtgaccctggccttgaagggcccggtattgctcctgcccctgcagtgtcctcagcagctctctgaggcgattctctgatccgtgtttttcccgtgagcagattagactcaaaggtgaccgggcatgctggagctgccctgccccacctgaggccgaggccaccactgcccacagcagtccttggggaactccctggtggcgacctggtggtggtggcaggagcctggctctgttgggaaagaggactcatgaccccacctgcagctctccgagatgctcagctggtctgggcacgatggctcacg

SEQ ID NO: 48940 - DNA, 1615 bp, Homo sapiens
ggcagtggtttgggccaggtggagaaaataactagagggtcagccagtcgggtggacgaggggttctggagagtcaggggtcagggtggtcccaggatctggctctaaccgtccacccagggcccagaatgaggcctgtggcttggagggactgagttctgaatcagctgaggaaatggtcaaaactttagtccagggcttctgccagtcctcagggtcagtcccatccatgcccagagctgggaggaaggccccatcccagccttccagaccacacttcctcctggaaagacgctagaaaccacgtgcctggcacagccaccccctctccgctggtgcaaaccccccacccagtcagctgccagcctcaccttcctccctcccacctcctagtggctcccagtgccaccaggcgcctccactccaccctcagcccctgccctgggccgggcccactttttccactccaggatgggggcaggagtgacctcctcaactggccaccacctccaagcagaaactgcctatgaagtcaagatgatctgaagagtccttgcagctgccaccttgccttcaaccctcacgtcctgtaacccatcccccacccccgatcctgtgactctggatttaaaatctgttttgctttccttgcacccagtgcaagcatctaggtgcggcgttccaggcgcctcgcagggggtcgggtccccagccttctgtcccaccgttccgtcccccgggcccggcccacctggcgccccctcccgcccgccaccgcccgctggcgcctgtcggtcgtctagacccgccgcccccgctccaccgctcagatccgcggccagagccggaagtggctcctgccccggccgggagcggcggggctgagactgtgcccgcgggcactgccatcccgtgcatggagagggcgcagagcccgggggtagggcgggccggggaacccgatcctccttcatccgcgcaaaggcccgcgaagctcccaatctgttctctttcaggctcactgtgcagatggcgtgcaattaagtgggtcggtgcagcaaaccctcgtatcctcccgcttccctaaaagcagaggattgagccgctgcactccagcctgggcaacacagcgagaccctatgtcttaaagaaagggcagaagtggggacccctctcccacccccttcccctgctccaagccaaagcgtttgaagcaagaggttgcctcctgtgagtttcccccagtccctggaggcctgggctttgggaggtgtgtccaggcagaggacagaggtcttgtgcaaagggccgcttttcccttcgcccaccctgcgcccgcccagccccttatccgatgggaaagccttactgactcttttcctcgcagaagcgcccagatgctgtttatgcaacctctccagaatctcagtgtactgtactttttaaaaagtgatttgattcaaagcactcattctttaattaaacttcatttagctgccatctgtctcggttcgaaatggcttcgtgttttgcaactctaaatgagaattgttattggatttgtaaacacatccccaaaaaaatcacaaaacactttcaaaagtaataaatgaag

SEQ ID NO: 48941 - DNA, 564 bp, Homo sapiens
cgccaccacgcccggctaatttttgtatttttagtagagacagtgtttcaccatgttggccaggctggtcttgaactcctgacctcaagggatccgcccacctcagcctcccaaagtgctgggattacaggcatgagccaccatgcccggcccattacgcaagaacttttatgtgctctgttaatcctcacagccctgcaaagtaaatattatttcttcatttcacaaatgaagaatctgaggttcagaaagatgaagggctgagtccagggttacacaactagaaaagatgaagcaccaggcttggcttcagaggagaccgccagactgactcaggcggctgagcactgccccaggcgaaccccgcaacttggggctggacagagcttctctttcggtttccctaatgtgtttgaaagagagtaacagaggtacatttgaaaagaaaaacagagggccgggcgcggtggctcacgcctgtaatcccagcactttgagaggccaaggctggcagatcatgaggtcaggagattgagaccatcctggctaacatggtgaaacccc

SEQ ID NO: 48942 - DNA, 1061 bp, Homo sapiens
atgcaaaattcaatttccactccagctactggaaagcagtatttaattttagtcctgccaaacaaaatgaagcaagcggtaagtgattgtggcacatggaagtgtttcatgcttcagaccgattgagttcgttgtcctttactttccactctgaggctggctgccctgttaatttccattttctcagggattacactgatctcaatttacaccgtaataataataagaagaaaagaatcaagctaagtaaattacagcagagagcaaaacgtggaatggatgggcccttacagaagagacttgttttcaggctgagaacaaaggagtgtggatggattaggacagcctgagtccagcctcagcctcttaccagctgggctcctcacctgatctctctaagccggttttttcaagcacaaacataatgacaacaatacctacttagaggatttgggaatgcaaagaggagaaaaaatatccatgaaaatacttgaaaaaattttccgtgccgcacacgtcggctgcagttagatcaggtatttatcaagtcacccaaatatttttacccaccagcttttctctcctcctactttttgcctgtctcccatgccagagagacaaaggaggtaaaaaccaaagtcctcatcctcttctcaatcaattcattggctggttctcatccctggctgcagatcacagaccccggggagccttcgccccaccccagggccattgcaacaatccctccggggtggggcatgggcttgaagccaccacttcataaaccctctctctgaacgtccttgaaaggactctgccataccctgggaggtcacgtggttttcttgctaaggctactgccagccaagaaaccaaagcttttgctgaaatgaatctgttaaacagctgcttcaaattcaacctcacagatccctggggtatgaaactgtctgccctcatggagttaaatgggcatactttcattctggtatgattgcagcattttaactagcaatgttatggagtttttcaacattgaaagtggttatctgtgacccata

SEQ ID NO: 48943 - DNA, 3269 bp, Homo sapiens
acccgggaggtagacgttgccgtgagccgagatcgcgccactgcactccagcgtgggtgacggagcgaggctcggtctcaaaaaaaaaattccactgtgaaccactaaacaaattcatagaagaaaggaactaccttccaaacgttttcacgatgataagagtcatcttggctaaataaacttctgccttgctaactcactttgtaacatccccccaaattctactccacgactccactatacccaggaaatcctttccctgacccctccaggtggagaaaccactctctcaacaaaagatactcactgaagtccacagcagctgaaatctgcatctcgtaggctggctgctcttactagagtgagttataggcttctcaagagttaaatttgttcctaaatatatgccagtggcacgtggtattgggaatagagaatttaattaaatattactaaatgtcaatgaaatacaagtgcaaaaagaaagttgctcttgtgcaaacttaatgaatgactttcgagacaatcgacaaaggagagtcacaatcttattaggcaaggaccgaagggatcctagacattgtccgggaaatcgcaaaaattcaggcttctgtaatcagattgcttctccggtgagctttacgctctccatgtatttttcaaaaaaaatccaacatgaaaattctagaggaggctttattgggtgcggtctgtgcaagagagacgatggggaatgccaatcggagaacccagattgaaaggaaaggtttttggaacccacatcaaaagactggctgctcggaaagttttctcgctagcgacaaaggcttggaggctggaaaaagcgtcgtggtcgccacctaccgagaagcggcgggtggggggaggatggccgtcgtggcccgaatccccagtgggtggtactgggtgggggggcgggcgggaatcaaaaaaccactcaatctcgtgctttacataaacatctaaaaatcgtcggcctcggggttgtaaagttttggagtttaacttaggtgaacagtaatgtctctccattttcaaaacccaccggctaattcaagttgagaagcaaaaaatagtggtagggggaggagtttgagttaaatcgcatcgcggttgacagaacaaaacaggagctacgagtcaggatttctgctcccactcccttgcaagtttccttccaaatcctgagggagagatagaggcggagggtctgggggaggaattaaaacacaaggtctcctcccctctcgcctgtccgaacttgggggcaacggtctctttggaggccagcttggaaaacactagagaggagttctttgtgtcctggagggtggtgcaaggcggaaggactccccttttgcagagcaaggagggcgacggcccagcccggggctccccggcttttgcagcttccctgcctcgcaatttgcaaggaatgtggggtgcaagagcaagtggcggacttggacggcggctggcgctcggtggggacgacgccggagccaccacccgtccagatttccgtttctgcaccccggctcccctcccccacccgggcggccgcgcaggccccaggtgcagccatgttctcgctcccaccaccctcgcctccattgacagcccttgctggagagggccgggcgccgcgcttgcctcgtcctcgggttcggggctagccggcgcggtgcttcctgggagttgtagtccacgaccgccgccgccgcgttgacggggaacgcatccgaaactacaactcccgctgggcggcgctgcggatgcgcaggcgcaacgcgccttcgaggaacaaaaaaaaaaaaaaaaaaaaaaaaaaaagaaaaaagaaaaaaaaaaggaggaggaggaggagggtgagagagaagctgggagagcagagaaaaggggccaccggtcgcccccccgcttccccgcacgcgctctccagccgcggccgcccgcctgccgcggtcaccccggcctctgcctctgtcccccagtgatcggatcaaggcgctgagcgaggccctgcctgcggggcggccatgcggcggtgacaggagcgcgaccgacacgcacgggcccctcgccccctctcgcctcccgtccgctcgccagctcccctcagccgaggctgctccgcggcggccgcagcccgcgcgcggcccacactcgcctcccctcggcacccccggccccggagctgcctggaggcggccgcactcgggtgagtccctctcgcctcatccccgcgccccccgcccccgcctcgggggccattgcgagcgggggcctttattagagactttgccccgccggggcctgcagggacaggggcctgggagccgcggcccgccgcgcgcggtgtggggccttggggggcgcccgtgccgcctccccctacccccacccccaccgcctcgccgggtctcgagccccgccggccttggcagtggccgaaacgaggcgatgggggtggggcggcacggacgcggtcgcgggggacgacagtggcacgcgcgcgcctcagtgcgcgtgggggaggggcgcgcgcgccgaccggcgtgcggtgggggggcgcctcgcgcgtgcgatcccgcgcgcgagcgagcgagcggccctgcgggctgcgcatgccccgccgcgctgattggccggctaggcggtgcgggggcgcgcgcggtgccaggcccgagccgtcgtggggtcgcgctcgcctggtgtatctggggctcctgcgccggggcagcagacgcgcgggattggccaaccggcgcgggggcggggccgcgcgttgcctggtaactgcggcgggcgggggagcgggagcgctgtcccccgccccgccccgctcccaggtggagtccgcagtgggctttgtcccgggccggcccggcgcgcctgccccgcggggcctgttctttgggggaaataaacacaatgaccggaaggaaaacttcagctttaggccatgaaaattaagccgtctgggttcagccagcacccagacgacgggagtgcagaggaagaaggaaaatgaaatggaaaaagctgtctccttcccgctccccgacttctccactttttcttaatccagcttttgctttttcgtgtagcgaattttgtcctccctaggttatggatttgcgctgatttgcggctggggatgttcacaggtggggtgctgttggagtagtgtccactcttggcgatgcgcagctcttgctgactgactactgacctcctttttttaa

SEQ ID NO: 48944 - DNA, 1608 bp, Homo sapiens
ggcctcccaaagtggtgggagtacaggcttgagccaccacgctgggcctcatctcttttaaattcaactttgccgcagacaatggcttgatcagccaacagtgcagaggagaagtctccagtccttcagggaacaaaaggggaagttagtttgcaaatgagaacgtgcaggtagagtgccctgcggaggcggggtcttctccccaggctgaggcctgtggtgtgggatgaccgattttatttcctgctacaggatttttctgtggctgctaccttggctttcgtttctcctcctccttgagatcttggtcttttggctggaatgacatttttcagcctatggaaatctttcttgctcatatgcagccacttccttaaggtcttctcttttttttttttttttgctgctgttgttgagagggtttcgttctatccccccaggctggagtgcagtggcgcgatcttcgctcactgcaacctccacctcccgggttcaagcgattttcctgcctcagtctcccccgagtagctgggattacaggcgcctgcccccaagccccgctaatatttgtatttttaatagagacggtgtttcgccatgtttgtcaggctggtcttgaactcctgacttcaggtgatccgcctgcctcggtctccgaaagtgctgggattacaggcgtgagccaccgctcccggcctgtggtcttctcttatattgcatagtcagagtttgttccttcttagtctcccaatcaacttgtgtgcccttcctcgcagggcacctttattttctctcttttttttccttttcctttttcttttcttttcttttttttttttttttcggaagcggagtttcgctctcgttgcccaggctggagtgcagtggcgcgatctcggctcactgcaacctccgcctcccgggttcaagcgattctcctgcttcagactcctgagtagctgggattacaggagcgctccaccacgcccggctaagggcacttttactttcctctgcatctggcctagtcactgggtgttgagctcgtaggggcagggacaagaagccttttcctcctatgtctttctccctccacttccccctccagtttggcatcgtcctcgtgccttgccggtggtagcaatgctgcttacatttgagtgtcttccgtgccccctccatggctcttgagcgctttggatgtacagtatttttcttatttaatctttgtgacaagtctgtaattctattctatagagcggaacaagtctagagaagttggagagttctgtactcttgcttgcctagcacatgaacctggccagtgtgactcaacccctaagccgaggttgtgaaaccaccgcgcctgggcgtccccgggagagctggcatgtgcggactctgcttgctgggccctacctcccaggctgattctgcaggtctggggagttgccccacaatttgcatttcgattagctccccaggtggtgttgatggtggctgcttcccggacagccctttgagaaccattcacaatggtgcaaaatgaagggagagaaatttattggagatatttgctttttcttactttaaaattagatcttggcc

SEQ ID NO: 48945 - DNA, 468 bp, Homo sapiens
caccaccatacctagataattttttgtatttttagtacagacagggtttctccatgttggccaggctggtcttgagctcctgacccgaggagcccacctcggcctcccaaagtgctgggattacaggcgtgagccaccacatccggccgggagttcttttctagataaaaagttggtgtgttgaaaaccagtgattcactgtgcaagtttgtttaagcatattgcaaaattaaacagttctcctccactccctcacagatacgagtcaccttatcacagtcttcagtgagttttgtaatctgcatttagagcagtggtgagcttatttgacattggaacagtgttgaaatttactatagggttttaatacccacagcctttcacagtatgaccattttcatatctgtgtttaacctaacactgtaggttttatgttaactgattgatacagcattttcttaaaaacat

SEQ ID NO: 48946 - DNA, 1375 bp, Homo sapiens
tcacgcctgtaatcccagcactttgggaggccaaggcgggcggatcgcttgagttcagttcaagaccagtctagcaaacatggcgaaaccccatctctactaaaaatacaaaaatttgccgggctaggtggcaggacgatctcttgagcccaggaggtcgaggctgcagtgagctatgatgacaccactgcactccagcctgagcgacagagcgagaccctgtctataaaaaataaattaaaacaaaaaaatcccctttctgagttgttcattgaaacacctcagctggtatacattttcaatggacttttgaattttgctttcctaacatcagaactcctgcagtcacgctggcctgagtgagaattccaccgcatataaacagctagcagcggtggggcctcgggcctcaacctctctgggcctccccttccttccctgtaattgggaataactgtcgactcactgggtgctaagcgaatgacacgacccggcacaacatctggcactgccacccaataaatgttgatggccacccctaacgccttcccctcctgggcttgcagccagctcgagggtcgtcctgccggaagtctgtccacccagaggagccaacttcttgaagagagccgaacaggtcgagggaggccgggagcgcggaagagagagaaggagagagggaggaagccgcggcctgcaccttttggtccagctccaggcgatagggcacgggctggatcctgcggcgcggtcgggcgccggcgcggggcccgggcccggagctgggcaccacaaaggaaggcacgcccagcgcccccgagaagctgaagccccacacgaagacgcgatcggcgcgggcagcgcgctcgcccacgtactggaccacgggcacctccgcctcggcttctgccgcttcgcgccggctccgggagcgcctggccgccgtccagtgccctcgccccagccccggcccgctcagccgccgccccagccgagccccagccaccaacgccaccagcgccatcctccgttccgcgcctcagcagcctctgggcgccgccatcttgcgtgacccttaacaccagtcctcgccggaagaggctacggccacttttactcctggttgaaggcaaaggcgctgacggcagcccaaggctcagggaggcgtggcgtggcgatggtgaggggcggggttaggggcgggattaggattcttgtcccttagcgaaactgcgtgtcctgttttgctcccttgctattgccccgcgacatttcttacctggccttgctgcagccgtctccgctccggtctgctcccacgccgccccaggccgtcctccagcgacagcgagctggagtggacgattccctgctg

SEQ ID NO: 48947 - DNA, 1115 bp, Homo sapiens
gttccgtgcagccggaccctgccctcgaacccaaacacacgtctctcctgcaagcgatcgggaccctccccctgccccacactcaaaggtccccaacacacggtgacttcacccaggcccttctcgctctgggcccgaaaatcccagacttaccctcctggggctccgcagcctctgccccccggctcccgagaggccggggcggggctgctgtcgctggcgcgcgcgtctgctcgcgaggtcccctcctgtccacctcaccaaggctgttctgctcccgaggggcccgggccgggcctacggggcaaatccaggcgggtgtccttctgggggcccagatccgcctccctggggctcaccatacagcgacggcctagtctaggccgccaaggacacatacgggccaggcccgggtcccgccgccccttcgcctccgccgccacttcgcctccgccgccacctcagccgactccctcccggcccctctggccccagcgccgccgactccggggctcacgctccggggtccccgcttgagcctccacccggcccgcgcgaaccctggtctgcacagctccgcgtccgcctaggtgctggcccgggcggtcagcatccagccccgcaggctatgcgatgctcgtccactgcaggccaaaccctaggaacgagagcaagcggcgacctgaagactcacaggaagcgagggcagtgcggcggcagcgcgcatgcccgaacacgcacgccgggagaggtgcacacgcgcaggagtgcaccggaagtccgcctcccagggcccactgctggtctccggacaagtactggactctatttcccatgagcctatgcgcctcacaagtttaggggcggttttaaatgtctctaccccgcctagaggataagaaactccaggctatgagctttggcagccctgaacaccggactgaacttcacgtttgtctttactcccttttagtccagggctgccttactgggtcctggagcccaagtcctctgggttagaaccgagtttcccataaggagaaggaaaggaaagggtgtctcttggtcactgcgctgaaatgctaagagaagtttcactcaaatactaggacagg

SEQ ID NO: 48948 - DNA, 1127 bp, Homo sapiens
tgagatgggcggattacttgaggttcggagttcaagaccagcctggccaaaatggcaaaaccttgtctctaccaaaaatacaaaaagtagccagacatggtggtgcgtgcctgtagtcccagccacttgggaggctgaggcaggagaatcacttgaactggggaggcggaggctgcagtgagctgagatggtgccactgcactccagcctgggtgacagagtgagactctgtctcaaaaaaaaaaaaaaagaaaaaaaaaagtcccaggtatgtgattcacagtctcttgagaaaatctactcccttcccctcccggccccaggctctctgaaggacatcatttggttctgaactgttcccgccccgccacaggccaatgcctgggggcccctcccagcaccaagggcgggcagtgcggggctgggtgtctcacctctggagggggctctgggttagggaacatcatctgagaacaggctgttctctggacttccctggagtcacacaggacctaagaccaagccgtgtctcccctgaaagggtggcattgtccaccacttcctgacccagcaggccctcgtgtccccggctggttccggagagccaattaccagcaggcaccgcaggaagggcgcctttctcccagcctctcttcctccctccccagcactccccatcctccgctcgcctgggacagcccagccaggcagtggccaatgggaaaccctctggccttgcttgtgtggggagctgggcctgggcctggcctgtgggcccagttggacactgtcaggtcacatacacacagctcttggcagaagcccagccctcgggctgccaaggccaggctggctcacaaaggtcccacggcaggagcaggcacggggatgtgccccgggtgggggtggcaggtccccaggcaaggggccagagaaggaaaacctgagaacaggcagcacagatgggaaaggagaagggcaaaacaaaggcagaggaggccgggcacggtggctccacctgtaatcccagcactttgggaggcggaggtgggcggatcacccaaagtcaggagctccagaccagcctggccgacatggtgaaatcccatctctactaaaaatacaaa

SEQ ID NO: 48949 - DNA, 1508 bp, Homo sapiens
aaatctccattcagagtgacagccaatcaagacccctgggaaaacctgcagtttccgggcctccaggtgctccctgcgaacccccctcccatcagaatcccccaaatcacatcctggtaccggctgaaggctgctccttggtctcaatcaataagcaatgatttcttcaagatcctactgtattcgcggtggaggtgggggtggagggcttctctgggggagggcacagacccctccagaggagcccatttctaaaggaaaggcggagtcatgcttaggaggcgaaggtgttggctgcacctcaggcccactgaagctggggttcccaagtggccaacctagaaccttccccgtctctgccaagggctccattcctgccccctcacctcctaggatggttgaaacctggcttctcactgtcctcccagcgccacctgtgcctccctgcccacgggctcagccccacacatcttccatcgatctcctgtaggtgtgcgggcagggggctccggagggcacggtacaagccccttccggcggcgctgccctccctcccgtccggcaggtctcccgaggtgggcggcgagccccgcagcccagtccctggagtccagcgcgatctcccgggcagcccggcggcggcgcggcgggaaagccagagcccatcccggccggccagccgcctccagaatcctggcccggctccctcctccggcacgcctggagttggggccaacaggcaggatcaacaatccagaaactttcaatggatcgcgccggctaggagggggagaagggagggcgccagggctgggggtgtggggagggggctcggggcaaagcccctgctcacacttaccatcttgctcacatccatgaccgaggctgcggggcacccccccacccctggagatcccgcttcccccaaagctgctcccggctaatcgcgccccgagggtgccatgctgcggggagggcggccggcagggcccccgcggaccggggcaggcggcggcggcggcggcggcaccaaggctggaccggagaaaggaaggggagggggaggggaggcggcgagggggagggggaggggggcgggcgcggagccgcagcgcgcgccgggggcgggggaggcgcggccccgccggcagagaccggcgcgcccgagcccccggggaccgggaaatcccggaatcagctggcgggggcgcgaggggagaccgggaggcgggttcccgggccagatcccgcggcccccgggctcgcacggcgaggatgtgatttgaataacaaaaggtggcttctccccagagttcccggtggcggggatcgccgatcccggagcgagaggccgccggcccgccaggaagcgtgtgtgtgtgtgtgtgtgtgtgtgtgtgtgcgcccgcgtgtgtgtgcaggcgtgcgtgtgcatgcatgcgtgtgttttggtggtgggatcagtgggactcaggaagtgagcaggggaggtggtgaaaaaggaggga

SEQ ID NO: 48950 - DNA, 1049 bp, Homo sapiens
cctaaattactattagcagtagtagcagcaatgaccctgaacactattttccaagcacccactatgcacagccatacctacctctgaatctgagagggcaaaaataaaggagccagacagagggtggaggaaaacagaggttgttattgccagctgcggttcttcaccccagctgcacactccaattacctgggaagcctgggccccgccccagggattctgatgtaatgggtctgggatcagcctgggcatcagaactttaaacctcccccaggaggctgtgatgtgtagccaagactatgaacaactgaacaaccacagccaggactcaggaacccccggcctggtcttggctgaagctgagggctgcaggaagcaaggaagtgtggcacttcccttactgcttctcctacacggggaatttccaagctcccacctggaattttccatcccttggccaaaagttcagcataggcggagacctctgaacgctttgcctctgatattaatagacctgtttttcctcctgacactgctgttccccccatattaaacacaggtgtccatggtccctttccacagatttgacatcacaggggaaagggtgacttcaagcgtggctgagctatatggagatgccaggtgcacccccagagcctaaccattctgcaagatagaccccctaagaaaaacacctggcttggtcttaggatctcatgattagctggcgggttctgggaagcaaagatctgccgaatttctaaagcctctccaggcaggctgcgggaggccagcaggggtcagagggccttttagaggcaccaggacagacgggagccactcagccaagtccctgagtcagcaaacagcctggaaacctcgcctcaagggtgccccaggctgccagagctctctgcccctgcccgccagctcctccctgtaagtggtaatttggagcacccttaatggcccagttcaggagctgccagccttgtactggggagaggtttttccactgcttctccgctggaggacaagtccagggatgt

SEQ ID NO: 48951 - DNA, 651 bp, Homo sapiens
gggagactaaggaaggaggatcacttaataaataaataaataaattgtcgaataattccaacttctgggtttcctcagggactgttggcattgatggctttttccccctaaggatcatattttttgctttctttgcatgtttcacaatttttgttcaaaaccggacatttcaaataatataatgtggtcatgctggaagtcagattctgctcccccctctgtagggtttgttcttgttgctgtttattgtggttgctgtttgtttagtgactttcctcataattatgccaagtctgtattctacatcatgtgtggccactgaattctttgcgcagttaacttagtggttagctaatgattagacagatttccttaacctcttggaaccaacacatctactctttgctgagaggctctggatccatgcaaactttcaacacctagccaggcagtttctaactctgcctcagctttcacgttctgctcgcacagagcctcaaggtcagtccaaggggggttattattgccttctgaagtccttcctgggcacacacgcagccaacacacgcacatggccatctgcacaccaggaggatgtcagagcttatagaagccccctatggcctggcgcggtggctcatgcctgtaatc

SEQ ID NO: 48952 - DNA, 718 bp, Homo sapiens
aaacaaacaaaaaaaacttccagaataggcaaacccatagagacagaaagaagactagtggttgtcagggactggcaaggaggggacagaggaatagggagtgactgtgtgatgggcactatggtttctttgcagggggtggggaggggtgaaagtatcttggaactacacagaggtgggggctgtacaacactgtggaagtcctgaatggtgaactgcaccttttaaaatggttaatgattaattttatgttgtgcaagttttacctcaattacaaccaaccaaccaactgctaggcacagcttctaataagcagccagcagtttccagtttccgttgtctccccccgtcccaattccactccccaaaggcagtcttgctttttaacctcttttcccttctggccagtaatgataaacttgatattttcaattaatatatctgcattcctttttctttaattatttattgatttttttttaaggcagggtcttgctgtattggccaggctggagtggagtggtttgatcatagcttactgcagcttccaactcctgggctcaagcaatcctcctgcctcaagtctcccaagcagctgggactacaggcacacactgccatacctggctaattttttttttttgagacagattcttgttctatcacccaggctggagtacagtggcgcgatcttggcttactgcagcctctgcccccc

SEQ ID NO: 48953 - DNA, 1739 bp, Homo sapiens
ggatgtcaatgcaaccaagaagtgatcggaggggaagagaggtcccctcacccttcacattcccagcccggcgcccccactctccgcccccacacttgagcctccaagtggctcccgtgcgcttcccttgtttaggggcaacccttccattccgccccttttcagttccttcccctctcacctcatcttgggactcctgcccggtacccagccgatcaggctcctcttggccacgcatcctgccatctcctccgagcccgcctctgcccttctccccaggccagctggggtaccctggggtccccgaccttcctgggatcgcccagatctgcacgtcaatgcccccgctcactacaccctcgccccgtcttcaactggggcctgcaagactcctactcccttcaaagcccctcccggacaccgcgtccctcagggtgccccagggatgccccggggtcccccgtcctcacctgagtccgctcgaagctctcgcgctccgccgcctccagcccagcgccgaccccgcgccggctcagcaccttgggcagtgggttgggcacctgcttcatggagctggccatccgatccatgtcgccgcgaggagccgagtcaggggccctcggctgccccgggatccccacggcgccgcccgccccgccctacccgcggggatccggcgctaacgggacggctcccgcctgccattggctgtgagttctgccagtcttccagagaccccgcccctcgccgaacggcttccccgcccgcccccgccccttcaggagcccctccgctggctcggccccgactagcctctcggggcctcgaggcgcgtggtgactggtctggagtcctgtcagtcaccgtggtcccgccgttctaggcagggccggggcggggtgcggacggggcgaggcctggatggggcgtggcctgggcgggctgccctgatatgccctcgctcgccccgcccccgcccgcgcaccgccctctcctcccctcggccgcagtccccgcgcgccccgagcgtgctgccctccgccaagcgccgcccactaccctgcccgctcctgcagggggctatcccgcgacggcccgtggagatgggcggggatgacgcgggccgggcagtggggcctcccccgggggaatcccagcccgcctgcgaatagcccgttagctccttccgggcctgggacccgggagcgccggactgaccagccctgcggccgcagcccgggaaagcgcagccccgcgggcggggcgcagcgtgggcgcctggccggatccggctcaatgggtggccgcccccacccagctcccaggcttccccgtcctgcacttctccattctgcccctgcccatgccctctgcaaggatcgcagagcccaggtcccggagttcggggctgagtccgcgggcacctcccgggacctgcctcccaaacctcatcaaaggaacccgtcagagcttatttgttggtagaaagccctgtagacactttcggtttatcttaggctctgagccgcgcgtcccatcctgctcagacgtcagccagggtaccagcaagcagagagaagtgtgatgcttagcaggagtgctggagaaagttaaaagttttccgttaaactccaatttaggtgtgtttttgtttttgtttttgtttgtttttttttttttttttggtttcatttggagtcagtctccctctgtcgcccaggctggagtgcagatcgtaa

SEQ ID NO: 48954 - DNA, 690 bp, Homo sapiens
ccttaaccttccctggggccctggatgggtagttctgtagctcccggcctcttgctgaccactggaccaaaatacacagaagaatcctatacaaggtaagcatttgacggatacctcttaggtggcctcagctttaggaagctttattggatccaaaaatagctttatttccccaggccagcctccccacataccttgcctccagcttagtgtcacagtgcctgtatctctgtgcgaagagtgatattggggtgtttgcaggctggactcagagctgaaagtctccctgccaagtagtgagcatttcactattcacggaggtgccccaggggccagcagagagatttccagaacaggaaacacccccgcagaagtggagatcaacagtaacaacaatgtatatttctaaacagaacagtgactcatattaaacatctgtttcacaatagggccttatatgcaaaacaaccctaagtatagaaggagccaagaaaccaaagaatgaggcagacaaatccagtttgtcatcacggggtgtttcactgggggaactatggacagaagcatcgtcttggatggccacaaggcaggtagatctccatgctgttacatcccagactcaggaactatataccataaggaaagaatgcacatgctccagaaggaatgtgtaggaatttgcttaagggc

SEQ ID NO: 48955 - DNA, 1642 bp, Homo sapiens
tatgctggtatgcgggacctgaaagaatatctccaagggaaaacgtttcataatgttcaagttgttatctatggagttaaggggaattgtaatcttgtgacagggtctacgtgattctaggacagacgatgggcacctatcatagctgatacacagagctatgagcaagcaggtcggagagcaaggtgacctagtgatgaacgcagagtgtgctgcaagcttcgtttattttcgtttttccccctcccttcttccctgattaatttcctaaagtttataggagcagtttcagtaccagcccgagtaggatggaatcaaacacggtgctggaacattcctacccggaagtggccccgacccccctccccccgtcccggcctcccacgcacggggggggggggggggggggctgatcggcgctaccggattggacaacttggcatggggcggggcctctgggaggcgtggcctccggccggctcctctgctgttgccaagggaaactgccgcgaggaggcggaaggagcagaggaccggcagccggcgtcgaggcggggcgcgggaacgacggcggccatggcggcctcggggcccgggtgtcgcagctggtgcttgtgtcccgaggtgccatccgccaccttcttcactgcgctgctctcgctgctggtttccgggcctcgcctgttcctgctgcagcagcccctggcgccctcgggcctcacgctgaagtccgaggcccttcgcaactggcaaggtgagcaggggcgggccgggatcgcggggcgagtccttgtcctccgactttgccggttcctgggctctagcctccgggactcgccccttcaggcctcaccgccagtctccccctgtctcggtcctcatcaccatgcccgccccccggaggaccgacctccagcaccgtctcttgctctccgtgttccacacctttgtctgcagaccccatcttcgtcatcactgtaatcccttccctacccgaatttgttcccttccctgtcgccaccagactggttaaggccccaaatccattcgctagcaaatccatgctcgctctccaagggtaaagatttttcgtctccccctcccatttcacatacacacctacgtctgctttaggcctaagccccactgaaaaacgtttttctctcacctacatcacgacaattggactttatccacaaacccctataagccctataaacgtcctgccctcttgagatttggaatttcttctgctttttcatctgtatcttaatcttgactgccattcccagctcatgggggtaccagggtgtcttctgcctttggagagaagtgtttgtttttctctaggggagagaaattttgcagaccaattaagtataaacatccattcctgaaagacattcctagtctccgtgtcttcctcattttctcgagaggaacacaggaaatttgcatatctcctgctgttttgcaaagcacacacactgatatgtattaatttcgtttaaccctcacaaggatcccatgacgtaggacctgttattggcccgttatctagataagattgaggtttcatgcagagaatcgcagagctgttgcgtcatgcaattgagataggaatctatatttttttttttat

SEQ ID NO: 48956 - DNA, 2598 bp, Homo sapiens
cgagttaactgggactacaggcatgctccacgatgccagacaatttttgtatttttagtagagatgtggggggtttcaccatattggccaggctggtctcgaactcctgacctcaagtgatccacctgccttggcttcccaaagtgctgggattacgggcttgagccaccatgcctggcctaatttgacatttctaacaagttcccaggtgaggctgctgctcctggtttgagaatcactgaactaaaccagtactggctgggatgtgagtcagcctggagactcccagcccctggaggccagggatcagctctcatcaacttccatttctgctaagtgactgctcagaggcacaggcaggtgtcctccacagcactgtctgaacagttcgtggaagccaggcaggcttctcttcatcggcccttgcacaatggtgctggttgctttggcaacagccagcagcagccaagcaattttgagcacagaatcctggggcttgtgtcatactggggagacagggcaaaggttctggcccattggcatgtgaacgcgaatggggaggaagagggggagaaagggcgtggcttccgaggccccctctcacccgaacaccctctcatttccccagaagcttgctctggctcccgcatgcaaacccagaagagctgaaactttgattgcgtaacagaggggaacaaaggatggagtgaaactggggcgggtatgcgggcagtaggaaggagaaagaagccatcctgggctctgagaaccgctgggtgcaccaggccatgtcacacacacagcaactcatttaatcctcacgcaactgcctgggtccgtgtgcccaggacccatccatggccacacagctagccggaaacctgatctgctgtagctaaaggccatgtttgctttctcagttcagggccgcctctttgaaatgcctctttggccgtgttaggaagacccaggggtttggggcagcaaggaggcaggaagaaggtctgggggagttatttggacaatgaagagagccaggcgggtcaaccatcctcttggctttgcacttgacagcaaccgcctccctcctgtttctcattttcttttattattaaatgctctaattttcttttattattattgttttttaaacatagagatggggttggccgagcacagtggctcacgcctgtaatcctaacactttgggaggccgaggtgggtggatcacaaggtcaggagttcaagaccagcctggccaacatcgtgaaaccccgtctctactaaaaatacaaaaaaattagccaggcatggtggcacgcacctgtaatcctagctactttggaggctgaggcaggcaggagaatcgcttgaacccaggaggcagaggttgcagtgagccaaggtcgcaccactgtactccagcctgggcaacagagcgagactcggtctcaaagaaaaaaaaaaaaagatacttggccaaggccatgcacttggttccgtctaattggaatttgtcccctgatctccagagagagattctgcgcttctacactttggtgatgttctcatccctgaccctgtagggttatctcaacccaggaaatctgcaaactcacttgccttgcaccctcatggacgcctctcaaggggaataaaccatcctgtccaaaggtcatggtgtgatactggagacacatgagacacggtgtcagaggccgctgtgacatttggagttctgggaaagtgggagcacctcctctaaggatcaaccacacccctctagcatctatggtggaagccaatccagcttctctcagtgccaagctaatctgggatccactttttctttttttcttttcttttttttttttttttcagagacagagtttggctctgttgtgtaacacggttaaactttggccatgttaggaggacctaggggtgtggggcagcaaggagaccggaagaaggtctggggaagttatttggacaatgaagagagccaggtgggtcaacaattctctgtgctttgcacttgacagcaaccgccaccccccctcctgtttctctgctctcattttatcttttatttttatttttttaaaacataaagatggggttggccgagagctctgttgcccaggctggagtgcagtggcacaatcacagttcactgtagcctcagcctccaggctcaagcgatcctcccacctcagcctcctgagtagctgggactacaggcacgcgccaccacacctggctaattttttattttttgtagaggcggggccttgctatgatgcccagtttggtttcaaacttctggcttcaaacaatccccgcctcagtctcccaaagtgctaggattacacgtgtgagccaccatgcccggctccactgcttttattttattttatttattttatgtttgagatggagtctcactctgttgcccaggctggagtgcagtggcgcgatctcagctgactgcaacctccgcctcctggggtgaagcgattctcctgcctcagcctcccaagtagctgggattataggcgcctgccaccacgcctggctaatttttgtatttgttta

SEQ ID NO: 48957 - DNA, 9699 bp, Homo sapiens
aggtgatccgcccacctcagcctaccaaagttctgggattacaggcgtgagccaccgtgcctgggctatttttaaaagatggagaaggggctctgagagaagtgagttgcacagtgttgcaaaaggaattcacagcacagctagtaataatagtagtagtagtaataataacaatggcgatgagaacacttagtaatgccgtgctctaaatcctttaggaacaaaggttataccacttaatcttcatgaccctgtaaagtagaaaccatagcaggaggcagaggtgggcttcactccccaaccaaggctgccagacttttcaaaccccagaagctctctgtatccccccactcctcttccatccagggcttgcctcctgcttggtcacttcccacccccaacaggccggccttcaaaagcgagctctaggcagcgtgtgggacctcacgcctgtaatcgcagcgctttgagaggccgaggagggaggatcacttgagaccagttcgagaccaacctgggcatcatagcgagaccgcatctctgcaaataaaataaaataaaattagctaggtgtggtggcgcgcctgtagtcccagctactgggaggctgaagtgggagaatcgcctgagcacaggagttgaaggctgcagtgagctgtgactgcaccactgcaatccagcctgggcgacagaacgagaccctgtctctaaaaacaaacgcgcgccctccgccgtcaggctggatggagggaacccagggagacgacttgggcctgaagcctcgccaatttcaggtgaggaaacagggccgtggaggagacaatgtggcgatcacaagcaagcggcggcccgaaggaggaggctagaccggcgggcgcacagccacagttctgcagtgatccccgggaaggtgggcagccggcccggtgacctgcagggtccgagctgtagaagccgcagccgccgtctccaggcgactccgccacccccggaaccacgcactttcatttctctgccgggcgacccagccgagccgcgagggggcgtggccgggccgggccgtaccaagagcgcaaatttgcagggggaagcgcggggctccgggaatgcacgcgcggctcgagtgggcggggcggcggcccaatggccacgcccccacccccgcggccggcgaaggcggtggtagcgcctcagtggtgtgggcctgagccctgcccaggtgcccgcagagagcagccgggctgccagcggtgagtgctatctttcgcggcgacggcggggtgggtgaggtcgggccccaagactcggggtttgccgggcgcctcagttcaccgcggccgcctggctctctgcgtcggggtgggccctcgggcctgggcactgcgcgtctggcccgacgctcgggcggaaggcatggctcccaccccggccctcctccgcgtcgcccttcccctagagctgatctcccgcggcggcctgagggtcgacttttccacagcttgggccgagagagcccggcaggccctcggctgagggttagggctcggtatctcagggctcggggtccagtccccgcgccgccgccccccacgggctaagccactttaactctccgagcctcagtttccccatctgtacgatgaatgggcctcgggaggcagcgaattctgggggtacctaacgtgagaggcgctcgatgcatgctcatgggacccgaatctaaccctgcagcatcaggtgggctgagtcgatggatcacgggagccccccagcccggcctgcatccctgagggcagtgcccctcgcagtcaggtgtctcggcggcccccacaacacaggtacccggatctcctgggggagccgggacacccttagatcgggggagcaattgggtaagagttcaaggtctcttgggcgccagggggaggagagtagaggtttcagtgagcttgattgacttcgactttctgcgtattgtttttcaaaacgagttacccttgtgtaaactggtgaccactaataaggagtttggggctgtttcaatgaaagtggctgtctcctctcttaaacccttaaagctgcagccttgccttgccttgcctctgagcttggccaagctggagaatgatgccagcacaaaaggagacaggactggactgggtggccctggtttgattcttggcaagcaagatacctcctggagcctccgttttctgatcagtgggtctggtagtaagacagccaccctgctctccccacagggttgagattctgaggatcaagacagggtcccagagagtggcatcgagaactttaatcctccttgtaagcagaacgtttatggaaccctctgggggatccagtatccccaccgttgttcactgctgtaattccttgggtcttgctttatggagaaggcattgattcattaaccatttgcaagttctacctacggaaatcccttttgagtggttatggggttggcttggtcaggagaacagctccaaaggcccagttagtaaaccagggaacccagaaaggtccacttccttttttttgggaggagggctgttttaggagttcttattttccttttaagagagtggtttttgagctacttatgaccttcatgccatctaatgttggaaactttcgctgagcagatagcttattataaaaagtatttgtacaacatccgcatttcagagaatgggatgctagctgccagttgcgtggtggtgtggaaacttaggagtgatcttaattttccaaaattcttcaggtctagcacttgaagaaataataggtagatttgaaatgaaacaacccagggatattcctgaaaacagcagcattgaccgcagccaatgtaaatcaggtgtggatcgtcctgggtagtaggagtttataaatgccacagaggatgtttgctgccagacatacctgaattttaggacctgctgttggttaactctgggttgatccacccttaaccccttgaaaatcagaatctgtgttaggtaagtctgtgtatgattaggagacaggccaattgaaatcaaaactgcttggcaaatccagaacatttactcgtgaagtccatggaacatttcaagttaaaaataatttagcttttaagtaacttttttttttttgtgagacaggtctcactctgtcgtgcaggctggagtgcagtggcgcaatcatagctcactgcagcctcaacctccaggattcaagcaatcctccctcctcagcctcccaagtagttgggagtacaggcacgcaccaccacacccagctaattttttaaatgttttttagagatttggtttgccatgttgcccaggctggtctcgaattctggggttcaagtggtcctcctgctttgacctcctaaagtgctgagattacaggtgtgagccaccgttcctggctttcttatttcttcttcttttttttttttttttttctgatggaagctcttgaagttataggacctttcatggttccagagaggctggccgcccctacaagagcttcgatgtccttgtgctttagggaggagccagagaaacagaggtcaagctctggcactagcaccgtgtgtggcctcaattgagcatgttgggatttaactttctgttatatgtcagactcacttaaaaattaaagttagaaaaaggtgaaatggagaaatgacaattttcttttcttttcttttctttttttgagatggagtctcgctctgtcgcccaggctggagcgcagtgggctcagtgcagcctccacctcccccaggttcaagcaattttccttgcttgaattctgcctcagcctcctgagtagctggaatttcgagtacccaccacctggccaaagattctgtgctcattagcacacagcctcccaggtggctacagccttaaaagactttcaaatgccaattctaggctgggaacagtggctcacgcctgtaattccggcactttgggagaccaaggtgggtgaattgcttgagtccaggagtttgagaccagcctgggcaacacggcgaatccctgtctctataaaaaaaatacaaatacaaaaattgactgggcatggtggctcacgcctgtaatcccagcactttgggaggccgaggcaggcagatcacttgaggtcaggagttcgagaccagcctggccaacgtggtgaaaccccgtctctactaaaaatacaaaaattagccggtgtggtggtgtgcacctgtaatcccaactactcaggaggctgaggcagaagaatcacttgaacctgggaagcggaggttgcagtgagccgagatcgtgctgctgcactccagcctgggtgacagagtgagactctgtctcagaaaaaaaaacccaaaaaacaacaacttgttttgctgtgcagttttgtcatctggcattgggcagaaatttggacccgccgggcaggtgggagaagcatctgagtcagaggtcacttacctgcttgcataggccgctgacctataccaagccttagtttcttcatcactaaagtcagagaaagaacccactccacctgcctctgggacagctcagaacatgttaaccctttcagcagtgggtccttcttcatcttcttggcgctgtttggatccctgtagcgtgacacataaaaaagcacacatccggccttaggatatgtgtaggctctggtttgggcacttgagaactctcacagggagggaagcaagcatacaattcaacaagaatggcacggtgtgttgcattcattctcaagatgatggggtgaggcttttattagtgctgagcctgctgtttgtttccacagcagggctccaggggagaggtgatgtttgagttgggtcttggaggattgctaggagttctctgagcccacccaggcacaccagctctggggggcatgtagggtgtagattgcatgaggctgaggtcgcgtggtggcacttgtctgaaatggtcctaggaaccatgggaagagatggggaggtgttttaaaaggtcagggctatgtgactagctcagatcagtgttgtgtgttttttttttttttagacagagtctcactctgtcacccaggctggagtgcagtggtgtgatcttggctcactgcaacctctgtctcctgggttcaagcaattcttgtgcctcagcctcccgagtagctaggattacaggcaccggccaccatgtctggctcaggacagtgttttcttgtactgaatattctcttactgcctaatatcctctctgggtgaatgaacaaccatttgggaaatttttactgtgtctaaatttgtaatcatactgttttagagctctacatcttaaaagtttttcctccccaagcgagatgtttacatcagttgtgttcttgttgggattagtgtgcacacgcctgtctgcatctgtgcgtgcgtgtgtgtgtgtgtgtgtgtgtgtgtatgcatataagagggagagaagatggaggaattccatgggggcagaccatggttctttgcagattggtggctccagttggttgggttcactggagccacgttcatcagtttgtttctttctttccttttctctctctgtatgtttatttatttatttattatttgtagaagtggggtctggctatgttgcccaggctagtttcaaactcctggcctcaagtgagcctcctatctcagcctcccaaaacgctgggattacaggcatgagccaccgcgcccagcccagtaactgttactcctgacgctggtcggtgtggcaactcagttgatgcttggacgtgttgtgaacaaagccccggggaacctgatccttctggtggcttgtgcagcaaactgttgatgtgggaagcttatttatttcacttgttaaagaggtgacttggatagggggatatctaagaattgtcctttcattggagtgctggagggtgtggcattcggatctcctttgtgcagcatctgtacctagctgagagaattgtacacataatttcccgaaatgcgtcagtttcaaggctaacttagaatatgttggtggccagactgtggtgctgtcagctgtggactgttctccaagagttgaatttctttttttttttttttttttttttttttgagacagagtctgactctctcgcctaggctggagtgcagtggtgtgatcttggctcactgcaacctctgccttccaggttcaagcaattcttctgcctcagcctcccaagtagctgggattacaggcgcgtgccatcacgcccggctaatttttttttgtatttttagtagagatgaggtttcactgtgttggccaggctggtttcaaactcctgacctcaagtgatccacccgcctcagcctcccaaagtgctaggattaccaggcgtgagccaccatgtccagcttataagaattgaattctttaggagacatttggtaggagaatagaagggggaaagttgccttttgtctacttggatgtagtaatgaggaggaagatggggcattgtggggcgtgtcctctaacttggaacagatgtaatttatttctaggtgaaagttaagaacagtgcttactcattctatttatctgccctccttttatcttcggcactttttcctacagccctgtttctgagctcacgtcacatcacctctgcggtggtgatgccggtgttcttagagcactgtgtcctagtgatactttgatcttcgtgggcatgcatcatcagtgcattgggtaagccgggcctgtacaaaggtttgcaggtttggttaggaacacgtgaactacggtcacctttctgaactttctgaactcatatgtagtgaccataggtcacctgggttgagttttcaacactgcaaacagggatggcagttcttgaatacacaggagagtgcattagccagtggtgcccggcatcattcagagtgcagtttggcatcaggaatgttccgtcaggtatttgtggtcttgtggagaaaagccactgttggttttggtgaagggcttcagaccctttgactgctcatgaaaccacacagtcttaacatggacacgttggacgcgttccttacgtaacgtgatttgcaaactcaggagtcattcagcgtcacagcagtgatcaaaagctcccagcccatctacccgaaacctccacaacaagagctctatctgtcagtggcctcaccgacttcctgggccctgaagctccaaggacaaaagactcctgtcccttttcccttcctctccattctgggtctcccaccaccaccaagtcctgtaagtttttagtctttttttttttttttttttgagacagattcttgctctgttgttcagagtgcagtgacacaatctcagctcactgcaacctctgcctcccaggttcaagtgattctcctgcctcagcttcccgagtagctgggattataggtgcgcggcaccgcgcccagctaatttttgtatttttagtagagacagggtttcactgtgttggccaggctggtctcgaactcctgacctcaggcgatctgcctgcctcggcctcccaaagtgctgggattacagcaggcgtgagccaccacgcccggccctttaaatctctttccactgctgtggtcttactgtagccccttgtcacttcctgctgcgctgacccgtaattgacccataattctccctctcttcccctccctaccacgttccaagatctgtccatggtaccattgctggttgatcttggaaccctgcttcggtcacccctcctttctcttcgcccagactggagtgcagtggcacgatttggctcactgcaacctccacctgtcaggttcaagtgattctcctgcctcagcctcccgagtagctggcactacaggcacgtgcctccacacctagctaatttttgtatttctagtagagacagggtttcaccatgttggccaggccagtctcgaactcctggccttaagtggtccacccagctcagcctcccaaagtgctgggataataggcaggagccactgtgcccggtcactgtcactgtcttattgcatgttttcttcttcatctgctttcataaaggataaacagtgacttaataaaaggtgtctaattctcccctccctagtggcaatacggttggactagaaggtgaattcagttgagaacagggaacctatcatttctgcgagtgtaagctggggcatagaacaatgccaggcataaggtaggcacttggatgaatggatgaatgaataaatatggcttctgtcccccaagtttactgctgagctttctcctgcatattgactgagctcagatgtcaaaattgggtctgatctgtagttttttttttttttttttttgagacagagcctgtcactctgtcgcccaggctggagtgcagtggcgcaatcttggctcactgcaacctctgcctcctgggttcaagcaattctcgtgcctcaacctcctgagtagctggaattataggtgtgtgccatcatgcctggctaattttttgtaattttagtacagatggggtttcaccatgttgcccagctggtctcgaatgcctgacctgaagcagtctgcccgcctcggccttccgaagtgctgggattacaggcgtgagccactgcgcctggcctggtctgtacttctgaagattattccaaagtacagtaggaacttttggtaggactttagttttccatccaggtataaaattttgtgtcagtggtggggttgcgcatgttcagtagctgcaacactagaaagatggcaaagcaggagcaaagaaaaatccctttggctccagaaaatctcctgaaagcagaaggcttatcaaggcctcaaagccacccagtcaaagtaggcacttttggcaaaggaggagcagagggaaggaaaagagctcaggtttaaacgactggaatcattcctacatgattcctggcggcagaaacatgacaaggtgtgtctcagacgactagaagtaaaacctcacaccttggaatcgccagataaacattccttggcctttgttgtacgcgtcgaaaggattgatggtgtgagtttactggtgcggagagccattgcaagacttaaacctaaaaatgcagcgtatagtatgtaaccttatgtgacctggggatttccaaatctgaagtctgtccagaaactcattttgaaacgtagacaagccaaggtcaagaataagaccatccctctgacaacacagtgattgaggagcacctgggaaagcttggtgtcttttgcttggaagacctcattcatgaaattgccttcccaaggaagcatttccaggagatctcatggttcttgtcccctttccacctctcagtggactgtcatgctaccaaaaatagtggactttctgaaggagattggcacacctccatcttcttgggggtgtgtgcatcaatcagctcatccgccagctgaactagagccaggtgccaaactacagtaaatttttatcaatgaactggaagcttgtgttatttttgggggcggggtggaatttttatcaagtatcttcagagaagattatttcctgctttatcttcaaaaactgtaaaggaagggtcaaaggaaagacagtggctggccgggcccggtggctcacgcc

SEQ ID NO: 48958 - DNA, 2576 bp, Homo sapiens
tgaggcaggaggatcacttgtggccaggagtttgagaccagcctgggcaagagagagagagagagaccctgtcccttcaacaagaaaatacacatttaaaatattagccaggcatggtggtgtgcacctgtagtcccagctactcaagaggctgaagcaggacgatcgcttgagcctgagagttcaaggctgtagtaagctatgattgcaccacgacactgcagcctgggtgatggagcaagaccccatctcttaaattttttttaaaaagtgcttttccctgggcctttacacgaggatcattgaataaagcagtggtcagcagcccatgtactcagcaagtatttgtagagcaccacgtatgtgccaagctctcttcgaggtgctgggactacttttgtgtgtggaaaagaccaacaagatgaaagatgatgttggcctaggccagggtggaggcactgttttcaagaacaggagtgttcccacaggtgaccctttctgggtcccatctaggtaagaggctgagaggttcaggctcggttgtaaattctgtaagggcagttctttgggaggtgtgagcaagagaatggaatcagagcgattattttagcaggcaggagtgaagcttgagaatctggcagagtgaggagcgatcttgtgccagagtgagaggcagccagtccaaagtgaaggttctgaagctcttagtacctcccacgtacagtgtcctgcttttttttctttctcttttctctctctttttttttttttttttttttaaggcaggacacttgctctgtcacccaggatcattgctcactgcagtctcaaactccttaagcccttccaagtagctgggactacaggcacacaccaccatgcttggcgagtttttctttctttttgcagagatggggtcttgctatgttgcccaggccgatctcaaactcctgggctcaaacgatcctcctgttgacctcccaaagtgctggaattacaggcatgagccactgtacctggacccctgctatttttcctgtgatatttgaaaagcttggcttggtttcttgccctttagtaggtgattgcaggcagagccacgaggtcttagaaagcagcacggctctgttccgatactcctggctgaagggccagtgtgctgtgccattgagggagaagcattgactctggtctgggagattctgttcatttagtcattcagcaaacaaatattgagtgctggccaggtgtggtggctcacacctgtaatcccagcactttgggaggccgaggcgggcagatcacctgaggtcgcgagttcgagaccggcctgaccaacatggagaaacctgtctctactaaaaatacaaaattagccgggcgtggtggtgcatgcctgtaatcccagctacttgggaggctgaggcaggagaatcgcttgaacccggggggcagaggttgcagtgagctgaggttgcgccattgcattccatccagcctgggcaacaagagcgaaactctgtctcaaaaaaacaaaaacaaatattgagcactcatgttatgcaaagtctgatgagcaccagggttacagaggtgcaggatagctccacccagacacgagaccaatcctgtgtccttctgcagggattatttcatcttgggtaatgctgtcatctgatgatgtggccaggatgtcagctgcaaaatgaaccccaggtcattcagtgaggctgcgtctacctgtaactttgccatgtcctaaaaaggtcttgaagggcagacagatggttgatagaatagctctggagacagttggtctgggtttgaatcctggttccaccatttatcgattccctgatgttggacaaggtcctttaacctttgtgataattacagctcctgtatgtcagagcagtgttaaaacactgttcattagttaaaaacaaatcagggccgggcttggtggctcacacctgtaatcccagcactttgggagattgaggtgggctaatggcttgagcccaggagtttgagaccaacctgggcaacatggcgaaaccccgtatcttaacaaaaaattaatggggcttggtggtgggtgcctgtagtcccagcaacgcaggaggctgggctgtcatcacgccactgtacagcagcctggctgacagagtgagaccctgtctcaaaaaaaaaacaacaacaaaaaaaaccccaaaaaacaaaaaccaggtcaggagtggggagtgactgctgatgagtgtgggatttccttttgagggtatgaagatgctctggaatctggtagtggtgatgcttgcacaatgggtgaatatagtgaaaaccactgaattttatactttaaaatgatgaattttatggtgtgtgaattctgtctcaattttttttttttttttttgagactgactctcgctctgtggtccaggctggagtgcagtggcccaatctcagcccactgcaacctctgcctcccgggttccagtgattctcttgcctcagcctcctgagtagctgggattacaggtgcccaccaccacacccagctaatttttgtattt

SEQ ID NO: 48959 - DNA, 2089 bp, Homo sapiens
aaaaaaaaaaaaaaaaaaaaaaagaaggccgtgtttggtggctcacgtctgtaatcccagcactttggaaggctgagggggtggatcacctgaggtcaggagtttgagaccagcctggccagcatggcgaaaccccatctctactaaaaatacaaaaattagccaggcgtggtggcaggcacctgtaatcccagctactcgggaggctgaggcaggagaatcgcttgaacctgggaggcagaggttgcagtgagccgagatcgtgccattgcactccagcctgggcgacaagagcaaaactccatctaaaaaaaaaaacaattgaggcaaaagtggggatggtcaggaggatgaaccagcgtgaactcctgtggagagttttgtgcctgtaaatcaccttgtgccaccttttaatgttgacgctggattatatccatgcaatgccctggagcttaggggagctgtggtctcgtccccttggcattcaagccaaggagccaaggccgcagagatgctgctagaagcaggcacggggagctgcagctgcagcatcagcccctgtgggcctggtcagttcgatttgtgctgagtcatgcccactgttcgcctgctgtccctcctgtccccccagtcacgcttgcacagatctgactcagcagctgccttcctcctttcacgtcattgcatcgggcacatgctggtcatgtgtttctaaattaagtcctgttgtgtggggaaaaggccatcagctgggagcgtttggccatggccatcttcagtggagaatgttctccaggataccttggtgaaagccccgtgactgcattgatattaggggtgcaggcatcgttgtacagtagtaccttcctgtagcagcattctgatcacagcacccccttgccctgtcctcaccagcttccccagggccaaacaccttagactggcatacaggcccctaggcccttacgcactcatctgggtgtctcttaaaagtttatctcggccgagtgtggtggctcttacctgttatcccagcactttgggaggccaagatgggaggattgcttgagcctaggagtttgagaccagcctgggcaacttagtgagaccccatctctacaaaaaaatttaaaaaatcagctggtatggtggtgcatgcctatggtctcagctatgcaggaggctgagggaggaggattgcttgagcccaggagttagaggctgcagtgagctgtgatcacaccactgcactgcagccttggtgactccagcctgttccgtgaatgaatgaatgcttatctcttattcgccatctatgcatccccacataaaaacacatcccattgcaccacacttgagttaccccagaccccgagtttctcgtgttctaggctctggtacacgcttcctctatcggtagcttcgctcatccccctaatctgactggtggaccctgatcattcttcacaatccagcccagatgttggcctctgggagccccttccttgactgtttcagactgtcatgcctgctttttccttccagctctatttcccctgcacctggcctccccatgcagccgtgactgttgggataggtctgccctttctcatagcaggaggacaccttggggcaaggttggcatgtctgctcctgcctgaacccacacagttcctggagtgcagcaggtgctcctcagctgtttgctgcacgcatggacgtaagagtgacagaagcatgtccttcgacatgacgtttttgtacctgaacattgtctagaggctttccagactgtaagctctgtgggattaggagcctgcctgcctcgcactccctggcatccttagtgctttgggcctcacaggccagcggagccctcgtgcgggttccaggcctgctttggtgggagtgctcagtacttttagccacacagagccgtggcctgcaaggctttcggagtacatctctagcacatctgagaatccggaagcaactcagagtttctggaatggatttcacaaagtctgtgaataagaaggccccacaggccctactcaacagcttttttttttttttttttttttaaata

SEQ ID NO: 48960 - DNA, 3217 bp, Homo sapiens
actaagagggcagtacttttcagttattcttgttcagaaaagatttaatattcactctgagctcaaaatagtcacaccagactttaccactgctaagctgctgaactgctgtatggtaggccagttaggatattcagcttctatttttgacaaaaatccttaagaccaacttaggttaagtccatgagagcagatactgttgacattcccttgttcgatcacatataatagattcaaattttttgcataatatctgctggtgaataatatagtgaacaaccataggctccaactaagcctttttctgccccccacattcattataacacatcttagtggattccatttcagattgtactaaacttttctcaacttctttgaaaatgctcttatttgtagttgtttcatgctaattcttcaaacttggtattgactccccaagtaaacaacaactgaaaagtattggtaacgtctttagattcatcaagagccaaggaattgcattcttaaaccctcttggtggcttccctgtaaatgcttccaagatatgagcgaatgctatagaaattgcaggaaagtccaaagggctgcgcgtctcctgtggctcagtcttatttcatacctgcaacatcttttaagggaaatttgcaaaagggagaattatcaacttaaaaaaaaaatagccaaggaaacctcgactcttcaaggaagcaaggaaacgtgctctccttgggagtgacattagaggaggcccagtgtgagtcaggacttcatcaccacctggcggaaccagggagccccaccccatgtgtcagtggagatcatgtgctgtcttccctctccaagctagggtttgtcagcagaggcccaggagggagactgaatctcgcctgacagcaatgaactgataccttccttccctataagcaggtgacagacaatatttaataaaatcaaaaaaggctgggtgcaatggcttacacctgtaatcccaacactttgggaggccaaggtgggtggatcacttgaggccaggagtttgagaccagccccagcaacatggtgagaccctgtctttactaaaaatacaaaaaaataaattagccaggcgtggtggcacacgcctgtaatcacagctactctggtggctgaggcatgagaatcagttgaacctgggaggcagagattgcagtgcactgagatcacacaattgcactccagcctgggcaatagagacagactctgtctcaaaaataaaataggcttaaataagattcaggatcttaaagtacccagaatgcccagaatacaataaaaatcaatcactataccaagaaccacaaaactctcaacttgaatgagaaaagagagtcaacagacaccagcatcaggatgacacagatgttggaattaagatatagagaagaatgaaacagatgtcttagaaccgaaatatacaatagtcaaaataggaaactgaatggatgactccacagcaaaatggaggagacagaagagagaatccatgaacttgaagttagagcagtagaaatcacctaacctaaacaacagaaaatagactgaaaaccaaaacaaaacaaatgaacagagcctcaggattttgtgggactaataacaaaagatctgactttcatgtcacccaagtcccaggagaagaagagaaagagagtgaggctgaaaagttatttaaaaaataatggcggccgggcacggtggctcactcctataatcccagcactttgggagacagaggtgggcagaatctcaggagttcattaccagactgggcaatgtggcaaaaccctgtctctactaaaaatacaaaaattagccaggtgtggtgaggcacacctgtagtcccacctactcaggaggcctgaggcaggaggatcccttgagcccggaggatccctcaagcccagaaagttgaggcttcagtgaacagtgattgcaccactatgcctccagcctgggtgatagagcaagaccttgtctcctaaaacaaaaaagaaaagaaaagaaaagttgctatattttgcaaaagacataaatctacagattcaagaaactgagtgaaccccacagaaggtaaacacaaagaaatctgcaccaacatctcagtacagataataaacttcctgggtactctggctattgtggctgtggagcgatctgtctgagtcactcttggacactgctttttaacaggtcaccttggagagtgtagtgttccccgagtacctctcagtccctgtgggttgcgctgtcaggcaacagtagggtatggttccatgagggttttccctcatcttgaagccactaaaccttggcagaggggcttgtgaacctgaatgaccccgctccccctgcagccagaaggtgcagcccctggtgccagagccttgtctaggtggccctgacatgacagtgacagctaaagggttgactaaattacaagttttattctttcctttcttgttactgctttgattggggtgtctgactcaccccaatatcagtgctgagttggttgctcaatcttttttacggaccagaagttgcaaacagtaaatgcaaaactgcaaatacttcctggaagataacctgttccagtgttgcaaatggttggcctcagagagcccttgtgttcttgcgtcattctccctttcagaagctggtgaggctcctgccagtgccccccagcctgtgtgctccctgatttatttgtccatcttgctcagtggtgtgtgggagggactggagctgttgcccttgattgctaccttggtgggaaccagccagctaccgaaattgacagggaatcgtggtcaagctatacatgcatagtttttacccttctctgtatgttgtattttataataatgaaaacatgtagagacctaatttataataaaagtcaggtctgctctatttagagttggggagatctagttggctggtattctgacatgtgcctttttctgtgcctaattttttcttgagacaggacctcactctgttgcctagactacagtgtagtggtgtgattatggctcaccgcaacctcaacctcctgggctcaggtgatcctcctacctcggcctgccacatagctgggactacaggtgcgcaccgtcacacctggctaacttttgtattttgtggtagaagtggggttttgccatgttacccaggt

SEQ ID NO: 48961 - DNA, 558 bp, Homo sapiens
atgaactcaagccattggaaaagcagctcagattagtgagaaagcaaagacccaagcttgcgggcctgttctgaatggcctgttcccagcaggttgtgtagcagtagaccgatgcccacaaccctcggatgccctggcttcccagaccagccccatggtttcctggtgacagtgacagccatcagcagtcagctagaacatagtctctcattgcctaattgctgacacatgactaaggctttcctgattgagtctgggtgctctggttgtggtgaaaaacccagtcggtcatatccatgattgcaaaatggaatagtgtgaatttcagggctgagcccagcctccttggtaagcagcagaagctgctgtttcagggactctcacttggacctttgttgactcatgtcacgtctgcctaccaggtgtcgttggtggaaggaccagttgagcatcttatgagggaactaggctggtgacatgggggttcccccacctccctcccggacggggcggctggccgggcggggggctgacccccccacctccctcccggacggg

SEQ ID NO: 48962 - DNA, 1106 bp, Homo sapiens
tacagccttcacaccgtaaagcagatattcacacaacacagttcttataccatggacagggaattagttttacatttttaaaaactgggttcagggccaggcacagcggctcacgtctgtaattccaccactttgggaggccgaggcgggagaaatcacttgaggtcaggagttcgagaccagcctggccaacatggcgaaaccccgtctctaccgaaaatacaaaaactagctgggcgtggtggtgcatgcctgtaatttcagctactagggaagctgaggcagaagaatcgcttgaacccaggaggcagaggttgcagtgagccaagaatgcgccactgcattccagcctgggagacagagtccgtctcaaaaacaaaacaaaacaaaacaaaactgggttcaatcttatctccatcattgactcactgagcaaacatttcctgaggccctacctacagtgtcccagacactatgctaaggtgtgtggctgcagcagtgaagaaaatagatgaatgctgtcttcatcaagcttacgctctagtggtgagtgaaccctgggcgagaccttaacctcattctgcctcagtttcctcacctgctaaatggaggcagtattcccaatcttgtggggcttttgtcttaaatgaggaagagtctataaactcacctagcactgcccctgagggataggagctgtgtagtgtttgcgttgatcgtatttcgtgccaggcactatgacgggcacgatcaggaccacagagccagcatttatgttaagctggaaaatgagggtgttgcaacatagtttttttttttttgagacagacttttgctcttgtcactcaggctggagtgcagtggtgcaatctcggctcactgcaacctccgcctcccgggttcaggcgattctcgtgcctcagtctcccgagtgcctgggactacaggcacatgctaccacgcctggctaatttttgtatttttagtagagacggggtttcaccatgttggccaggctggtctcaaactcccgacctcaggtgagctgcctgcctctgcctcccatagtgctgggattataggcgtgagccaccacacccggccac

SEQ ID NO: 48963 - DNA, 1506 bp, Homo sapiens
ctcctgggctcaagcagtctgcctgcctcggcctcccaaagtgctgggattacaggcgtgagccaccatgcctggagtgtgttattatttttatcctttttattaataccatctccagtcttacaagagcccttccacgaagacatgagcagcccattttgcggatgaagaaaccgaggtgccagggattgcagagtttgcccaaggccacctaacttctaaatagcagcagagttggcttttgaatgaagtctgcaagctccacaagccatgttttctctactttgccatgctgctcctaatttagtgttaataggcctcctacgatagtgttagtctcctaagatagtgttaataggcctggcatggtggctcacgcctgtaatcccagtgcttagggaggctgaggcacaaagattgcttgagccaggagttcaagaccagcctgagcaacatagggagacccccacccccccgccatctctacaataaacaaaaaagagtggtgttaatttgttaatttaccgacaaggagagtattccttatctgaagtgcttgccagaagtgtttcagatcttggactttggaatgtttgcattatactcaccagatgagcatttcttatctgaaaatctgaaatgctccaatgattcttccctttgaggatcatgttgacgctcaaaaagtttcagatttcagattttagattagggacattcagcctgtagatgttattttacagagcaggaagttgggtgtagtggttcacacttgtgatcccagctctttgggaggccaaggcaggaggattgcttaagcccaggagttggagaccagcctgggcaacgtagcaaggccctgtctctataaaaaataggagaaaactgaggctcagaaaggtcacctagctgatacaaccaggcctcaagcctagatctcctattctaaatcccacatcagtgtccctggctaccggtatttcagtgagcacaggtgatttctgttatagccacagagcagtagggagtaatagggcttagtgtgaggaaggtatgtggcccagggctatatcaggaactctcaccatgatttctggtggcttctagaattggcatttatttattttgttttagagacacggtctcgccctgtcacccaggctggagtgctatggcgcgatatcagttcactgcaacctctgcctctggggctcaagcgattctcttgcttcagcctcccaagttgctgggattacaggcacccaccatgatgcccggctaatttttgtatttttagtagagatggagtttcaccacgttggccaggctggtcttaaactcctgaccccaagtgatccatccgcctgggcgtcccaaaatactgggattacaggtgtgagccactgtacggggccaaacacatttttaaaacaaaaaacccagtgggatttttgttggaattggattgaatctgtatattaatatgggaagagttgacatcctaca

SEQ ID NO: 48964 - DNA, 1484 bp, Homo sapiens
gtgccaggcatcgtttccccaggactggccctcccctgagtgccggctgccctcctggcggccgccacatctcccaaaccaaacccaccctccccagctgctccactcccctctccttcgaggtcttggtgacgggcactaccccacagccctctccaggctgcatttgcagttgatgaacagtttagttagatatcagtgtgcaccggggctgtgcggtgcctgggagctttggaatgaggttcccagggtggccccagacctgcatcagctcaggaggctgcattctgatggctcttttgtgccaagcttcactttcctctagaaacacatcctctccgctccagcctaacacgggtgaccttgtcctgcccacctggcacaaatgcccatgccccagcccctccgtgttgttacttctctctgatcccacgacactcagacatccctggcctggtgccaccctgggcaggacctggccttccccatctggtgcgggttgaaccttgaacaggctcagtcatggccggggcgcggtcctgtccctgtttctgcaggccgacctgagcagcctgccagagatcgacaacgccctggtggttttctgcatggccacctacggtgagggagaccccaccgacaatgcccaggacttctacgactggctgcaggagacagacgtggatctctctggggtcaagttcgcggtgagtcacccagagactgctatgggctcccggtggcctgcggtgcctccctggggactccagatccatgtatctgaaaggcagccctccagacccccaccctgtcctcagcagccagggcaggccacttgtgagaccctctcctctgccccagaccccagcactacgagaatgtcccctccctgtccccagccccagtcggctccagggggcattgggtgctggagactaaaggcaagaaaggtctggctggacgactgagacctgcctggcctcggagagctggagccccagcccggtggggagggtgggctggccccgcttccctgtgggttgaggctggcagtggacggggcaggctgtgggctgcaggtcaaccagatgaagcctcttcagtggcccagtgttccttgcagtgcgaggcgcctggtggaacggaggcctgcaggtgttgccagcagctcagccagtgctgtggggcctcccgccctgcccccatggcccctcccactggtcaggtcgagggccaggcctcagagcggcccctgtgtccacgcaggtgtttggtcttgggaacaagacctacgagcacttcaatgccatgggcaagtacgtggacaagcggctggagcagctcggcgcccagcgcatctttgagctggggttgggcgacgacgatgggaagtgagtgcccaccctgccaccatgatcagcgcggcgggcttaggcaggggccgtggaacgtgaggggcgcgcacaccattgtgtcagctgaga

SEQ ID NO: 48965 - DNA, 1306 bp, Homo sapiens
ggtggaggggtggaggttgagggggggaggggggtagggggctaggggtggaggggtggaggttggggggtggaggctcggcctgattacttagcctgcttgctcaggagcgtgacgttgacgttccccagaaccaggctcaggtacaatctagggaagggggtggcggggtgaggagaagcccgagtgacagacaagccaccggtactcagccaagcctgccaggccagagcctgggccaccaccccaccccctcacccgctgctttccgcagggccttggcatcgggttctgaccttggaggctgcagacccactccctgccatgcccagccttcctggccgcctgctccggaatcctgacccccggaggaaacagtgttcccccccatctccagagtcttgtctgaaactcccccacctcagggcaccaagagaacccggctctccctccctgctgagggccgtccccctgtccccgattgctcccctgtgcgatggccaccacctaccccccagctccctgccacctcccctccagaacctgcagtactaggttccacttcagagacccacacgcctggccacatctaggacgacctcccaaaccagaacagaaactcagagctctgactgtgggctgaccccaagtactcagcctcccggggcgtttcttcccaccacgaccccccttgtccctcaccgaggcccccacgctctccagtcccagatctcatcagagctggctgagtccccaggccacccgccaattacaccacttttttgccaatccccttcatgtccagcctccacacccaccaactgagatcatcttgcccttctctgccagagatactccaagaggtgacagcaaagtcacggtcactttctcagcacctgccccagacacatgggctcttgttcacactcaagccaaacagacagaggctcagcatggttaggcaatttgccccaaggccacaaagaacttctgggacagccatgcttctccctctacagaatgctcccggcacagtgctccccaagcaggccagcttcagcctccactgccaacccaccaggctgcggatgtgtccccactcagctcgccatctggttcccagcactcgcctctccacatcctctccccgaaaccctctaccctgtctcctcccacctcgggccccacctgcaacactgcagagaagacagcctgactcctgctctatggggagcactatgccaggagcactgtgccgggagcactcctcactctcatctctgcaccctccatcccccactagccc

SEQ ID NO: 48966 - DNA, 376 bp, Homo sapiens
ccaggaagcgcatccccttccttatcacaggactgaccccaggctacggacactcctttcttctccctgccttctgggccacgccctctcccagctatctccctgcctgcagcctctgctgggattttttgctcagcagggggttttgcactgccccatccgtcctcctgggtgacagctgctggcctttccaggtgcacattccaccgcccccgcccgcctactgggctcaaggcaagagctgcagcccagcaaagcctctgatctcttggctgcctctcacctcccgccccgacctctggccactacaagttctcatggcccgtccacctgctgctacctctcgccctcagcccatgtgtctgcctcatttttt

SEQ ID NO: 48967 - DNA, 2465 bp, Homo sapiens
accctacaaggacagactctttctcctaccttgagtctggagcttaggcccccagggccacctcctggaccaagcaggcagcccagagccacccctctatcctctcagctcctcctgcctatctagccttccagtacaggaggagctcaggttctcaggaatccctgacatcttcttcccaggttaaaggtcatcaggtttcaaccctagagcctcctgctctaaggccagccccactcccttcccctagcacctttggcccaaggattccccaagcactttgccctggtaggtgagtctcaagaaggcgcagcctagagatggggcaaggggcagtgtgaggagagccaagcaggggctgtggccaggacagcggcggccaggcggggagactgggtctgctcagtctctggggagaagcaccaatggcaggggccttggcagggccaggggcagctgggtttcaatgcccacaggaagcagttggaaccagtccaggagaggccaagggctaaccaagccatcagctggccagggctctactctgtctggatcttgtttctcatgcccaggaggggtcaccacgccccctcggaccccagcacgtgccacttctgcccacccacagccaccgccctcttccctgcctggatgaggccaacagcctcctcctccctggcctctggacagaacagccacggtggccctggggagctcagtccagacaattcctcccgtagctttccactggcctcggagggactctgatctctgccaggccagagcgtccctgcagggcctagccccgcccacccctcccacccgtcccacccctcccctggttctccttgatgcagccacatgggcctgtcaagtcccctctttccttccaaaggcctcggcggcgcgcggtatccctctgcctggggcgtcccccatccaggccgaggacacccccctaaacgctgctcccccgacctgggctgcctctcgggcgctgcccgctgcgcgtttgctgagtggctgacccaaggctgggcccgcccgtgtgtgactcaggcggccgctctcttctgggaagggacggggtcggggtctgggcccctttccaaggccctcattggaagccgaggtcgcccagcgcgatggggtcccgccggggttcccggacactggaggtggtggcagtggacaccaggaccaggggcctcgccccccttggcagtgacgccagggccccgacccctgacccttagctccccactgcctgacccagggctgcccgacccttgaccctgagccagcgagacgcggctcgggggcgacccggcgtccgcagcggcgctaacctggatgttctggaagtcctgctgtagatcctcccagtcccgcaggcagtcgcccagcgggcccgggggcgggggctgcatggctgcagcgccagtagccagtagtggaggacggcgcagcaaccccggcccacccgaggctcctccgccaccgcccccgtccgcttccgggctcgcgccgccacgggcaccaatggggaaaggccacgccccccaccccagccaatccgggacaggggcggggtatgggcggggccgtatgcaagggcggttgctagccccgggactcgcggcctggaccgggactgggacggctgcagcccccgggcctggactgcactgactgtgccagccgcgtggtgcagccagcagggctctggcccgtcatgctgagagcaaaccaaggtgcagggaggtgacacctgcttgcaacattttcgtccttgggaagctgagcctctttggggaagggagttagagctgcttctctcgcttggatttttacagcggcctcctttctccctgcctcacctccactgtcccttctcgcggccaccggactgcccttcccaaaacacaaggctgattccccatcatgttcatgcttaaaactttccagcggctgtgtcctgcctaccaggaggtccctaatcggagctctgcagccatcccgggctctgtcccaactcacaccctgaggaaagccagggctgtgtgtaaagccgttccccctctggcaaaaccccactcctccttgaaggcctgcccttctgttgaggggaatcccccaccccctcccacccccatccctccacagagcgcgctaagtggtgggacggcattcatctctctgttcccagccccacccacgcggtggcagggaatggttgccgaatggacttggggaaggtcctgcatggatggacatcctaatcccctaccagtcccctagtctgtgccgtctcctgatgcccagtttgttctgtgggtgctgccagctttggagaagtgcatttggaaaacaacttccaactgggtgccgtggcccacacctgtaatcccagcattttggggaggccgaggctggaggatcacttgagcccagaagttcgagac

SEQ ID NO: 48968 - DNA, 777 bp, Homo sapiens
atctgtccgcctcggcctcccaaagtgctgggattacaggcataagccaccatgcccagcccaaagacacttactgtcaagacagcagggtgctagcacaggctttgtccctgcacacagtacacccaccagggggaaggtctgtcaccttccatatgaccacctagtctggccttcaaaccaggggttcgtgggtggctctctccccaagtcagcccagcatggtccagaagctgttgggctgggaagctcccctctagtgacagcacgtgtctatatttggggaaaacagccaactgggaagggatgtttcattagaggttgccagagcctgtgactaagcagggacccagccagatccagctcatctccctgcctccctgtgtctgctcaacacccaggggacttccatcctgactgacggtggaggtgtcagaggctgggcctgaccacaggcttcttgtaggagttcgaggatactgcaggcttgacccagcgctcaactgccaagccaccctaacccccaagacagtccaggtggacacaattgatgggcatttgcttctggtgaagagacaacacttgatgatcctggagaagccagaccatgagcttcactttgagactctggctcaagctgaccagcccaggtaagggtcagggtccacagccaatccccaccgctgttctggttcgcggtgggaagctcaggctgtgccagcatgaccaaggcttaaacatagtgacaggcatcaatgccctcacctgtaagctgag

SEQ ID NO: 48969 - DNA, 2440 bp, Homo sapiens
gcctgtaatctcagcactttgggaggccgaggcgggtggatcacgaggtcaggagttcgagaccagcctgaccaacgtggtgaaaccccgtctctactaaaaaaaaaatacaaaaaattagccaggtgtagtggtgcgctaatcccagctactcaggagaatgaggcaggagaaccacttgaacctgacaggcagaggttgcagtgagccaagatcgcgccactgcactccagcctgggctagagagactccgtctcaaaaaaataaataaattcatacatttaagtaataaactcattgtgagcaaggaattctactcgactttctgtctgcgtaaactctacaaatccacttggcctcagccacagtgtctttattcgtaaagcagaaacagtgggaccgtcagagcactgccgggcaggcgagagaagacaggaactgtatgaccacggaagttgttgtccctacaacctatttgctcatctggaacacagaatagtggtcctctaaagcttgcagggctggaggtcgccattatcagcagtggtgtcactaaacctgaacccaagggtctctgcaacttgggaaacgacggcccggatctgaggagatggccccttcctcccaccccgcctaaggactctcagcctccctgaccctacctttccggagctcagagtcccctctggcctccaagggcagaaggaatgggtttggctgaggtcgggggctcgggtctgggacgcgctccacctccccggctgcgcgactatggccaggctccctgtcggagcctctgcctggggccccacctggaaaaatggctcctctaaggcgcttccagcctaaagcccgtcctcttccacctcttgggtgcagactggccctcccactccgaccgcaggtcccccaccggccacacagacggctacgctagaacccagccaaacaccggggttgccaggatggtcccacagctttcctttccgactcccggaagtggccgtgatctcacgagatcccggaggcgagcgcgaccggaagtccggtcactctcgcgaggccccagagagcaggcgctgggcagtgtggaggtcgttggagtcacttccccgtcaccagctcctgtgcctgccagtcggtgcccctcccgctccagccatgctctccgccctcgcccggcctgccagcgctgctctccgccgcagcttcagcacctcggcccaggtaggccagacgaggggcggcctgcaggcggaggccccccggcccgggccacgtgcgtccccggttcgcgggcagctctgaccctctccaggccagcctggaccgcagggatgcccggcactggctggagactgtggcgcccggggcaggccctgacactggcctggaggtgcgggggagaaagccggggaaaagggggcgaggtagtcccgctccagggccggtccatttgtcagggttcccccaggtctcccagatttcccagaggacctgctcttggcttgcacgccttcaaggttgggaaaccagggctctgcatctgaaagtaaacttacgtttttttctgcagcgttccattgctttgacgtagctaatctccttgcagcatccgtgtgagttgtgcgtgaataaaagaaatcgtatacttcctaattccatagtatggacaaaccgaggctagagaactgggccagggttacagtcatttggccagaggattagaattcagcgcttctgacctgaagacggcttcctcttaacctttttggaggatctctcctgctgtgggcggactgagcctgccgccaggtgtcttaacagtgcttgacttggcccgcgaccacttaagcctaggagcctaggctatttttagccatcttctagaatggtggttcttaaactctgcagtgtgtcagaatcaccagaaagctaataaaaaacagacgtctgggttcattgaagaagcttaagactgcgggggggggggggggggtccgcatttttaccaggtgaatctaattaaacctaattttgagaacccaggaggtgctcgcattgccttttaattacgacgcccaagagggaggtaattttaaaggggaatccaaatttatcatcgaagttctcgagtttcctgtacatccagttcatttgaaaaataaatacaaatgctcctggattgatggctacttcccatacccatcgcaagttggtaatatcctaagtcaaaaggcgagtttaactttgtgtattttcaacttgcaatgggttcccacaggcaaccccattgtaagttgaatgtaccaaatgcttttgcgctgcggtgaagtgggggcccagctgtatacagataagtacattaagtacctgtgcttgccaacaactatgctgggtgctgcaggggataccaagataagtgagaagtgacacttga

SEQ ID NO: 48970 - DNA, 1359 bp, Homo sapiens
gagaatcacatgaagccgggaggtggaggttgcagtgagccaagatcacaccactgcactccagcctgggtgacagagcaagactccctctcaaaaaaaaaaaaaaggagttttcatcaggattgtggtgatggggaatgagcagctcctctcattctaactggaggccaagtgtgacttacaatgctcacgagtaggatgaagacaagcagtggctcagttcgcttttgtggaaacctggagggctgacccattctagctggggcctgggcaaggagaggctggggaaagcagggtagaaggggagggttcctgccacgggaattgtcagctcgcagggcagtagtcgtcaacagaaggaagtcacgttacaggcagggcttctagcctttctcgaggccattagttggccttaaggccagggctgaactttccaggcctctctgaatcagaaacggtgacatttctcttgtggggtgtttgttctaggctacctcggacctgaacagctgcctgactgcctgaaaggttgtgatgtggtagttattccggctggagtccccagaaagccaggtttgtgtttgaaagccttgtctggtacctccccacgtgaagatgtggggattaaatccatttcctattaaaaatggatttaatctggttgctttgttgtaggaaaaatgtcaccagctcccctttcctgtggggtaaaggtcacatctctttgttggcctgggatcaaagtcgtcttgccgttcccctgtgcctctgtgcacggacgcccttccctcttctcagtcccactctaccttgggggttcttaataaacctcgacggtccttctcagatgttgtcctcccctgctccacccatgcagacctcgcttctggcactcatcatgctggatcatttaccctgcaagagggactgacttgaaacggggaccttgagtggctaaatttcctgtaacagctggcgctcagcacatgctgcctgtctggaaatttgtggtgttctctgttaacatctcatattggatcatttccaggcatgacccgggacgacctgttcaacaccaatgccacgattgtggccaccctgaccgctgcctgtgcccagcactgcccggaagccatgatctgcgtcattgccaatccggtgagtgtggcagcacccggctcttgcagctatggcaggtgtttaggtgctgacagtgcgtgaaaagctcacggtttgcagcaaaggctgctgatgtgctggggggatggggggatacacagatgaaggggctgaaatggagaggtcgggtgcactaagcagaggcccgtccgtgcacttcctaaggactccttccagcat

SEQ ID NO: 48971 - DNA, 373 bp, Homo sapiens
agattctttcagatgatgatgaaggggcctggagatactggccgtccctgggctattcaccctctagctcctgccttccagggctaaagacgagtcaggtactgagaatccacaagacaaacacagaggaagtaccgtgggactccagaggagggcaaggttacttcatgtcttggcagagcatcaaggaggacttcccctatcaagatctctaggaggagggaaaaggaggaggaggagatggcatacgctctggctctgcaggctgggcaggatttcaaccagcagggagggtgggatgggcgtcataggcagctgccggagcagacaggctgaagagcttgtggatggcaggaacagggcgtcccaggag

SEQ ID NO: 48972 - DNA, 1773 bp, Homo sapiens
aggcgaaagggttgcttgaggccaggagtttgagaccagcctgggaaacagcgagactcagtttccacaaaaacttttttaaaaattagctgggtgtggtggtgtgtgcctctggtcccagctgcttgggaggctgaggcaggaggatcgcttgagcccaggagttcaaggctgcagtgagtcatgatcgtgccactgcacgcaggcctgggtggcagagtgagactctgtctccacaataaataagtaaacatcgtatgatccgtaccagggtacaggcaggtgttatccccacttttcatcctcaactctgagttgagtcatacatcaactctgatgacttttgtttgcactccccttaagtcatccacaggaacagctactttacatagaaaagtcaatctcagagggttgactaacttgcccaattactgaaaaaggtaaagcttcaattagcacccaggctcatctgatgctagtattccctctccacccctccatgtggcttctctttatttattttaattttctttgagacagagtttcactcgttgcccaggctggagtgcaatggcgctatcttggctcactgcaacctctacctcctgggttcaagcgattctcctgcctcaggctcccaagtagctgggattacaggtgcctgccacaatacccatttaattttttgtacttttagtagatagggggtttcaccatattgaccaggctggtcttgaactcctgacctcaagtgatccacccgcctaatcctcccaaagtgctgggattacaggcatgagccaccgtgcctggccttggcttccctttaataaatcaccactcaatttgatgtggaggctctgttagttcgcaaaatataatgagtggattatttccaaatccacttcctctgttttatctatcagtgtaatcaagggccagggtcttcccttgttcttgcctcaaggtgaaacagaagtggcttccctgtgctccgcagcaggttagacctaggcttaaatcctgaagagtgctgagactccactgcacactgccatgccgaggcccctgtgatgtgtctcgacaggggtcctctccctccaagctccatgaaccccagtgctgggaccctggtcaccagcctaaacttagtctcagagttcagtaacctttaggaaccctgaagcccgtgacttctcacacccctgccatcctattcttagttctctgtctgtattaactcaattaatcctgacaacttttgatgcagaaactattgttttttatgttttacaggtgaagaaactgaggcttggagacgcaatgcagcctgcccaaaatcacatggttaataagttgcagaactagaattcaaactccaagtctacctcctggacccaagctcttaacccctgtgctatgagctaataacatatggagaattttgattattttccttagcatttaccaccatataacataatatgcattatacttatttatcttgtttatgcctgtctctcccactagactataagccccacgagggcaaagatctttattaactgtatcagcatctagaataggccccaaccatagagtaggcacccagtacatatatatatatatatatacacacacacacacacgtttatacacacacatatacatacacatagatatataattttgtatttatatttttgagacagagtctctgtcgccaggctggagtgcagtggcgcaatctcggctcactgcaacctccgcctc

SEQ ID NO: 48973 - DNA, 850 bp, Homo sapiens
tcaccaggctccaaaccgaggagaaaacagcccagctccaggcactgtagcgtcactgtgacatcgccgaaggccggcgctattacgtcgccggaaggcccgcgcctgtgacgtcagcggaggcgcgccccttctgtagaaccaatcggaactcgaggcgcggcggctgggtattccaggagagcgcatgcgcagacgcgtggccacagactgccggtcagtgtcagtaggcggcgggttagtgtccgcaggctccgactcggccgccgacaccaataagctacaaggacgagctttaccactgcctgtactactgctacctgcgcgacttcccagcctgcggcgtagggcgcagcaagggcctgacgctgagcgagtaggcgctgcgcaccaagcggctgtggcccggagggcactgtcgggcagaagctcctcagtggccaccacaagcccgctagctccggctacagcccttgccgcacactcgcgtcacctgagcctgtgtaggtgcgcccccccaactcctcccccagccaggtcccggggacaccggcagcgtcccccaccgcccggcgccgctcattctgggcaggatcggccccgtctgaggctacaccgcattagggagctgcacccctcggcttgacctctcatggcctttgcaacaacatcaaagcctttggaactttgtagggggtacgaggggctaggaaaccaagaaaacatctctttaaaaatataagcgatcgggccgggcacggtggctcacgcctttaatcccagcactttgggaggccgagacaggtggatcacgaggtcggaaattcaagaccatcctggccagcatggt

SEQ ID NO: 48974 - DNA, 694 bp, Homo sapiens
aaagtgctgggattacaggcataagccacccaccaggtggagaaccagtctttaaataacagagtgtgggagtagggggcgcccagggcgaaggtacttagacagcagaagagtccatccagcaaagaagctgctgttaagtcctggggccacccagccacgctgggtaattataaagaaagcaagtctcgagtctcgtctgcgatcgcggacgggatgaacagcgtaacctagaacaaccctgacctccacgaggaggacctggtctcccgcaggccacaactcccccgcagttcccgcctgctgcctgcagagggagccagaggctgaggctgcaccagccctgctccagccccgggaggtcacggtcggcagaatgctcattagcattccagagccaaatccagcttccggctctgtctggtctctgctcatctaggcaggagggacagccgccttcagacggcgagaagggaggccggagtggatccaggagggcggtggaaaccggagacacagtatcggtgcaggaagtgcagaagctgtcatcttgcccaagagaagcaaggcagagaccaagcacggtggctcacgcctgtaatcccagcgctttgggaggcccaggtgggaagatccctttagcccagttcaagacaagcctgggcaacatagtgagactgccccccacctccca

SEQ ID NO: 48975 - DNA, 1769 bp, Homo sapiens
ctcaaactcctgacttcaagtgatccacccacctcgacctcccaaagtgctgggattacaggcatgagccactgcacccggccattattttttgtacagacgggatctcgctatgttgcccaggctggtctcacactcctggcctagagcgatcctcctgcctcagtctcccaaagcactgggattccaggcatgaaccaccatgcctgaccactcccattatttctaacatgcagatctgaacacccattcactcattccacaaatacttattgaacaattcctatgtcccctgcagagtggctggctctgaggacacagtactgaataaatgagacagaactccttgccatgcagaacctgcctcctgaggccacatccaccagctcacaggccttggaaggccttctgagtgactccacctggcacgtgccatccttggctcctcccagggcgccctcccaccttatctcccatcgctgcccttgattccaataccccgagcccagctggcgcccctcatgccctctctgcctccacgggttcaggtgagctcacaggccaaggcccagctcagccacctcctcctccatgcggccttcctgatgtgcagctgccgtgactactcctgtctctggggttctctgggagcctgtgtttagggcccagtctcttcttccagtgatttatttgctagcatgtttatctctccccaaagctctgagcttctggaggccaggacatgtcttccttgtctctgcatcgcccacgtaggccactttgaaatgtttgttgaatgagtcatcgagtgaaggaaggaacccgcagaggaacggttgcagaaactttgggggaggcctgggcaccaaaggcgaggcgtggtggcggaaagccgacactagagggcgacagagagtaagggaaaaaatgcagccaggaccaacaggcttggagcagagagatgcctgggccagggctcgtcccagcctggaagccccaagccttcgtcctccatgcctgccctggcttcgtggggaaggggtggggagcataccagccccccccccgccccaccccgtctgaactcagtcagccgactgaactctgctctataccctggggaaagggaagaataggaccaggacggccggcaggaaaacaggaaactccagtcccagagcagcgggcagaagaccgtccccaggatgtgggcacttctcgccagagggtcctgagcctggggcgcactcttctggtttggggtaaacttggtcctctcgtggtctctctctcttcagatagggcccaggggagcccccactccataccacgtttttccttccaacacatacagcagccaggaggccggacagagctttccggtttcctgttttcacaactgtattttcccctttctccttaatcagtttcctacagccccagacagggtgacaggccacagggcacctgcccagcttggctgtcccagcctgtcccccatcccctcaccacccccaacttttttttttttttttttgagacagagtctcgttgtgtcacccgggctggagtgcagtgagtggtgcaatctcagctcactacaacccccacctcccaggttcaagcaattctcaagcttcagcctcctaagagctgggactttgggtttgcaccaccatgcccggctaatttttgtaggtttttttttttcttttgagatggagtttcactcttgtcgccaggctggagtgcaatggcacgatctcggc

SEQ ID NO: 48976 - DNA, 1152 bp, Homo sapiens
caacagagcgagactctgtcggcgggggggtggggaagactggatttatgcagaggggcttaggaggttccagagtctgagtaaagtttggtcaaacgggggatctttgtcaccccttcccatgtgcacagccctgtcctgcagcatttaggctgtggagtgggtaatgcaggggacctggaggggaggggaagaatggaggagaaactgttgattcacggccctggaaggagacttagaacatccagtccaatggtttcattgtacagatcaagaaaatgagtcacggatgccggcccttggccaaggctgcagtcaaagacatccaggtccccagactccagagctagacagccagagcgggaggggcgggaggacagatccccagccctcccacctggtccctctgtggcccccgcttcagtggtgatgggggtggcatggccccctcccagtccagccagaaaccagaggtccagggagtggggcaggctggaggtgggtttttagaagcggactcccagagagacagtgtctagacgtttccagaaagacccagcgtcccctctaccccacccccggcgctctgattactgtcgtccatattttcaattcccagcaggcccgggggctggcgtcatccatcagctgtcaggcctctccagggagctcgggcagctgcctggagactctggcactttctctgaggcggggccagtgaaggcggggctggttcagccgcagttggcagaggcctgcagagggcgtggccagcatggtcaaggccttgggcgcagggaaaggaagggggttagtcttggggctgctgctgagcaccccacatttgggggctagagatgaggggagggaccgtccaatgaaggactccctggaccttgcagtgggcaatgaagaaggggaagggccatgacctgccctctcaccctcccccaaccccactccacggtggcttctgggaaatccctggggctagaattttccttttttttttttttttttttttttttttttgagacagagtcttgctctgttgcccaggctggagtgcagtggcacgatcttggctcactgcaacctccacctcctgggttcaagtgattctcctgcctcagcctcctgagtagctgggat

SEQ ID NO: 48977 - DNA, 583 bp, Homo sapiens
ttaaggaaagatacatatagtaggagatgtgacagtaatcttcctcctggcccctctcagcactgtgccatggaggttctgatctgggccagctgcgctgttaggggaagggggaaaatggccaaaccccatgtattctccttccttttccctctcttcaatcccaggcaggtaacaataattatgatgtaccaggctccgggccaaagtcatcacctgcattaggtcaccaaatcctcaggccaacccattacagtcatgagtcacttaataacagacacattcaacaaattccttgttaggcaatttcatcattgtgggaacatctcagagtggacttacacaaacctagatggtctagcctactacacacctaagccatatggtctagcctactgctcctaggctacaaacctctacagcatatgactgcaccaaatattgaaggcagctgcaacatgagggtaagtattagtgtttctaaagatagaagatggccaggcgcggtggctcacgcctgtaatcctagcactttgggaggcccaggcgggtggattacttgaggtcaggagttcaagaccag

SEQ ID NO: 48978 - DNA, 4294 bp, Homo sapiens
ggtgcaatccagctcaccacagcctctactcaccggggttcaaaggatcctcctgcttcagcctctggagtagctggggccacaggcatgcaccaccatgcccagctaatttttaaatattttttggtagaagtagggtctcactatgttgcccagactggtctcaaactcctagcctcaagggacccttctgccttggcctcccaaagtgctgagattacaggcatgagccatgcacccagcccctttttaaaatttttttgagagacaagactttgatctgttgcctaggctggagtgcagtggtgagatcatagctcactgcagcctcaactcctgggctcaagcaccagactccttttatcacattctatctcacacgcgtgtggttccaatcctgcctctgccacttctcagttgtatgccccaacccaacctgtctggctctgtcctccttaacagaaggacggccctggccacgggccacagccagcaacgcttaagcaccagggccggcgagtgccctgccgtggcacggctccagcgtcgcgctctcgaattcatttgctttccttaacgagagaaggttccagatgagggctgaaccctcttcgccccgcccacggcccctgaacgctgggggaggagtgcatggggaggggcggccctcaaacgggtcattgccattaatagagacctcaaacaccgcctgctaaaaatacccgactggaggagcataaaagcgcagccgagcccagcgccccgcacttttctgagcagacgtccagagcagagtcagccagcatgaccgagcgccgcgtccccttctcgctcctgcggggccccagctgggaccccttccgcgactggtacccgcatagccgcctcttcgaccaggccttcgggctgccccggctgccggaggagtggtcgcagtggttaggcggcagcagctggccaggctacgtgcgccccctgccccccgccgccatcgagagccccgcagtggccgcgcccgcctacagccgcgcgctcagccggcaactcagcagcggggtctcggagatccggcacactgcggaccgctggcgcgtgtccctggatgtcaaccacttcgccccggacgagctgacggtcaagaccaaggatggcgtggtggagatcaccggtgagcccccctgctcctgcaggggagaggaggaggctagcagggcgggcagggccgggggcgtgcggttgaaacgggggtcccgggggcctggggagttaaacgttggcccagcaccgggaaaaacaggactcctgattcccttgctcaggaattgggagtgcgggtcgcttctaagggcgctttctgctctgtaatcccagcgctttgggaggccgagacgggaggatcgcttgaggccaggagttcaagactagcctgggcaacatagcgagacgcgcccccccgccccgaccccgcgccattacaaaaaaaaagcaaacaaaaatttttttaaagatcatcgatgaagagagaaaatgcgcttttctacagagtccccttcccacccacagccccatccccagataagcggggagttccctggcgcggtgccagtttctagccgctgagtgggcgtgtgcgcggctccaagtgcgcctgcgtactgctcactccccagctccgcgccctgctccgttcctcccaaaactctgaatcgaagaactttccggaagtttctgagagcccagaccggcgggcacgcccccatccccaaccccctctgttaatccctaccagcctgcagtcctggctgcttccaagcaggaggtggggcctctggcctagcggggccgaaaggcagtcccctcccccgcagtctgatttccctcttccccccaaaggcaagcacgaggagcggcaggacgagcatggctacatctcccggtgcttcacgcggaaatacacgtgagtcctggcgccaggtcggggtgggtgggtggcgtgggggtggggtcagggaagagggcacagggacccacccggtgtgtaatgtaacgcttgcctttcctctctgcacgtccaggctgccccccggtgtggaccccacccaagtttcctcctccctgtcccctgagggcacactgaccgtggaggcccccatgcccaagctagccacgcagtccaacgagatcaccatcccagtcaccttcgagtcgcgggcccagcttgggggcccagaagctgcaaaatccgatgagactgccgccaagtaaagccttagcccggatgcccacccctgctgccgccactggctgtgcctcccccgccacctgtgtgttcttttgatacatttatcttctgtttttctcaaataaagttcaaagcaaccacctgtcactggcccaggccctggtgtttgtggaaggaagcctcaggcacctgccatttgctggctttcaggagtcatctttgctcaggcccgtgctgggccatgtgggtacactggtgtaggttgctggacacaggctgactcacatccataaagacagaggtcttagggccgggcgcagtggctcatacctacaatcccagcactttggggggttgaagcaggaggagtgcttgaagccaagagttctagaccagcctggacaacatagtaagactgtctctaaaaaataaaaattaggcagggtggtactgcacgcctgtagtcccagctactcaggaggctgaggcaggaggatcgcttgagcccaggagttgtgaagggtacagtgagctaacatcgtgccattgcactccagcctgggcaacagaacaagatcctgtctcaaaacaaccaaaagcccagagagaaagagtgagaccccatctttaaaagaaaaaaaaaaaaggtcatgattgcaaggtcacgattgcaattaaaactgtaaggtggggaaggaggaggaaataagagaagcacctgaggcttgagttctcaggagcacctaggttgggtcccaggtgaaggggcacagaggtaattgcacctcagagctgatgggaggattactatgtcaaaagcttggcatcggcttcagcacaccccaaggacaccacagtggacctggcaagctttgagatctctgtcaccgccacactccctgaggccagggcatccctgttggcagtcacaagggaactggcaagccgaaatggggtgagaacggagcccgcagagtctcggggtggggagattgggcagagccctggccaaccgacgggctcagacctgtgctgctggctgggccagcagctcttgttgcctgtgtttatttccagctggcctccctccaggtgtagacaggcttccaagggcccagttcccctctctcttgtctgcccttgccctagctgccaccctctcaccaggcccagggaaagttgaggtagaaagcagatgggggaccaggcgcggtggctcacacctataatcccagcactttgggaggccgaggcgggtggattacctgaggacaggagttcgagacagcctggccaacagtgaaactccgtctctactaaaagtacaaaaattagccgggcatggtgttgcatgcctgtaattccagctactcaggaggctgaggcaggggaatcgcttgaacccaggaggcagaagttgcagtgagccaagatccatgccactgccctccagcttgggggacaagagcaaaactccatctaaaaaaaaaaaacaaaaaacagatgggagctttggagctcagtcccaaggtcctcaaatatttgagggacccagagtctgaggctgtagcaagatactcccatgttcaaggcggagcatgcagtgagccgagatcgtgccactgcactccagcctgggcgacagaggaagactccgtctcagaagaaaaaaaaaaaaaaaaaaaaaaaaaaaaaaatactcccatgttcttttctcagcccacagtctgactttcccaggttccctaagaagggtggcaccctgcaggcgagggcctggagcatgtccacaccacccccaatatcaccccccaccaccttgctgcttttttgagaccaagttttgctcttgttgcccaggctggagtgcaatggcgtgatctcggctcactgcaacctccgcctcccaggttcaagcgattctcctgcctcagcctccagagtagctgggattataggcgtgcgccaccctacccggctaatttttgtatttttagtagagacagggtttttctatgttggtcaggtgggtctcgaactcccaacctcagg

SEQ ID NO: 48979 - DNA, 1675 bp, Homo sapiens
cccagcttcttttttagggacagtctcctactgtcatacaggctggcgtgcagtagtgggatcttggtgcaccataccaaagtgttgcagcctggaactcctaggctcaaggcatctccaggagcgcgccacaagcctggctgattttttttttttttttggtagacagagtctcgctatgttgcccaggctggtctcaaactcctgagctcaagccatcctcctgcgttgacctcccaaagtgctgggattacaggggagagctgctgcgcccagcccagtctactccctcgagttccctgtccagagacccacatctggagcagggtggggagtcagagcaggtcccagcccacgctctagggctcagctcagatgatgtgagcctggggcagcacctctgggcatagtgggctctggctggcaggacaggacaggctggcccagatctgggggtctctgctgggtgttagatttgtggagtctttgtgctgcttctggggtggtggggcaattctgggcctctccaggcctgtcctgccttttctttttttttttagatggagtctcactctgtcagccaggctggagtgcaatggcatgatctcagctcactgcaagctccgcctcccgggtacaagcgattctcaggcctcagcctcctaagtgggattacaggcacctgtcaccacgcctggctaatttttgtatttttagtagagtcaggcttcctccatgttggccatgctggtctcaaattctgaaagaggagaattgcctgaacctaggaggtggaggctgcagcgagctgagattgcaccactgcactccagcctgggcaacaaagtgagactcggtctcaaacaaacaaaaaggcaggacaggcctggaactgcccctcccccccaggacgggtgttgtctagggcttgctgacctcacagtctgtgagatcaggcagccccgggccttggctgcccaggagtgaattatttccaggcgccatcatcactccgactatagaatcaacaggatttgacaggtgcagctttcgactgctctgttgagagggtggagacagaagcaaaagctgcccacagaaaggcgacagggaaccccagagctaggtcccaagagcctcttggtgatggaggagagccaccaagggacaggagggttgggggaactggagctccggcccagggacagagccccaaaccacctccagcccaggcacagagccccagaccaccgaagccctatgccaccatggcagagcccagggcagggcaggggtcaggctggcccccccaaacacctccccaccattcccacatgcatacaccaggacctggggggttgcaacagtgccagaggtcacgggttggcaggggagggagaggaggaagaaagcagaagagcagagggatgcgggtgaggctgggcttgtctcagacagtctggcactagccctcaaagctcagaatccctgatatgggggctaagccccactgccatactgcccctcccagggaaattgccccccagggaatatggggggaacctctgagtgtagctcccctggggcctggagggcatatcaagacatgggggatagtgaacagcatcatagctctaagtgtccctgatctggctgggcgtggtggctcacccct

SEQ ID NO: 48980 - DNA, 908 bp, Homo sapiens
ggccagggtcacccagcaggtctgggcagggcaggagcagggtgcgtgcactccaccccaaagggtgcactgttctacccatcaaccgatgccctgggtgccagcgctgaggaggccagggatggagacccacgcataagcagagatcactccattcctggcacgctcctcctggtcgagacctctggttctctttccctttccaactcgccaggtgactttggacctcgctttgcccatctaactgtgcctcccaaggacgagccatattttcatgggctgcttacaagagacagccctgccaaccgccagttggtgctgggagagttggcagtgtgacaaatgccgggaatccctggcttggctgagaagggacggctctggatcaataacagactcgtgggatggcctcgggcaggagcacgagggtggcagagcctccctggctggcctgcaaacaaaaagcaagtgtccagccagggctctcgactcagcccagggagaaaagagcacagctggggaccctgggaaaaacagactccctctgggcggggttcctatagcataacagcccctcccacccttcttctcagctgggtacagcagctgccctgcctaagatgacagtgatggtatcagcagctgactctggtagaaggaagtcttccccctccctgcccaccgccccaggactgaacaagggggcagagcctgccaggagggattggggttaaagaatgaatcaaggccaggcgcagtggctcatgcctgtaatcccagcactttgagaggttgaatcgggaagatcgcttgagcccaggagttcaagaccaacctaagcaacatagtgagtccccatctttaccaaaaacgtttttaaaaattagctggggctggacacagtgact

SEQ ID NO: 48981 - DNA, 1989 bp, Homo sapiens
gtctctaaaaaagaaagaaaaagaaaatagacattgctgagcgacagaaatcccacctttctaaacagtcagcaacctcactggagctgatttttaattcctaaatccagccttgatagtgacttgggcaactcaactccctctcggcctgggattatacaactctatgtcaggagatgggaagcggggagactgggtgtctttattccatttctgacatctttcaggactgatgatgggggagggccctggccctggctggcagccactgttcgattcagttatcatcatcaggaccgtgggagggaagggtattggagcagaggaccttgaagggcgcacaggaggctgatggggctgtaacacctggggcatgagggcagcggaggttggacaggcaggttgggacctagctgtggagggcctgggataccaaagagaggcaggacctggcctcagtgtcgccaggacaccagatctgccccctccctcactgttgcaccatggctcccgcgtgtaaagtgatggaacccgtcagacccaggtagccaccagaaaccgcccagctgttgtgtgcatcgggggccaggagtttcctcttctgcaatctgggaacaacgcagacctcccagggctgttttcagaagcagagatgtgtaggtaagaaaggatagccaaccagtacgggccgggacacgagagatcacgtcattattcagatggagaaactgaagggcaggcgtgggaccaagggcccaccacgagcccaaggctccatcctcccaagcacgtaacaaaggtggaggcggaagacggaggagagagaagcgggtgaagttgggagataaaagctccccagtggctggagggcgggatctgcaacaaatgaagccccggggccgctaagcgggccgatttcggggcagggacccaggccctagcaacagtccgaccattggcggagcggggacacgctggcctgtgattggctcttgccatgcccgaggggaaggcggccgcccccggggcggggctacatacacagccgtggtcccgcccggcccacatccgggcttccgcgtagtccgggcgccctggcctctgcaccgtcctagaaacctgtcttacgtcgaggaacccgggggacagaggcgcgccagtgcacgccggggccagggacgaacggctcgccaatgcaaaggaggcccctcggggagacggcaggcagcaaaaggcttccttggccgggggtctgggcgtttggggaggggaggtgctcagagatagggccgaggatggagctcccaggtgggttggaggcgggggtggctgggctcgaggacgctgttggagtccggggtctggaagaggcgatccccgggaaagccagcttcagagccgggaagggtcggcaggggacctactgcaagagcccccaggttggggtagggagggggcccagacctgggccgggagggatgctgaatcccccgacctagctctggggctttgcaaaccagcatcactgcagcattttgtggctcaaggaatggggcagggcggccagaccagctgtggctggtgcgtgcgtgaggccctgagggatgcggccaatgctattttgctgttttgtacttactcagtttcattttggctctgtcgccactaggcgaaagaaatcgaagtgctaacataccacggggagcaatgattattactcaatgtggccccgccccagcagcgggaggtggcatctgtttgaccttggagacttggacggtatttagggagattacatgaaaaaaagactcaccccacaatgcttgcagtcagctacaagctgccttgtccttcataccttttagcctttatttcctgagtctatcttgtctgtttctaatgtagtctcctgatttagggcaagagaatatttctcactcttggtctgcccactacccacaatccttgtccgaggatttactcggcaaa

SEQ ID NO: 48982 - DNA, 581 bp, Homo sapiens
ccagacttggctttggaaggagctgagcccttgggcgctgctgccacccatctctggcatactttactgagtgtgcgaatgctgaagacaaaccgccccgcggtgcagccctcatgactgcctccagtgcaaggagaggccagcgtgccgaaggccacaaagatcaagttctggcctttcccctaaatcatgttgtccttatttcaagggccaggagctatttaaagctcaaattatctcaccagtcctgggggcactcctcctgccacaaatgaagtctcccagcagtgcccagagaggcaatctgtacttatgtaaagtctgcctagctgtccccagacacattggaacaaggagattatgaaatgccaggatcacctttggatacagtagctcgaccacatttggaacacgcccagatgttccctgccagtgaaaaactaagttagaggggaaacccttcagctctaaaaagtctaaagaaaagttgttctgaacaccttaaatcaaaatttttaaaaatcctttatcctttagatcataattacttgcataagaatctgttatttttaaattaaaat

SEQ ID NO: 48983 - DNA, 2720 bp, Homo sapiens
taaatattaagatagtgggggcccgaaatcattagattaattttctacctttcatttcataatgctcaatacttccccctcctctaatatcaaactggttgacagcccattagataaatgtggtgttactgacaaaatggtgcaatacagggatgaatctgcaacccagacaaaatgcgacaactggcgatcggtattctcttttcatcagcatgaagatgtactcgcttaaacaaaaaaaagcctcagatgcatctaacaaccaaaaatttttaaaaagactttttcccctttaaaataactcctcccagcctccacccagtctaggctctctgcaatatgacaaatgcagaatcttctggaatgacttgatactgcctctcaccacggctttgtttgcactatcagatcagacagaatattttttcccccaacttataggaatttcaacagacgcgtgcctgtattcaaaaaagaaacggcatatgtcacacgaatcgaaccagtcagctacattcaccaccttttaattttacaggcaatacctacccttttcaatacaaaaacattagggaataaaatggagatgacatgttgagaatgatcaatgaaaacgctagcgagacaaacgttctcccttcctaaaagccggaggacttgctttgggcgaatggagaaagaagagccttttgttaagaaaaacgtgagcaaggtggtttcgattttgcaccacggagctcaggttttcaagagaccctatacaatgtttctgggaagattctcagggatgtgtcgggacagacagtggggaagattctgggggggctggggaggtggaaaaccgggagacctgctgagtgaatgggaaaggcgccgcccagacaccagggagagaaagaggaaccgcatccatgcggtcccccgcccccacgcccaggctaggaggaggggggaagtggggcacaaaggatgcgcacgcctccccgctcgggtcccctgcacccctagagccgcgggggccggagaccccgctcccaagtccagccccgcgggacctcgccccggcccgcgcccgcgccgggcctgaatggcagcgccgcggggccacggggactccgaaaagaggccgcgtcacagcccgggttcccgtcgcctctcgggaccctccccagcccccctcagtgagcgagacggggcggtcaacccgccatcgcgacagggcgacgaagccccgggccttccacgccaaggaccgcgtcttcggaggggcagggagcggcgggggaggggaggagacactcacgttcttcatggccgcggccatgtcgtcgtagcgctccgcctgctcggccagccgggctttctgcaccagttgctcgcggtccaccatcttcgcggggctgggtctggccggagaaggaggaggacactggggcggcctgaagggcttggagggcgcgactggagcccaagtgccggagaggaccgacccacagagcgagcagctgaggcggcggctgcgcggaggaggcggctggagctgcgaccgcgggaccgggcgcgaggcggctgcggctgctgtgcgtgccactgacggacaaccccctgcggccccgcccacgccgcatgacgaaggcaggccccgcccacccgtccgcaagccccgcccatgccccgcccgagcccggccgcggctagaactccccgctccccagctgggctcactgcgcgtcttccgggcaccccgtcctttcccactgcgcccccactctccccttttttcacttcactccccagttccctcaccccagcttctccagtcgcccccttacgcctcccccttgagcctcccgccccgccagccctcggacgcatgggcccctgggagttgtagtgtaacctgcagtgcactgaggcgctgaggagaccaaggacaaaggggcggtcaagactacaactcccagcggacatagcgcgcaggcgcaggaggacgggggggggtgcttcgaatcccgaggccgctggggacccctggcggggatcagggctgcatcagtccctgcgagtgctgattcaccgccccgccccatattctccgggaaattacgagaggagggggcaggggcctcagtcctagaccctgtttccgagatcacgtagcaggtcgtggtgggggaaggacaggaggcgcgtccattgtagatccagactctcagtgtggtgcctgcccgcgggatggccgaattaaggggccagaccctggggactgtcacctccaccccctacgagcttccattaaaccccccaccccaccttgaggctcttgggcctgaataggtgaaaacatggacgaacgacaaataccggctggccacagtggttgatttccagaaaggatgcagctgtctgctggctgaccctggagaaccccttcttcctctccagggtggagtgctaaagattgagttcagctaccaggagcctactccacatctaactgggctgcgtctagggcttggttgtccagcccttctctcccctcctaagacatacatacctactgaggtcacgctgatatattctcgttcatattattccacatagcttgcagatagcatgggtttttttgctttgttttgcttttttgtagagacgggggtctagctttgttgcccatgctggtctcgaactcctgggctcaagcgatcctcacgcctcgg

SEQ ID NO: 48984 - DNA, 1787 bp, Homo sapiens
atgcctttgctggggtgcctctaggcagctgatcctgttaagccctcactctagtgcacaagtctgcgagtgtacaggagcccctccctttccaatcctggttttattaaaaattggttttattattttttttttttgagacagggtctcactctgttacccaggctgaagtgcagtattgtcatcataactcactatagccttgacctccaaggcttaagtgatcctcccacctcagcctccagagtggctgggactacaggcacgtgcgaccaacttgagtaattaaaaaatttttttttgtagagattgggcgaggggttggggggggggggggtctcactatattgcccaggttggtctcgaactcctgagctcaagagatcctcccgcctcggtctcccaaagtgctggggttacaggcgtgacccactgcacctagccgaggctttacaattttaacaggcctctctgggttacaagggtaaagacccctgaaaacaagagtaaataccccagcctagccttggtgggagggggcggggttggggggagaaaaacgctctttgtaagttgcgagtggccgcatagactaataaggtcgccttcacgccaggcttgtggaggcccttcctgtcccttccttcctgtccccgcgtaggccgcagggctccgtgcccagggcccagtcagccccgcccatccagtggctgggcccgggatgtccccagaagccctgaggagtgcggcgcgatgggcgggttccaggggaggagggggtgtggcctacgccctcggccccgcctcaccaggactctgcaactggctgtgacaggctgtgccagtcgcaggctctccaatcaggaggctgccgtggggccaggggcgcggctccggttcccacgcggggcgaattccctctcccggtagtctccccagccccgccccgcgcggctccccgcggaggccgtgactcagcaggaaggcgcgaccagactgggccggccggccggaaaggccgagtcactccgcgcccttccctgtcccccgtgtctatgccatcgggcggggagatctgtgggctggggtgggtgtcccaagacctggtccctggtctttgtatgtgatccagaaaaacctccgaggcttccctggcctttagtttctcttctgtacagaggaggcaacaataaacacttggagatttggggataagacagtaagagttacaggaatagcatggagctttggaattccacccttcagggtgcagatctcagctgtgtgatcccgtgcatccgctcattgcagcctagagctcctgggctcaagtgatcctcctgtctcagccgccccagtattttggattataagcacgtgccaccacgtcctggctattttttttatttcgtagtgatggggtctcattatgttgtccaaagtggtctcaaactcctggcctcaagccatcctccctcctcggcctcccaaagagttgggattagttggatgaggtagctcacgcctgtaattccagccctttgggaggctgaggcaggcagatcatgtgaggtcaggaattcaagaccagccttgccaacatggagaaaccctatctctactaaaatagcacatgcctgtaattccagctacttgaggctgaggcaggagaatggcttgaacccgggaggcggaggttgcagtgagctgagatcgctgccactgcactccagcgtgggcaatagagcaagactctgtctccaaaaaaaaaaaagagttgggattac

SEQ ID NO: 48985 - DNA, 1923 bp, Homo sapiens
ggcaggagaatcgcttgaacctgggtggcggaggttgcagtgagccactgcacttcagcctgggtgacagactgagactctgtctcaaaaaaaaaaaaaaagtcatggtgagaggatcgcttgaagccaggagttcgagagtagcctgggcaacacagtgagacctcatctctaaaaaaaattcaaaaattagccaggcacggtggcatgccccttgtggtcccagctactctggaggttgagcggagtaggatagcttgagcccaggagtttaaggctgcagtgaactatgatcgtgccactgcagcccagtctgagtgacagagcaagactctgtctcaaaagaaaaaaaaaaagaaataggtgttgtgcctctccaaaccttggccccaaaacagaaccctctgtggccaaaactatgggaagtagggcctactagccctggggcaccaaatgagggtgaagatatcaattcccacagcaatcaatgaatttcacaatgttctgccaaactgcaaacacccctttccactgactccgcccaaaggtcacacgctagctctggtaagggtgatccactctctgcttaatagagttttgcggggtctagatttagccgggagcaaacggccccaccctttacggacttgatgcctttctcgaactgggatcggccttagccctgaccttcggacaccgcccctcacagctgcaccacgcggcgctcaccaggccccgccccattttccactgcagaaggctctccgttccggcctcgccccgccgcgcagccgcagagcgggcgcacggcggggcggcgcccctctgcggagtgcgcatgctccccgggcggcagtgccgcaagagaggcctcgcgcgtggcgccgccccgcccctcccacgccgcagtgcgcggccccgctgtcagcctcaccttcgctgtcagcctcacctgcgcagagcgctcccgcgtcctcgtggtggccgcagttgtgctggccccagcccaggtggaagcagtcgctcaggcgagcctcggtgccggcgcagcccacgttgtccagcagcacggggccgcggccgtagccgaagtggcccagtcccgtagcgcccagcgcaggcccgcagcccgcttcgcggcaggccacgcgcgcgtccgcaaagtcccagtcatcgtcgcacacggtgccccagcccccggcgtgcaacacctccacgcggccgcggcacggacccgggccgcccaccagtcgcagccgtccacctgcggggcgcacaggcccgcggccagaggggctgggctggggctgccggctcccggcagagccccagccctacccttccccatcccccgcagacccaggcaccgccacttacttttcttccccgcggcccaggcggcggtggtgagcagtgctgtctcccgggaaggctgggggccaactcctgtagctgtggagacagggcatctagggcgttcgaaggggacgaggaggccttctgtcctgcagcagggcacggggacgcctaccaagacccccaaccctaccacacccgtacccccactcagctgcaaccccagagtcaccacgttgtctggcgcgggttgggatctccgggaaacttggttgaatgaaccgaaagctaattctaggtattatcctaacttcaggcccagggatagttcctatcctaattccaattgcactgctaaccttgactcaaccttcatctcaatcgaccccctcataaggtctctcaattcccaatctcagcatcatcccattgaaaaaaaagtttttttaatttcgagacagggtcttgctctgtcgcccaggctggagtgcagtggtgcgatcatagctcactgcagcctagaactcctggcctcaagtgatcctcctgcctcggtattccaaagtg

SEQ ID NO: 48986 - DNA, 466 bp, Homo sapiens
ttttaacgtggagtctcactctgttgcccaggctggagtgctgtggcgcgatctctgctcaccgcaacctccacttcccaggttaaagtgattctcgagccttggtctcctgagtcgctgggatcacaggtgcctgccaccacacccagctaatttttgtactttcagtagagatggggtttcgccatgttggccacaggcttttgcatgtcctgcggcccttctgtgtttgttcttaatgtcacaatccgtgctgatgccaggcgcagcgccagggacttcccatgcgagcctgcagctgcccctcccttctgcacagcctctctgagcccactgaggagctgccgtcaccctcaggagccgcctggaacttgactttggaaacaccctctaaacagatcttggaacctagggtgtaaagactgaatcatagtccaggagcccaggggaggctactggcccccac

SEQ ID NO: 48987 - DNA, 2032 bp, Homo sapiens
acattcactcaccactcactcactcacccactgactcaccctgagcaacttccagtcctgcaacctccgttcatggtaagtgccctagacaggtgtaccattttttatcttttatgccatatttttactgtgtgtattctttgtttagatacacaaacacttattgtgttacaattgcctacagtactcagtccggtaacctgctatgcaggtctatagcctaggtgcagtaggctttaccacatagcctagatgtgtagtaggctacaccacataggtttgtgtaagtgcactccgtgatgttcacacaatgatgaagttgcctaacgacgcgtctctcagaatatattcccattgttaagcagcacatgactgcacatgacacagaaaccaattccctccacaccctcccactgacctccttcccctggaaaaagtagatatttccatccccacataaaaataaagagatgaagctaatgagagaaaactattcatccacatatacagatgatatttgtcagaccagcacaacaaactcttattgagtttctagataatagaagcccaaataactagcactcctccaccccaatatcttcaggaacttctgaatcattggcaactactaagaacaacttatttttcaaatactctagagaaaggattttactgtgtaattttgtcaatttttttgtgtatgttcacataacataaatcttttaatgttaataaatctaattatctggttggttggttggttagtaattaaatctatgttgcagtagtttctgtttctggattaatatttatgacttgataagtatgcagttcaggaaataatatgtaatctatttaaagttaaattaatacattgtaaatccataataaagtaattaaatacagttgagcttactttttgaaacaaaacaggagtacttacctctctaaacagtttgaaaagatttttcagtactctcttcaacctttgccttgccttgattgtgttaccttttggggcttccctgttttctagtaattcctaaaattttacagcaaatacgttgcgtctttcatgcaaaatctgacacattctgaccagtcttggtcagttgggggaaacaaggctgtggtgagctggcactgtctgttgcactgtgaacccggagagtgggaacactcaggccgcacacgtgcagggctgtcctgacgtgaccctgaccttggtgactgtctactctcccgtggctggttcctgtggtccttgttgcacattcagggtttattagttgttttccattcttggtccagtgctgatagcaaagttggaaccaagaaacaacagatctggtaacaaaggaaaggaggaatgatcttagcaacacatctggaattccagaaaattagaatgtgacagaagaggcatgtaggtactcaggagtagtcacaaggaaaaactcatagctagaacagattttaccttaacttaaaaaaaaaaaaaagtttgctcttctgtggcaacaaatatcttaaaagaactaacttagttagaacaggtttctctgaatgtgtttctcattactcaaaaagaagcacctgagacacttgtttgaaaggaagatcccatccaaaaagtaatgattatgatttttgccccagcccaccgcccccacccaaagtgacatttgcttatgtgactctgactcacattatagttagaggaccgtgggttccaaaggtggttctcagccctgactggtcagtcaccagagtctcctctcagtgatcattcagtctatgcataaacacttccagtgacaggaagctctcagcctcccacagaggctcacgccaactttggaaatgctcctacacttaaatggttgttggatttgtttataaacctaccttcttgcaactttcacccatccatgctgtttctacttctgtggtgaatgatgcctctcacacatgtcagcatatcgggcttcctgcattatctcttcacccatagatccttaaaaccaaaagc

SEQ ID NO: 48988 - DNA, 939 bp, Homo sapiens
taagcagaacagaagatttaccattgggatattaatatggcaacaggcaaagaatgagttggagtaataatttgctacagaaggtatgaagacctgtagagaagctattgcctgaacgtggataagaggtaatggaggcactgaatcagagaggcatggtaacatgtacaggctttgcaactcattgaatgtgggaatgactgacagaagaatcatagcctactcttgggaaggtacctgacaaaaggatgatgcccaacgagcagggcttggattcagagaaatcatgggattttctctctctaaacacatgaatcacaagccatggggcacagtcctaagtccttgtaacatcaagggtcagatgaagtacaggctctgcccacaagcatgtgttaatgggctaacaggatgagtccactagcttccctgagtccaaaaaaactccactattttactagttaattaacaacaacgtttttcaaatggatttggaaattcttcacaaaactattagtaaaaagttacaaaattatttctgaagaaaagtttacactagattattgatgatattgattttctggattcaaatttccctctccagccctgtgttcatatgctaaaggtccctgatgacccttcatcctctatccccagggcacagtcccaagttcagggacctgttcttggcctctatacatcagctctgagcaacagagcaaattggctataattagtcatcagctccacccaactttaatcctcatcttccagggctcctggcctcctctagccagcaagtgcaatacagttcctttttttaaaagcaaatgccctagctctaaaccctgacttcctttttgtgttccccattctcttcttaactttaaccaattcatgttacaagtctctgacaatcgtaactcaaacagtcatcat

SEQ ID NO: 48989 - DNA, 967 bp, Homo sapiens
agagcaagactctgtctaaaaataaagtaaaataaacagtaaatgttaaggttgaagctaattctagggatggtacttcctatttggaatatttgattctgaaaccaatcagaaacaatgcaaacaacatttatacaaaatgttctatttcacacacacacacacacacacacacagaggtcgatatagtcgttgtgcaactaaacctagtatataatttgagagccaagtaaatatattccccacgacagcttccaaagttccacatccaagagacaaagcacaacataaccagaatttgtcaagaaagaacagtgagtcatggtgccacatgagttgagaatttacaagtctgaaagcacagaacgactgtcaccaggaagaaaaggcttaaatccaccccattcctccttctctgtgctctcccatataagcccaccactatgtgtctgtttgcaggacaaagtaggctgccagcaacacaagtcctgaccccgtcggctgtgataatgaggaaaaactggtcacaggatgactcaaaagggcaattgtaaaccagccatttcattttgcagcatgaaagacccgtgaattttgttcttttcctcacccaaaacttgaaagtaatataaaagggcacaacttttatgtcccaatctccgagtcattagtctcactaaacttaggacaattttttattatttcctagtgtcctacctttgcataatatcagattaaaaatagtactagtcaaattttggaacatttatagttgagttcccttttagaaatgaaaagcaaaacatatgcttcacagcaataaagtcaaaattataaaatagcaatgcagaattcagctacaaaaataatacagaactaattgtctcataatttgtaaaatgtcacacatcaaacaagatactttgtataccagagttgaggaaaagcagagatgaatgacaccaca

SEQ ID NO: 48990 - DNA, 1077 bp, Homo sapiens
ccactgcactccagcctgggtgacagagcaaggcactgtctcaaaaaagaaaagattatcagtggagactgggagaccatcactgaaggggaagacaagaccaggcaatatctggataccacaaggagagacagcaggatcaggcagagggatagacatgacatgaggagaacggaggtgagcaaaagaccatggtgtgatccaggcacatgctgtgaaatggtgacaaggatgggagagttcaatatggcctggttctgaaggagctctggttattcaagctcttgaaccgaatcacagcttcacagagcatctgtgacacttgactgtctatgatggtgagagggagttctggaaaatctcagtggcaatggggcccctgacccatatggtcaccccaattgctgcccagtggaaatctgctgtgacttgtggcaaatgcaactccacaggggaggatgaaggggacagccagagcctggtttcctatggaagtccattttctcagtaaaatattcactctgccatctctacagccaagaaaaggagcattactgattaaaaaaagaaaaaaaaactgcattgtaaagtatgtggatcaaagaaccctgtttacaaaaaaatggtacaatttgtctcatctacagtggaaaaatcttattttaagcaacagtgttaaaccccacctgagacaaaccacatcttataatcaaatggcttgtaaggccatttgatggacagacaaaataaacgtttccaaaatattcgttcaaataaaacattctaataaatcctatagtgctttctggttacatcatctgaaatctttactgaacaaaatgaaaccttcccatgatgagcaatacctttcatatactgatgactcctaaatgtgcctctccagccgtgacctcttacctggccttctgactcatctccaaactccacctcacatctccactgggatgtctattaggcatgtcaaactgagcaagtccaaaatgaaactcttccttcctgcccctcccatacacacatacacacccacatgcccttctacctgttctagccaaaaac

SEQ ID NO: 48991 - DNA, 3155 bp, Homo sapiens
cagaaaattagctgggcacggtggtgcacacctgtaatcccagctactcaggaggctgagacaggagaatcacttgaacccaggaggtggaggttgcaatgagccgggattgagccattgcacttcagaccaagactctgcctccaaaaaaaaaaaaaaaaaaaaaaaagaaaagataaattgcttaaatttgactcatttttcccatacaggaatagtttttacatgttaattacattgattatgacaaattctaatattcagacaaaacatatgcaaactatctgtaactcagcaaatttctgtctgtattcctaaaaggaaaagacaagataaaaaataaggataattggtgagctggacacctgcactggagctggaggtgggaaacatttagagagaggaagaccaggtttcactgagaacttagacatcatcctgagatctctcttccccacccctcacaagcagcagcttagtgggtctcctaggggcagggcaaagggatagggcaaagtgttttctatacatgggtataaacgtttgtcagtatattgacatgtatatggagctgtcagactcacttcacactgaaggataataaggataataatttggtctcttaggagactaggatttaaataatcagttcatgggccaagcatgatgactcacgcctgtaatctcagcactctgggaggccaaggtgggaggatggcttgagctcaggagttcaagaccaacctgggcaacacagcaaaaccctgtctcttaataataataataagcttatggctaagtaggccttcacaatttagagagttctcatttctatctcatctgcattgtataaggtattccaggcctactatacttttcaatgagataatgatacttgaccaatatacagtgaaaaggtggcgtagactgaactcaaacctagaaaaaggtaaacagaacaatggactgagtgttctgtatcaagcttacaatgagaaaatgggtaattactcaaaagtcctttgaaaggcagatattgtagacatctaaagagaatttcagtgagtttgttcatcctgtacacgactcaaaacttctggaatgcaatgtgtcaatattttgagaagtattttttttctttcaagattataagtatgcgaggagagatcgtcgcaaaagtacagttaaaaggtttcggctaagataagaactccttcacaagaaatcttgctaaatccaatttacttgcaaaagcgtatctattttcagattactataatactaagagaaaaaattctccaacaaacgcagattacaataaatgacacatttttatcccattaaactagtggttctcaactctggctgtcttaaaatcattaagggagcttttaaaagaacactgatgccccaagccatacccaggatattctgattttattgagctggtgtggagcccactctctggtgtacatgtatgtgttttagattccctgggtgattctaatgtacagccagggttaagaaccattgaactacaaatgtacattacatattaagcaatatttgttagagggcataacttggaccatcttataatataaccatggtagacagagagttgaaagaaataaaaataatgttttcatgggaacattaggtaataactgcagggctgaataccctgcagttaagtacacagttcacatttcaaggacatgtgaaatagacaaatttggtaatgttgcaaatccagagaccaatgtctcaccacatactattaagccatcggctcttcctccctggacgagttgcccatgtcttaacacacccttttaaaagaagtattcagtaacctctttgcttattcattctgactcttctcccagtagttcatcactggaaagtccagaggaagaagttttgcaatttcaaatgaggaaatgtggcttaatttcacagtttagtatattcagttctcatgaataaaacaatgtagcattttgatagatacttgcataggtaaacctataaaagaaacgagagtacctagatattaaagatattggcaaggcatagctcttgtaaaacaaaagctggttggccagatattctcattcgtttcaatctattctttgtcaaacaaaagtgatttcactttacaggaataggggttctcaaatgtgtacattttatcccaaactgctatgagacaaaaattaaagtatttgtctttccaatgaccatatttaaggagaaaaacgtcattcagccttatacaaaattttgaactagttcctaatacatacatcaagaggtgacaaaatatgattatacctataacattcctattctgtaaataattcatataaatcctcaggctcaagatgaccagttattataattcctaaacctatgcagtaaacattatgtgatttatatttcatattctgagtaaaatgaagttaagagagagatgagaattagaagaggagactaggaaagaattagcggaaaaaaaagtaaaaaggacagatagtggcaagaaaatagtaaaaaaaaaaaaaaaaaaaaagtgaaaacaatgtgattaaggtaaccctctggcccccaaatcaatctaggaatacataggaggcaaccaaaaaaagtattattcttgaatcagtcacttggtaaaatataccacttccctggcaaagattacaatatttgaaagacaagtcaatctggtgtatcataaatccaagactaataaaagcaggcaagaaaatctacatcctttccagtcttaaatattgacatttaaatgttagaaaacttacatattgcagatcttattttcttgaagatgtgatcaatcccaacaagggattaagcacgggatacaaaagtcaacatataagatctatctattatagtgctatataccagcaatagttacaacatgtcatgtttttaagtgtgctagttatgagagcaacaaaaaaataacctaggatgaaatctagcaaaacatgtgcagaaccttcatggagaaaattctaagacttattaagagtcatttaaaaagatctaaataaataatgagctgtattttgttcatagttggaaagatccaatattgtaaagatgccaattctccccaagctgat

SEQ ID NO: 48992 - DNA, 2200 bp, Homo sapiens
acaggagcgtgtcaccacgcccagctaatttttgtataaaattcttccttgaccaccctctccacctcgaaaaaaagtaaagccttactaagcatgacactaatgcaaactcaatgcatacgctacacaaacatataactccttatttggagctaataatattccaagccaaggaaacctacaaataatttcgctatagtcataggagagtgtgaagatacaagatagcaacttgatatataactcacatcaagaaaactttcaccagcgtttaagggaaaggagttgtagatgtgggtcatttaatacccacttccaaattcactgaagtggacagcgccctacacacaaggtgagacctacaggcatcattgctttgaagctgcatttaagctctgaagctccaatatttatagaagacttttaaaactttgtaagaaatcacaaagttccccttctttaaaacagatcagtgctgggaaggctcaaaagtcactttcactcccttaccaaatcatcaaaaagcccggagtggcagggccgggagccgagcatctcgcgcgcagccccagcctgcacaggtgcggagctcgggggcggctgggggctctcgccccgccgcgcgcagcctggaggcggcccctgccctcttgcgcctcaccgccgaggcccatgtcccctgagccacggacacggttcaacagacacataaacacgtctcgcaaatgtggggacaaactgttccaccgttaggtatagggtggtttgcttggtggtcacggattctttctcaaaacgtgaagcttccaggagcactcctgtcttggcaaagcccctgcgctgccgatgaaccccccgggaggtgggatgcggccgctgagctgagcacgaccctctgccctcgccgtgaggtgatgctgagggaaccgccagcggcccggcccctctgccaagggcgaatttccgcgggccggcagcgagccaggcgcctcaggccccacggcgacctggcccgggctctgcccccagaccttccgccgtggctgggtgtgggtggcaaagccaaaacagccctctgaggaggggagcgacgccctcgcaccagccttctcagggcggcgacgccccgggttgctccccaccgggtcggagtccggggggtatgagggactcccactccccgcccccacccctctccgcagcgcgcctcccgcacctgcgccgccgcttccggccccgctggcctccgacactgcccgctgcgcccgcaaccacgggagcacgtccttcccgaggtcgaagtcggcgaccaggcgaagagccatcgcccggacacgaccaccgggcggctctggggccccgcaccgcgggcattcccggccccgcgtggccgcctcgccctcgcgtccccgctcccgccccctctttcctctcccccgccccctgctgctttcggttctgcagcgccctggcctgagaagctccggcaccagctcctcccggccggcggcccgcacctgagccggagccggagccgggcacggcgggtagcggtggggcggggtggaccaggcgccaggaccaggcccgccggggcgggaggcctccgcgcgcaccttcggggctgaggatagagggcgcaaagacgtgggcgcttcagggccttggcgaggccgctagcccagtggcttccaaacctggagggtcggcctattttctttattctacaagtgcctccactgtgcagcaaagtgtggaaaccacttggcttgagagagctgggtcctctggagcagttcagggtcaccacagaagtaggccgtctcttgggcctattcgccccagcttcgaggtggtggtgctttattagtgttattaaggtaatgagtagcaactgggagcgtatgacgaaggtgatcccattgtaagagaaacgctaaaaggggttaatgcgcttgatacaaacagcgtcctttttgccttttaactctagtacatctcatttgatgccttgagacatgaaaactgaatcttaagtctccacgcaaaccctctgcctcccaccagggtctaacagagcactctggaaggtgctcgacaattactgaagaatgagtgaatacagtaataaagaatgctttttcacatgcttccgaaattaaggtctgaaaactacttgtattgacgtcatctggggcac

SEQ ID NO: 48993 - DNA, 3035 bp, Homo sapiens
aggatccctagtgcacaggaattcgagatcagcctgggcaacctggtgagacccccttctctaccaaaaataaataaataaataaataataaatttttaaaatgtattagctgggcttggtgacgtagtgaggcaggaggatgccttgagcccaggagttcaaggctgcagcgagccgtgatcatagcactgcactttggcatgggagatagagcaagaccttagctctaaaaaaaaaaaaaaaaaaaaattaatagatttataaagtccattctatggaggaaagtctcttattcagttatgaactgctgcgaacctaaaggcaggaaggcaaattcccttcagttcggcaaacacgaagaccccacattcgcgtcgtctgtgaagaaggcactccgaacctcaggcgctcactcgccaggtttaagaggatgagcaaagaataaaagtcctctcacccaggaagcgtttcgcttcccttagctggagccacgctccaaggtgccaaagcctaattgctgtccactctcaccaatccgttagcaagatgagcatctacctgctgcgaacgtggcggtgacactactacagctcccagcctgcctcccgcccgcccccactcctggactccacagaccgtgacttgtagtcccagcccacggctggcggcggtgcgggactcctgaaaactgcttttcctccctagtaggcggtgagaccgcaaattccatcagaatcctactctgacccactagggcttggcccgctcagagtcgcattccctcctccaaatgaaccaactctcctcccagcgatactccgacctctgagcaccccgggcggggccacgccccggaaatggagtcaggtctccaggccgcccgctgaagtgccttccagccactccaagcggggctggggccggcggggcgggcttgggggcgtggccgggaggcgggcggggatgcatctgcgggcgcagcgcttggggcggagccgcagcgcgaggccgcgcatctgggtggcggcggggacgcgcccgtggggagaggcggctgcggctgcggctgcggctgctggcggggggtgggggggaggaggaaccgggaagggggggcagggcgagcggagagctagctgtgttcctgaggcggcggcggcggcggcggcggcggcggcgtctccgacggaggaggagggcggggaaggaggatggagcaagctgggggttggggttggcgctagcgcagcggctcgcctggtactgtgggagagcggcggctgctcctggaagttgtggtgtcgggagcccagccggtgccgccgcagccgccgcctagggcggtggggaggaggagggagccgcggggcttggcggggtcgggagggagggacgtgctgggggaacgagctggggaagacggagcgggctctgtgccgggcgggcgggcggcgggggggccagcgaccgcagccggggggacgcgggaggatggagcaagtggagatcctgaggaaattcatccagagggtccaggccatgaagagtcctgaccacaatggggaggacaacttcgcccgggacttcatggtgagtctctcccctcgctgtcgcgttttcttgccggcgccggagcccatcgccgcctctcccggccgggccgccagtgctttgtgtacctctgtgaggagaggggcggagggggcgcgcaccagccgggtgagccgggtggtctcggaggccagcgggaggcgagagcgcctccccccgtggcctcctttcttctcccatgttcgcgacccccgcgcgggttcccgggacgcgaagggagcggccgcgcggccgagcccgcagcctgcaccgtggctcgcgaccacctattgtttaccgggccgggagccgtaggcaagtgaggtgcaggccgggggggggggctcgcgtttccacacctccccgcgcagttcgctcctcccaggagggtcgaggcaaggtatctggctgtgaccgggaggagtgcagatcgtggctgacagaggaacgggggtattgaggttggcactaactcctgggatccctttgctctagctggtctcaaagcgggcagggtaggacttaggccgtttctggggtcgcagtcatgatctccaacgcttgggaaaggattgcccataaggaatctcatgggtttacctaatttccatttacccgcgtcccgcttctcctctcctgaggcccaggtttgaggtggtcttggggtccgtgtgactataggttcaggggataagtgtgggtgggggaattatcctgaaggaagccagccgacttcggactccccaggggatattgccgaaggcggaggggatgtgactatcacttcctatccggggtgggggtggggaacttgggaacaatagtcctggtggggcggaggcgacgctacgggccgaagccctgaactgggagataaccttcccagcgcccccccgcctccgccaccccctactttccgccctctgcttgtgcaggcagtcttgagaggaggtgaaggttaaaagtcttgttcatgaaattgctctagatacactattgctttagcacactgtgagggggtcagatccgaaggcgtgagaccagaagtcgacttcctacgttacccacccccccaacccccgccctttttatttttctgctggacaatgttccctctagggttgtttcccggcttaggaggcggtggttgcggctgctgctcctacggatattgcgcaagactggggcgttggaaaccctgtaggtctggggaatgaaaaaggaagtgggactttgggaagtggttgctccttagtcttggcgggggttgggaatgggaaataagctggggaaaatttttatcttgggtaaggtacacctcgaagaataatcacttaattctgaaatctgattatgagaaggatacacagttaatgcctgtaaaatgaatgggcagcaaacattggctagtttttattttttgtttaaaaagtacagtagtttt

SEQ ID NO: 48994 - DNA, 617 bp, Homo sapiens
agtaaaatgaatatgacatttaaaattctaacaattatttagtaacagcaaaggtaaatctaattcccaaatttcaagtgtccctaatattacctgttttgaagaaaagctgtgataccggcaacagtgtttaagtatcacacgggtagttaaaaggcaagttggtcctatctgacatgtggaaatggccagctcgttagaaggcagtacctggtgaagcctgtgaggaatgagcaggaagtcaaaatggttacgtaaacatttttcactcttcctcattaaagcccttaagttaacaaaaggtatttactgactcctcagcatgccaaggcagtcaagagcaacactttacacaatctggctctcacccattttagagagccctctccttttacggcacttcgtgtcccttatccttgaaccacaatgaacttctcataaacaataccacattgagtgtgtcattactctcatctctttccaaatgcttgttcctcagcctagaaagtctttccccatgttctttgcttactaatctcattatattattaattacattgtcacacagtgctgggcccattgtagacacttaatactgtttgactgtcatcagtaat

SEQ ID NO: 48995 - DNA, 1415 bp, Homo sapiens
gcaccactgcactccagcctgggcgtcagagacagattccgtctccaaaaaaaaaaaaaaaaaaaaattctgtctcaaaataaataagataatagaggcctcatgaagccttcagcctgctgccttctaccatgtgaggccaatatgttcctcccctcaggaggatgtggcccatatcaaacaaatgaacctgccagtgccgtgatcttgggctcccagcccctagaattgtgacaaaataaatttctgttctttataaaagacccagtttcggctggctatgctggctcatgtctgtaatcccagcactttgggagaccgtggtggtcagagtgtttgagcccaggagttctcgaccagcctgggcaacaacatggcgaaaccctgtctctacaaaaatacaaaaattagctaggtatggtggcaaatgccttagtcccagctactcgggaggctgaggtggggggaatgcttgagcccaggaggtcaaggctgcagcgagctgtgaagctgccactgcactgtagcctgggtgatagagctgagacctgacctcaaaaaaaaaaaaaaaaaaaagaaaaaagaaaaaaaaaaggtggagaagcagggtgtagggtaggtagggtagtatgctttcggtagagctgttacagagaatgaaatggaaaaggaagcaagagataaccagtgagtcaacaacaccaacgactgaaaagcaaaaaggaatggagatgagaaaaggcacgtcgcgttcaacaggtccaaggtccaagagtacctgaaacttgtcactcttccactgtttcttggctcagggaatggtaccactgccaagttttgctggttagaaatatagaaggtattcatgatatctgcctcccttatgttcattatccaaatcatcacataggcaacagccaaaggaaaaagcacgtcaagtagagagaatcacatatgcaatgtttctatgttgaaagacaacatggtgggttctggagattaaagacctgttagtttgaaatagaagaaggggatagttcatgaaaggtcttacaggacacattaaggattttgttttttgtcccgagagcaatgaaagccattgacttcaggtctgaagcaaggcaagagagatggtcagatccaggttttttcgttttcgttttttttttttttttgagacagagtctcattctgtcgcccaggctggagtgcagtggcgtgatcttggctcgctgcaacctccgtctcccagattcaagcgattctctaccacagcctcccgagtagctggactacaaggacgtgccaccatgcccagctaatttttgtatttttagtagagacaaagtttcaccatgttggctaggctggtctcaaactcctgacctcaggtgatctgcctgcctcggcct

SEQ ID NO: 48996 - DNA, 2290 bp, Homo sapiens
aataaacacaaaaattagccaagcatggtgccggacgcctgtagtccctgttactggggaggctgaggcaggagaatcgcttgaatctgggaggcggaggttgcggtgagccgagatcgcgccacggcactccagcctcgacaacagagcaaaactccgtcccaataaataaataaataaataaaataaaaatcttaagggtctagtcacaacagttcaaaagtctccaaagggagactctcaccttcaagcttgtaagtaatactaaagttctagatttgctggaagttatctccttcaatggattacagcacatgatctagcaataataacgtaccttgtcaccacatcgaatgattttgaacacttcccatcaatcgactaccgactaacaaaaagaaggacttgattcccggcaattttttctcttctgaactgagcattcccgaaatccagcttgctgaacgcgcagatgcagggtgagaggcaccccaggaaaaatggaagggaaagtggtacaagttaaaacagtcttcgtggccgcagagacgatcgctacctcggccatggcagatctgggggtccggggcgggggttcttccctgatacccaccgggcacgcgagttcacgccagcgacagtggaaagccctcccctcgcagcgcgctccgccactagccgcaccccgccgagctctgacctccgaagagggtccctgtggcgatcccgccccttcgtctgatgtttgtgcctttgattggctcttaggtggatccctcagcgtggcttgcccaatggagcaatgccggctggtggcctggccgctccgccccttccctacccctcgcggagggcccgccccctgccccgcgccggctagcggaggagagtaaatacaacaggagcgcaaaatggcggaaccgccgagccccgtgcactgtgtcgctgccgcggcccccaccgccaccgtctcggagaaagaaccgtttggcaagctgcaactctcctcccgggaccctccgggttctctgtccgccaagaaggtccggactgaggagaagaaggcaccgcggagagtgaacggagaagggggcagcggcgggaacagcaggcagctgcagccgccggcagcaccttcgcctcagagctatggcagccccgcgtcttggagctttgcccctctgtctgctgctccctccccgtcctcttctcggagcagtttctctttctccgctggcacggccgttccctcctcagcctccgcttccttgtctcagccggtgccgcgcaaactgctggtccctcctacgctgctgcacgctcagcctcaccatctcctcctgcccgccgccgccgccgctgcctcggctaacgccaagtcgcgcagacctaaggagaagcgggagaaggagaggaggaggcacggtctcggtggggcccgagaggccggcggggcctcccgggaggagaacggggaggtgaagccgctgccccgaggtgggtgccgtgcggggagggggaggggagggcgccgtgggtccccgccgccccctggcgcccacggggcccgggaagggggagcgcggcggccgcgtgcgccggcctggaggggctgggaggcgtccggttttcagcagaggattttgcagttcccaaggggacaggaaatggagcctgtaatttcggttgcagagagggggatggccgacactcttattttctgtatcgtttcttcctcccagttagtgcgctgcaggatttgtgaaaatccatcttgaggactctcctaggtttgtttggctagggagagagatggagggaacgggatgggggaagggtttggttttgtaaaagatgcttgattgattgttagaccacttagacgtggtcgcgggaattcgtatttgtgacacagcgttcaaccccggataatcctgtcaaaaaaggggtgtggagagagcactggcgtcagctggaagctaccagaggcctgagcttttcatccctattagggaaatgaggtagcgtgcagggcccgaagtgcgctgtttcgtaaggtaccctccctgcaccctactctccgctgcgtattcttaagtgttttgggtggtcctgtttgaaataccacccttctgaaagaattttcagccatattctttttttccctgcagcaaatgataaaaccaggagctttgacgatttttcgccagatcaagcggctgcagaatgtttgagcattagaaaaaggcgaattcttaagggttcttgtcagacagggtcagttttgttt

SEQ ID NO: 48997 - DNA, 1452 bp, Homo sapiens
ttgtgattgtttctttcatgctacatgcaatataaatgaatggctgtttcagaaatagaaacgttttggttttatttgaactggagggaaggagagcaagagatgggaaactgacataattcttgtgtagtgtgtacatgcgacatctcaggttctaattgtaatggcaaagctaagtggtgggccatgaaataacacctcttaacactttaggaaattaggttccatgtgtttatcagctctttgtaaactaagtactaaaggacttaagaagtacaggaaggattctactacaaatgtttaagacaaaggaatggcagtttagcattcctaaactaaattccaggaaaactcgcctgggaaattacacacccatattttagccatggctgtacttatctgggttgggcaagccctttaaactttctgggcttcagtttcatcatccataaaataacatgtttagacaatgtagccaaaggcccctctatttaatttatttttttgagacagcctcactctctgcccaggctggagtgtagtggtgtaatgtggagccctgacctccgtgggcttggatgatcctcccacgtcagcctcccaagtacctcggattacaggcacatgccatcatgcccagctaacttttgtattttttgtggaaatggggtttcaccatgttgctcaggctggtcttgaactcttggactcaagtgatcctcctgtcttggccttccaaagtgctgggattacaggtgtgagccactgtgcccaccaccacaggcccctttaaatagtttgtagccagattccttttttttttttttaaagcctcttgattttcaaaaagtatttcttattgtgaggtgctagggctatcccactgagagaggaatctctgagctgtgtggttaggttaattatttaatcagtaactcaaaggtcaatgctgcaaacctacactgaaattcagggtccaggtaagctgtggaatgtgacaagatttctgataccacataatctataggacatctcttcttttattacttctgtttgcttggtgtttttaccctatatgtacatatatctttttcttccctttctctttaaccttgttccattcctttttctcttttccttttaaactttttgttccttttctacttctctctagtagttacatcatggaattaggttgcatttattattggactatatttaaaaattaccaaatattacttaaatggttgcttcaagtttaattttcaaagcacatgaactaaatgcattatttctcctttcctttccttccccttccccttccctttccccttcccttccccttccccttccctttccccttcccttccccttccccttccctttccctttcccttcctttctttcgatggggtcctgctatgttgcccaggctagctttgaagtcctggg

SEQ ID NO: 48998 - DNA, 2136 bp, Homo sapiens
ttacgtcttcatcaatttgagcagtcgttatgtttcctactattctctccacaagaaagggggaggtgcgtactccaaaaatgtgctcaactaaaatgtttcccatttaaggtggttatttctggcactaggaagacagttaaatatttgttaatgattccttactcatttttaaaaccttcggagttacccctgtatggacatatatagagccccacccacatagcccacggctgggtatcagcccccatttcccttctctcgccactgccagtagtctaccaagtgaacctgcctcatcccaaagataattttgcttcatgagcccacatatttattcttcttcataatgagtcgcttttgaaaagcccgtgcagcaacagccttggccaaaggaacagcgttctgcttacaacttagctcatctgggggcctatttgcccctggaacttcaggacgctcctaaactatacttgcccttctgcaaacaccgacagtcggctcgcggcgccccaccgggacgctcccctttcatgggctgtaagcccagcacatgctggagtttaacacggttcctgctggatgcgcacagaagccctggagccaagcaggcgtgtgcgcgtttggggctggctgtgtgatgggttgagggtcggccgcacagcccacggaagcatcaggagaccagcgccggcgtacggtgcgggctagggcagagccccagactcacctggcagcgctgccggccggaaagcggagagggacgcgaagatcagcaaattcgccagtttggatccttgtccttttccgcccttttccccccattaaatccagaacccgtcacatgataattaagaaaaaacttcagttccgcctcctcaaacgactgcggtagaggatctctcagttctacctcagtgccgcgcccacatccggggctggttctcaccgcccctgagcctaccctataggtagagaggacgccaatctggattcagaggtcccttttccgcggtaattggaccatttgtccgccagtgcaaaccaaccgacctttccttactttcgggttcgacagaaaggcggcaataaaaagacccattggtcccgcctctctactgtcacgggttagtagggaagtcagtccaagatcagcctggagtttccgtgctcccattgggcccacagatgttaatcagagcagccggcgctcagctccgccctctcgggacgccccgcccctcctcccatcctccctgcccgcgcgcagtgactgcaggctccggcgcaaaatcctgcgggagagggggtggggcaaccctctggaggcagcgcgcccgcgggcagcctcgttgtggctccttgggctctgttggcggcggcgctagcttcggagtctcccgcgcgcacctcagccgcctcctagcggcgcggcgctcgctcctacggtaagagcggcatcacctccgcgctcgggtgggcagtgtggaggtcgtcgagttctgacagaatttcgaggatggatcgggacgagggaggagagcggtcgtcgggatggaggtgggggctccggggccaacgcgtcgccctccgtcgccggcgactttcccggcagtctcccgtacctgagggccggggtcagccgcgaccccttctcatcagtcggccggtggcggaggctcagccgccttcctcccgagctcgcgcggtcctcaagtcttgatggtgacgggccgaagcccagcgcgccacccgcccctcgggccccgcttccaggcccctgtcctttgcttccttcccttggcgctgtgctgaggggtcgtcgggtcctggaagggcgttcaggggtctcgggtggctagcccggctggcggggagatgtcagctagcggccggaggagcgggctcgggagggggcggcggctcgcgcgctggaggaggtggaaggagggtcgctgccctgccccctctgagcaggcggcagtcgagttttctgatcccaacacggcggagtgggtgcttaaggcatgggccttaagggatagttcccgtctggaaacaataccgtgctccatcagcatgcttcagcttttcttatttttatctgcccagtgttgacagccagcattctggtat

SEQ ID NO: 48999 - DNA, 2209 bp, Homo sapiens
ggcaaactgttccctaggatacaatttttaaaaccttttttttctaccactgaaaatgtacagaaatatgatttgatcacagaaagggcaataaaaatggcatcacaccaagaaactcactagatttctaagtcatcctgcaggaggcagggaacgctgctgctaacaccgaggatggatgccaagggtgagccatggaaacatgtcatgggtgaacggttccgaatgtgtcaaagaaaccctttaacccctgtctagatatgtcgagaacaatttatttacaacgctttagatcaattaaaagatataatcttgtctcagtttcagcttgctccgtgcagtttgatttttaaggcgatattccagtttgtgattgctcttaactttgtcctgtttcttgatataaagtttggatgacatccaagtccttcatgcagtggggaggaatatttttttttcttaaactaaagctacactgcactgtctctctgtgatgttcttcacgttattttggttcttccatagctgccaaagcccccacaagggaaccgggggctttaggatcagtttaggtctgcgcgttgatgcgatgccgcccaagcacaccggacacgtgggacttcacgtcgatgctcccaggccttggtgcctcgtggatctatgcgtgtgacagtgaaaataaattaaaacgccgtgagacggaacctaagaagaactgcctgcgccggggcgggcgggttggccgtggccgcgcggctcatctgctggcggccgaggcgccgggtttgaggacgctgggcagcttgtcagaacccggcaccttccagggccccggcgcgacggcggccttgcgcgccggggcgccccccgggggtcgcgggcccggccggggacccgcgcgcgcacccgccctgccctcggcctccagcgcgccgctgccgccgccgcccgggccggcaaacgccggcgcagcccccgggccttcgcgccggcagagctcggagcccgccgccgcacggggcgcctccttcccgcccgcccgcgccgcgtccgccgcgtctgccgccgcgagcccgggcgccctggcctccgaggcgggcctgccggcctcgggccgcccctggccgccgggcgcctcctcgagcctcggccgcgcggccctctgcggactcgccgagcgctccctctgctccccgaggcgctgcttcttctggccgcaggctgaaagctcctttggtttcctaacgtcgtgttcccgtttgatatcccaagttgggcctgggcttatctggtgggaagggtcggagggtggggctggatgtgatggagagaatggagcgaggccgtcgtccagggagacgcctacttccggcagacctggggcggcggcagcgggagaactccagggggcgggttcgtctgtggacgggaagcacaggcgttagcagtggcgcacgcaggacgtccccgtgccctctctacgccggggacaggggcaggcagctggggcgattgctctcaggggccggagccaccgccgcccccacccccacccccaccctcactgccgagagggcagcggccgcgcccccggggatttgggggttccctccgccccgcttagcccccacgccccgaacctcgtccgtggaccggggaggccaacgcgaagcccaggcctaatcccttcgccttggccctgctaacttccgggggtgttctcgggcctgatagtcctgtatagacagctcacttgacagcccttgaataaatgggtctccaactcgagtagaccttggaatcaccagggtggtggtgaaaaatacagattccccgggaggagcaggcccggaggtttcagcagcacggggcccaggaagtcctctgtatttttatcaggcacccattctgaaaaaggtggcctagcaggggtgtccaatcttttggcttctttgggctacattagaattgtcttgggctacacataaaatacactaacgatagctgatgggctcaaaaaaaaaaggtccatgcataaatctcataatcttttaagaaagtttacaaatttgtgttgggtcacattcaaagctggaggcgggttggacaagcttggtttagagccaagctttgagaaacactggtctgggttctctggaagttgggaagtgacgttctcaaccagtaggtgtcactcaaagcatattcc

SEQ ID NO: 49000 - DNA, 651 bp, Homo sapiens
atacaaatccattttgtattcccttcctccacgaatgctgaatccaaatcctttggctcctttctccatgtccacagtgaaataatcaaaatcctttggggttggggagaaaatggaataaataattatttagttatcagagaagcttctgtggctagtctctgtgttctccttctgtctcttagttaatgtattccaaatgacatgatgttgggagaagtcgtaatctggcttcataaactacccaaatgaaagacaaaattccaaaggtttgagcaggccagagcacagtttacttggtcatcaaagaattactgtgtagcttgtttactttggtattcatcagtttacttggcaaacgtggaatgattacagataggcctgagtgacatcatctctccttttacttctctcattcactgctattgagcaccataaataaatgtcaggtgtgtgtgtgtgtgtgtgtgtgtgtgtgtacaaattacagagtttgctgattagaaaagtaaaatttagtgggatctgataattagatctctcagttgcacagactattgaatatcaagttggaatgtacaaaatcaatttctcttttacctaaaatgcagtatgtccaagattctctgatcttcactattcttaaaatct

SEQ ID NO: 49001 - DNA, 577 bp, Homo sapiens
tctcgtggtgctcatggtgtgtcaggcaatccacgaagcatcatggctgccattcacagctttgtctcagttgcgtctgtaccacctcaagagacagggcagctcacacgtgagcaggagctcctttcaatagacaaggtcttgttctttctactttctactaaatgactcataaaagcattttggaattgggggaagaagtcatgcaaaaagaatttgtactttgcaacactttcttcactgagggcataacagattctaaatagaaagcagtggtacaaagcagggcaaagtctgcttaccagaaaagactcagtttgaaaataaaattttgcttccactcacatgcaggaaatgggccttggtatttcattcaccttttcattcagcctctgtgccctcatcttgacagcagatgggagtcaagggtatatgaagaggtaataccagcaccagagcagcaacaatggagccaattgcattagggtaaactgtcctataagacgtgactagagccctaggaataaatttcaagaagataacatgacatgaccactgagtgttctcttagcatttg

SEQ ID NO: 49002 - DNA, 978 bp, Homo sapiens
taggttaattaacaggcatgtgtgaatatatctatatgtatatctgtatgtgtatcaatatctctaatttatctaccatctatcaatattttgttaaaacgtacacaaacctttctttttatttattttttttaagacagggtcttgttctgtcatccaggctgtagtacagtggtgtgaccatagctcactgcagccctgatctcccggttcaagtgatctcctctcacgtcagcctcctgcgtagctgagactacagtgcaccactatgtccggctaattattttctttctttttcttttttgtttttttttttgaggcagggtctcactgtgctgcccaggctggtcttgaactcctgggctcaagcaatcctctcaccttggcctcccaaagtgctgagatcacaggagtcagccaccatgcccagccttatacaaactcttaacattaactttactgaatagaaagattataggcaatttttgttttcttattttccttatgttttattttttcccaagattactgcagttagaatgctttaaaataacaacaacaacaataaaaaaagataattaattttgtaaaatgacacaggttttaagactgggttaataggagggtggcgagggctattatcaatttaggtaacagagggtaaaacggcttagaagtaatatggtgtaatagagtgatatgcccttttgagcatgatgagtttaagccagctacttggtcatgtttggtgagtacttgaaacaaacacagcttgtgtaataatacctgtgcattgcaaaattttcaaacagaacaaacatatatgaaactgaaagcaacagttattcctctacccttgtcccaaactctctggacttcttccaaatagtcattgtattttcttgattattattacagaaaaaccacatatgtatccatatttattttacttattacaatacacatactttctgcaat

SEQ ID NO: 49003 - DNA, 723 bp, Homo sapiens
aatagattttcaagttatgcccattatctttggggagctgggattggaaactgtttatgagtcagataaaagaaaatggatacacttcaggatggcatgtgaaataaaattatattactatatttattgaatgctgtgtgtatgaaaaacagtgtttagcattataaaatcatattgaaatgattttaatagataatagacaaactgttatatttcatgaagacattgtcatggaaatattgacgttgccaacacacgtagctcaatattcccactgctcttatgaaatagattctgctctttctctctgaacaccaacatgcgttctcagtacagagacaggtcactcaaaacagaaggtgtatagcttctcttggagttttcccaggacagtgccctctggtgcaatctttggctatggaagcatgagcgagttcaatagtgcaataaacattcttcccttcctccacatcagtggcccaaatactaatttgtccaagaaattgcctgctggtgctgtaatttcaactccctcttcaactggcagaaaggtattcatgtccacaaacaaataaaagaacaaggacatatctattgagacagctgaacactaaacctctaattgcttaaagtaatttggaaacatttctggaatcataataccaagaagaacatgccttaaagaaattattaagtaaataaggacaatttgaattatttcta

SEQ ID NO: 49004 - DNA, 871 bp, Homo sapiens
agccaaaggtgcatttcgtaaaaatcttagtaacgtgttccaaaataaaaacatacaggtgaagttaatattaataataccttatatttcatcagggatatcaaagtaatcatttcaacatgtaatcgatataaaaatttcaatggattctttacattctattttttcatactgagtctttgaaatccagtataaatgttacactcacagcccaattcacgcaagctacatttgaagtgctcaatagctatatggccactggctctcatactggacagcacaggtgtatataggccttaatagacccaatactgcctcatttccttcgcttgccatgaaggcttcttggggagtactgtgaactcaatgactcatcctcctttgcatttgtttacttaactggaatgtgcctggtttcagccagcagcatgtcagttcagttaagatgacacattttctcctggcttcctaattctccagcttttgctgtacttaacctctttgctgctctttgaccagtattgatcactccctctgcctcaaaactcttccctctggatttctgtgaattcactccatctccatgattctacttagactcctcccctcttacaccgaaaaggtagcccacagccaccttctttttgctctcttttctgggattgctaaacttcacctatcatctatacactgaggaaagcaaaatcaaatgccctccagacctttgacataaaatcacctctatatattcaggtgccaaaagttcatttggatacatagttaaaacatcatttataaaatgtcaacaccacaacacacaccacttcatattaatcatcagtaggttgaggaaacatttattttcttaaaa

SEQ ID NO: 49005 - DNA, 891 bp, Homo sapiens
acaaaacttagaaactactcaaagtgatgcccccaattcaccacatatattcagcttattatacaaccccgcaggagttctgcttgccttcctaaccatactaattcttaagtgtattttgtttcaacctcacttttctcaatgtcaacattattcatctcttctgtgatcaatgtgaaagttaaaaaaacaaataaagcactgagcatttcagaccaggcaattaaacatgtggtttctctaggcacatattacagcatcagcatttgcagctcaagaagccactgatgagtcaggctaaaataaagtcttcaacggagctgacactttattttgcatctacgccaccaagattacatcatcatggtgaaattcatggtccactaatatttagttaagaactccaaagttcaggcatttttattcaaaccataaaaatccagaggatgccagcctttactctgacatcatatgaacttggacatttctgttgcactatttctttttacagcattaaattcacagtaacgttaatgtgaatctgtgaaaactcaatgccatgacttcaagttatgagaaagcttctaaataaatgaagggatgttttgtttatcattcataatctcaagagtggctgtgtgaagtatttaataaagtcaaatataatatgcacaaaatccaataaaattaaaacaaagaacaaaatgtaacaacaccagatagaacaacaaaaatattcctttgggtaccgtggactgtgttagcactttgagaaatacaaaagaagtaaatgtcacaatgctattacaataaatctgtttgacattattactgtaatcacagctgatttgcaggcaaatgactatctgttttgtttacctatatattctt

SEQ ID NO: 49006 - DNA, 1183 bp, Homo sapiens
ccaataaagaaaatctcttattttaagtaaatttctaaggggtcttttgatagtggagatccatggtaatgtcatcctgcctccatcattagtagccaaactctcttagatgagatgtcgatgagtaattgactcagcatcctagctttccacagagctcatactcttttgaatcacagaaggtatagattacacactgctaaagtatttaatgtgtaacttaaaacagaaacagatactttttcacaacagtttcagtgtaaggacaaaaatgatagtaaaaaaactaggaaatatcataatttagatgagttatgagcaaaaatgcatttcagaacaaagtagggcatcgttatgcctgattttggggaaaaaaatactttatgcaaactgagtctcataatggataaggtaaatagtgatcacattgtcaaaaatctaccacagcataatatagtgaactctaaatatattcagaaagaaattataccaattgtttcaaagtattttttcaaagatggagctgtaggtaaaaatgactgtacttacaatgtttattagttatggacagaggttcttaaagtgtgcgacggtcaatcttatgtattaacttgactgggccatggggtccccagctatttggtcaagcattattctgggtgtttctgcaaaaaattaacatttaatttgatatactgaataaagcaagttgctctccttaatgtcgtgggcctcattcaattagtagaaagcctaaatagaattaaaatgatgacctacttcaaaaaagggagacttcctcctgcctgcttgccttcaaactggaacattgttttttctgcattcagacttgaattgaagcatcagctcttcctggctttcaagcttcctggcctttggactggaacataacatcagtgttcctgggtctccacattgttgactgatcctgcagatctcaggatataacagctttcagaactgtatgagcaaattccttgtaactatcagttaatcttagtttcctggtggttttgtttctttgtagaaccttaatgtgtctcaaataagtcaactgttacagagaaagagaacttttgacatttattcattcaatgaatgttttcaaaaacattctacatattttaaggcattatgccaggtattagggaaacaaatatga

SEQ ID NO: 49007 - DNA, 3252 bp, Homo sapiens
acaagttttttagagaataatttaacagtgcggtacatctccgtaaaagcatttcttagtagttgatcatgattaagcggcaaaatgcaggtaatgacatgctcaattccacctttgagtcaggacaaacagtgtacatcgacgacaacaacaaacccttatgctaatatgcctgtgacgcaaatatccatacataccgcacacgaattgtgcagtgagctaaaaaagaaaacagaaaagaaaaaagctactactttattctacttaaagttgtcctctattcaaacttttatctcactcttctctccttctgcaccataattttctttcgagcaaagacagggagttctggatgattccaatctccccaaatccacatcacagcctccaattgaggttcatttaagtcaggttggagctgagggagcctgggctggaaccggccagggtttcatccagctcctcccccaaaacacgccccccaaatcggagccagaggagagcccaaccacagaggacttccactcaatgagggcaacccctgagtaaagtccatgcggacaaccattcatctcctccgacaaccattcatctcctccgacccccgcccagcactagactgcgctcctagcaccgcgccttcttccggagcctcctcccccgggctggctaggggtgagcgcaggggttagtcagtacgcacgtgacgcgcgatgcccacatgacacgaccgtgagcgggggagggggacacggagtgaagaaggggaaaagttacagaagacccgtcaaagcgcccaaagcaatttgtcccttcttttcttcgccagcggtggctcacggatccctaagggacagctggggacccaggcgcccccagcccagccccagaaacgctggacgcagttctccgctcaccccaccaccttctcttcccagacccgctggtgatgccgctgcaccctgaagttgctccttccttctttccctcccttcctcccattctttctttcttttcttccttcctcccttccccaaaagctcttcatccgcttcgggtgatgccactgacgcacattcaatttgccccagcagctctgaggaggtcagaccaggccgagcaccttccaaaggggagggtctaactgagcaaacaaagttgcacgccacaccacaacctgcccctcccctccctttagcccccaagtcgaatccccggcgaaactcacttgcactgcgggtgctctctggcccccaccccatcatcgcgcaacacacccccttcaacatgcgcggccaccctttcattgccctgcgccccgagcggtcccaccgcccggcaaaacactgagcaagccgctgctctcaccttgcttgacacacttgagccggagggggtccttgcagtgtttgatcacggccagcacgtccctgatggtgagccccgccacgggggtctcgttcacctccagcagcagctcctccgacaccaatttgctgccgctctcataggccaccttgccgggcttcacctcccccaggtaggggaactgtccattctcggcgccccccttcagttcaaagcccagctggccctccgggttcctgccaatgacactctcatggactttgctagtccagtggcttttctttttcaagcttttggacatggcagtggggcgagtcgcctcagttcctgggctccttggggttaggggggctggtggtgagagaatgaggatggaggagcaagggggcccagggggaagaacagcagactttgccttcgcccccctctattcggtgctttccctcttctttggatggagtgtggacgaggaatggggaggatgagagggacggctgggcagaggtaggagagcttggatgaggttgtgctgtcccttgaatgacactcaaggctgtggccccgcagcagaggaagcagtggtggtggcgtcggcggcggcggcggcggcagccggagcgagcagtagccgagctggtgagcgggtgtggtgggggtggggaaggagggtagggatgccgggggccactcctgcgtggtgcgagtgggaacgcgcgcgcgcgcctgggtgtgtgttgttagctgatatccatggcagctgcagtggcagggtgcgtgtgcgtgtgtgtgtgtgtgtgtgtgtgtactagttctactgtactggcagacgggaggaggcaggggaggaggggcgcgcgcgccgggtggggagccacggagggcttcgccgctgcctccctccctccctccgcagcttgacccggtagtgaaggcagagagagaggcaggctgggtccgcctggcagcctacgggaggaggcgggagccgggaaggaggggagcctaggcccggcgtggggaggccggcaggaagggcctcgagcccagtgcggacctttcttcagcctctgtgcgaccgagccgcgcgccaggctcctgtgcgaggaggacgcgctgactccctccgacctgggctccgatggagcagaaatagcgggacctggacttgtggcgcgcctggtgccacatctcgggctctgcgagcgtcctggcgcgggatcctgccgtgagaaggagttggggcgggggacccggcggggcattgcgggagaaggcctgggatccctgggagccttgtagcgtgggggagttcactgtgtagagaggtttcatgtcttcatctatatagtcacttatttgtcttaaagttctcgaaattccctcttagagaaggagaaagttagagaactggaggctgcgtaccctgattacgcagaagggaagcagcctcgcattccccggggcaggcccccgcccgcgcgtcccgccagtaggggaatttagcggacggctgcggttgtctggtgaaaggctatccaaggataaggggcttcacttttcccaagtaggggaaagagaaggggtctacagggctaggggtggagggagcggatgcagtgagcagcctccgcagagaaattgacaatttaaccagggacctgcggcagagacaaggcggagacactcccttgcccaggaaagccgccagagtccggcttgtacctggggaagaatccttaagacggtctggcccaacactcctttgctcacagagaaaggggagaagactcccgagggtgaaaatggtacattcggagctggaactcagctcgctgaccccaagcagtgttcccttcttttcgccaggtttgcatccaagagagg

SEQ ID NO: 49008 - DNA, 642 bp, Homo sapiens
gaatgtaattctaatcatactcttttaataatgttgcaaaactctccaaacactactctgtgtggatgtctttcagaatatgatgaatactagtagtcttattctgcccttttctctctatcacaatatatacattctatattgcatacacatattttccaaatattacatataatttcatgtaatttatagacctattaaggcccaaccattttcttggataggggattctttagaagtccagcttaaataaagcccgtatagaaagtttttttaaaatttatacataatcacctaaagtaaccttatctactgaactcttagtacatgctactggaaccttttatcatgtttcttcctggcttgcattacaacactgttgacatatctcagccttacttctaggcttctttgagagcatgactcatgtttgtattcctcactgaggttgaatgaataagagaaactacagtagtaggaaaaaacagtacatgtacatatcaatgaatatgaaagggtcaaatggatctattatagtaagcacaaaatcaactgacaccagcaaagtaaacccaaaatttttaatggtattttaatagatcaagaggagcaagcagatttttgagacagttgtctcctact

SEQ ID NO: 49009 - DNA, 3256 bp, Homo sapiens
ttccaatttttagtacatcaaggaccatgtttttccttgctaccagccccattttctaatcagttaacgcttcctgtgatatctgtaggggaaaggtgtagtgcaactgacagggagagatgagatcttaagcctctgctcattcattgggtgctgagtagcaatgcctcccgcgggccacaggaacttatctccgccgattgttacagctggaaggatggggagatagcaccatagatccactcctcattttatgggcaaagaagctaaggcctgtaaaaatggcatgcccaatggtacaggagttacaaacacggtcataaatattggctccaaatttggcatggaagcttatgtgctgctctagaggagatctgctacgatgtggagattggcttgtgtgggtgtgttttattgctcttgtcatttaaaaatacttttgattatttgtcttccattttttttaggttacgaggaaatccttcaaaatgcgttcttgtgaaaaacgtgagagtgcaaggaaagagggagggataggaagaaggaaagagaagcaaaaggtaggaagaaagtgaccttggtgcccttttctagtcccctcccccgactttcctgttctccactgtgcccatctctggtttcaccaggctccattccttccccagttccctgtttctcacggccctgaaaccagccgacagggatttgcattttgaaaaaccttgcgtggctgccggcgctgggcatgctcaaacgcccagaactggcttttttcggcaactttggcagctctcccacccccacccgaaggggcaggtacgcacagctccctccgtgtgagtaaacggaaagaaattaccccactcccgcccagggcagaaggccacagccccgcggggcagtggcgcgccccggggacgctgccagggggcgccaggccctcagtggtggcgcggcgccggggtccggggccggggggcgctgtccgagggcacgtgcgcgggcgcgcgctctgggagtggtcgcggggtggtgggaggggcgggcaggggcggggccgcggcggcgcgcggaggccgagctcggctgggcttggcgaggctgcggcgcggccaccggcgggagtgcagcggccactgtacccagagattcaaaaccccaaacccgggacttgggggcgctgagccgggccgggaagcagagcctggtcgtgaggaacagccgcccgttgctgtctgcccctttgcggacagcgtctccctcgactccgcttaggaagtggtgggggcggcgtggcccccgtcgggaggcgttcgaacgcccgctaggagagagaaaggattcccctgtgcttggagcccgcactcgggcgcggagggagcggcggcaggctctcgctttcggcaccatgggctgcacgctgagcgccgaggacaaggcggcggtggagcggagtaagatgatcgaccgcaacctccgtgaggacggcgagaaggcggcgcgcgaggtcaagctgctgctgctcggtaagggcggccgggtcggggcccgggggtcggcgggggaccgggtgcggcgctgcgcggccctcggcgtttggaaacccggagggaagggggaggaagcgcccgaggaggcttctgagcgggagctgggtccggcggtgcggaggcaaggcgggtccccctctcccggtgtctggtctctctccgccccggcgggcgaggactccccgcggcggggcgggcgcgtcacttcactcggatgctttcgtgcgacccagcaaagagcccaggcgcgagtccgaggcggcgggtcgcgtggaaaccctttgctttgaagtttagctcagccttgtaaagatgaaggggcattcgcggctagaaaatgaaaacacccccccccccgcgccaccaaccccctcccggaaaacccttcttcgtgtgcggtgtaggttgtgtttcgactgtggttttctcatgcccagagtgccacgtttggtgaaatcagtgcaccttttgtggggcctctgagatggggctgaagcgtctttcctgttaacttcctatggcgactccttaagtggtcaaggagcgctgattacattccccctgcgctgagaaaaggctgcgctggatgcttgatttttcttgctgtgggggcatggaagccacccaagtggggttgggaagctttgctttagtagtaggcaaggcagatactcgagtggtgaaaactgctgtgaaagagcgagagggtcacgccagacaacagggttctgtctccgctgccaccgtttctgatgaatgagatttgccaggtacacgcaaggcttttatttgttcttagcactgttctgttcgtgaaacgctacgtggaggtcttttccaaatgtttgacggggaagaaaataaagagtaaaccagggttttcactgagggaagcattaggaaaatctttacaggttaagattcgtgagttagggttttcttttgtttgcatgttttcttctcacactctaggtatttagatagatgaaaaatttctcagaatcttcatttgcatttccaaggactgcttgtatttttataccagttataataaaaaagaaatgttgcacaaacctgttttcagtaagcttctgtttcattggtttaatgactgcagaaaaaatggtgggttttttttctccattactagtaggcttgggagcagcaaagttggcatgactaaaagtaataatgatctgagtcattttgcaagtaaactgtgaaataactttgcattttaaagacctgggtggcttttttcaccctgtcgcccccaacataaatctttctcagttaatgttgtttgcctaagtttttacattaataagaaatactgtgttttgatgaggttagtgtatgtacttctcttgtgaattgaatgtgagatagatatgaaataagaggattaagaagtttttttcttgcagtttttgctctcctggtgtgatacgttgtttcagtgtatttctgtgtgactcttagtttgagccagccatccaccatgtttaaagcaattgaaaaatgaatcatctggtggtggtgttttgtcctttaattaggtgactgttagggatggactagaataaaggtcccaggagtaggcttttgcttatgttcagaagagatcagtgtgtcttgatcttagcacggttggcatttggggctgggtaattctttgttctccaggttgtttttgtgcattgtag

SEQ ID NO: 49010 - DNA, 754 bp, Homo sapiens
taagtttacagtcattggacttgaaataatcgtgctgcttccccatcacttcagctcttctgatctgtaggtggtgcatacaacatgatttcccattgcttttaaaagggaattctgatcttagaaaactacccttcatgtttagtgataagtaattgcaaaataagaactatttggtgattaaacagcatgtgttctatagcttctactttcatcataatatcatttgctggttgggcttagttgcagttacgacatctggttcttatgaaacgtgtaaattcattcaacaaatatttatagaatgccagttctatggcctgcattttctaaatatgtgggaatggaagtctttgggaagctgataaagtacataacacattattggaacatttcaccattaggtaaaaccatgtgttttttgttgctgttgttgttgtttagttatgtttaaatataaaaactgggctgtggattctttctctcatttgtcttgataggcctttgtagtaaatcatcttaaagatgttttagatgaatgcagtttataggtcaggttgagttttactgctttttgccaaaaactatttcagactttcagagctaagcactaagtaaatggactccacagtaatttatactgtgcacatggtgatgcttggaattttagaactaattctctggaaggttgtcaactgacaaatgtccattgtagaattagcagtcccatctgaaataacttaaactgtaattt

SEQ ID NO: 49011 - DNA, 1228 bp, Homo sapiens
atccagggtactgcagtgttttaattctcaagctggatgctggacacacagatgtttattatcttattttctagatatttttatgtgactgaaatatttcgtaaataaacagaacttttgttattgtaggctaattcatctcaattttggcatgtttttctgtgatttcacatccggttatttcccaagccttatttactccttattgcattgcattgtccatccatcatccgccgtttttccatttttacacaagttattcttttgtaatgtcctcctacctggtcttcctccctatgtgcttcccacccttcagtctatatcagtcctccagaatgacagctttgatggtatcagtaactggccagaagtcgtcagtagctctgtttatttacagaatattgttctcttcattagcatggaattcaggagcctctgtggtttggcttccaccctgcatttccatatttcccatgcttctcccttgccacagtatgagaacttcccctgctttcccatcttgatatccttgcttatgttcctctttcagggagtgcccttccacccttacctgtttccagtcctgcccaggcatgttcatgagcagagtttgggagaacttttttcaaagttgagtaatatctggatccctaataaaacagttcttatggattcctaatattgatttaaatgtattgcaaaatcacttcaatatacaaaactatgaaaacatataattaagtagaaaaatgtttctcacttctagataaccacaaagccaaaaaaaaaaaattacacacaaaaccacaaaccaatagagttctcattaacatgacttgttctctcctggttgtgatgtcagtcagctataaactgctttcacatgtggtatgcctactatcaaatgccacaagatgtctcagttcttcccttctctttctctaattgcaaagtcctcattcctggggtgctcccacccccagtggaataaatgcctcaatgaagcatcatcatgaatgaaaaggctcagtagtgttccccaccaagtggctgcatttctacatgaaaaaaatacatctgcctctaactttcaaactgcctaagtgcagatttatttaataaatattacctattgtctgctacagactgtgtcaaaggttgtgtggatccaaacatgtatcatacatggatcctgcccttgaggagtttcgtggcaaaagaaaccaag

SEQ ID NO: 49012 - DNA, 557 bp, Homo sapiens
cagttctctcattttgtaatgtatcatgattttactttttatgcaaacctaccctatctgaatttcatttgcttgccctacattttcttacctgaaatggtttcttctttacatcaaagccttgcttattatttctgagttaaaacgacatgttttagtaggaggaggggtctctgttctctgccttcaatgttccgtgactgtggcaaatggaatatttactctttgatctctgcattccccagttgcttcatgtgacttctcagtgtttacacatagtgcagtccattcatttgtatttgctttaatgttctaagtgttctcatgtgtgttaatgtctcgtttttttgaggttatttttgtttttgcttttttttttttttttagagataccctcccttcaatcaaaaattttaaaaactagcaggtttttttccccttttgagaagtccagtttgtgacatttttttctcccataaagtccttctctccttccttttcatcagacatttccacaactattcagagctttttttgttagcattaaagaacttctc

SEQ ID NO: 49013 - DNA, 572 bp, Homo sapiens
tacatataactaatttcaaatgtaattatcacactatgttaaaattacttttttcccttagataattcaaatttctccacttgcttgagattatatcatttctttttcaattatactattatttctgagaatgaaatggacgattacacttagaaaatgagtaatagtgtttaataagtcagtgattatatgtgtgctcaaataagtgttatgtatcagctagatactgagctttgatagaataattttcttttgattattcatgatgtgtcatctctgaccttgtttcagcaaagtaaacagcactccccaccccaccctcctttttttactcatcttggaaaaggttagtctttcagtacacgttgctggtaagtagtttccaagttacgtgttgtcactgggttgaagtatatttgtgtgtgtgtgtgtgtgtgtgtgtgtgtgtgtaaccataaactatattcatatctgtttcatttggaggattttcttctttgtaatgtaaagaaattcaaagttatcaaagttccttaaatgtgttagtttagattctttatgtgcctttcatg

SEQ ID NO: 49014 - DNA, 543 bp, Homo sapiens
gttggccaggatggtcttgatcacctgaccttgtgatctgaccgcctcggcctcccaaagtgctgggattacagacgtgagccactgcgcccagccagttttcttttttagttcttttcaaaaccctttcttaacagttgaaatgcatttatataaagaagtttacgtttcacaatcccactggcctgtttcccaggcatttttttaaaccaattactgtttgctttggtgtctgttgtgatttctcttatttagttggattttgtagttactttaaaagttacgaaatttcacatttcatcaagtccagaggccagagacacccaaatatgcacagacaggaatcagctgcaattgtccaagccagagctgattaggcctcaactggaatagtcccaccatgtaataaatcttcctgagtattgtgtataaggtcaaatatttccagcttctttgattttactgcccgtcttcctaggtctccatccgtaaagtggatggaaacactgtcattgaaggagctagttcttcaaatttaatttt

SEQ ID NO: 49015 - DNA, 1251 bp, Homo sapiens
caatacactttccattatttcattttctctttttaactcctgtcatctctactaagattgaaacctgccttaattcaatttctgctccctaaacaggcatcctgacggtcatttacatattggagaataagacttttttcaaaaattgcagctctagtaatatttctatcttactaaaacatcttaaatgtgttgccttaaagttctgaacctgatgttcaaaggcctcttcaaaataatgtcaatgtttattttttcaacatttatcagcattgccctcttaaatttctgaagatatatttattacattcacagtatgatttgatagtaaagtggaatttaaaatggatttttacctcatacaagtaatgtttttcagaaaacagagaggatatcacccttttaaatgttctacagtaatatgttaatctgctcacaatgtttaacacactaatcccagtaagggaaatcagaaaactgtttttttaacctgctgctgacctattgtactctcttgtgcaagtctgcctgttcttgtttgctttcctgtaaaacagtaatcataaaatgtttaattcttgactatcaacaggtgaattatattcattgtggataaccttgatttaaaatccttgttggcttaattacacagagtagtgggaactatctttagctgaaattatatactaactcttacttactttcactctttctccaagcaatttactgcccagcaagaagcactttttatgaaaaaataatattttcatatttccagaaatctctgaacaattatttcttagtaatatttttaagctgatacatttttcttactttgagaggccatgcttgttatctctagctcagtgtgaggagtaaggatgagaggtgtcaagaaaaaaaattaagtaatgttttctcatctaatcaataattttattttttgaaacagaagtgccttgatacttaatggtggacctatcaaactatacatatttacctgggatcatttcaaatttagtttgaatgtggattacagctttcctatttctgtaaccttggttatattacttaatctctctcaacctctgtacgctcatgtgtaaagtgagtattatacatttttgttttgtacacaaagtaccttaaataatgactatagagcacttagcattgttggagaaaccttgaacaaacattccttaagtaccaactgttactatttgcttaataaattaaaagtccaggcca

SEQ ID NO: 49016 - DNA, 1796 bp, Homo sapiens
tctgtaatcctagcattttgggaggccgagagggacagatcacttgaggccaagagttcgagaccagcctggccaatatgttaaaaccccctctctactaaaaacactaaaattagctggacatggtggtgtgtgcctgtggttccagctactcaggaggctgaggcacaaaaatcactttaatccaggaggtagaggttgcagtaaagccaagatcagaacacttcactgcagcctgggtaacagagcaagactcttcttaaaaacaaaacaaaacaaaacaaaaaaaaacaagagtaaaattatgaagacccgtagaagtacatacaggcgaatgaacttctattccgtgaagtttgagaaccttgtcttaagaagtgaactctaacctaagatttgaagaatgagtaggcgccaacagggcttgtaggggagagggcagtcctggcacataatcctgcaagtggactttgatcctgcaaaggacagaacatgtgaaatcagggccactttccctgagtaactgcactcctgaaactttattttaacccagaaattatctcagcttctaggagttttaaaaaataaaatttaactattacttttaggcaaccagctatgcagggaatgtagacctatattgacaaggatattgaagtttgggacatttccacgtcccagtggaggtcactatggaaaatatggactcatcatttattaatttatgaaatactttttaattctcttacgtaggtgagatactatgggtatgaatgaatgccactttattcctttcaaaatcacctttattatttttgttatgatttttgggagctaacatatattggcccattttatgtgttcaattcagtgatgtttggtaacttaccaagtttttacattattctttaataaaatgtttatacattaattcattttccctcccttggatgacacgagatgttctaccaggcttaacaatgaaatgttgcccttgtgaaatctttcctaggggcaacattagatatctggttcttttccccaggaataaataacacttttaagccttcaatttaaacctaaaatgaaaaggaaatcacaatttttaaacataaaagtcatattttaaatgttcattaaaaatcttttgcataccattcctcttcctcattttagtaagagttaagacaagcttactctggtatcagttttcaaaagaaattgccgagtcacaagctgaggttatgttggtctgtggtggttgtttaatctactctgttcgttcataggtaagaaaaactaccacctaaaataaacgactgttcaatgtctcacagcggattggtgctcaaactgggatttaaaattaagtcctcaaacatagcccacgcttccctacagtgactgtgtcacccatcctaggagggaaaatatagttcaggggaactttttgccacagatttacaatgaaataccggcttagtgatttgctgttggagtctaagtttattgaagccttctaggagtgcagagtccaaagtataactgcatatgtgcttccactactattttaaggtaaagaacatcctaggaaaaacagcaaagcagcatggctgtggctttagatcatcaagcagttgtaggggagaaaagcaatatcttttcctcatctgtagctaggttcaaggctgaaacccctataacaaaagacagggtagcaagagaaaggcatgcaaatttagtagaagatttatgtgacacaggagtcttcagaaattaagacccaaagaagcagg

SEQ ID NO: 49017 - DNA, 807 bp, Homo sapiens
tcctttctttaaccaaagaccaacaggaacacacctgtagtgaaacaagttcattactcattgaaaagagaggaaagtgtaccatagggaactgacagtgacccggtaagaagatgttaggaaaaatctattctagaatttggacttcggttggttggttggggagggtcgaggaggtgatactgaaggaaatagagatttgctctgaattagatgttgtcaggaggcaggataattttatgattgggtgtcttaatcttggaggagggaagactagactgaagctaaagctgtaattgataaagaagcagagtcactcatagtaagtgagaagggaatgtgtagtatctgtggcttggacagtgttgataatcgttttgggttcagacataaaaggtctcattttgtcttgactcatcatgatcacagaatgattttatctaaagtaaatgctctatgaattgtttgtgttcagcagaacaaacaccaaggccaagcagtgagtgctgggcctgtgcccagaaacagcaagacctagctaataatatcagcccagctcctgggtgatgggctgttttctctttacagtacaaagttctttgttacttcagtaattaaacgtgcacacctgaaatccaatttccactactttgatgattgttgaaatgagattcttttgaatgtccttcttaagttctataatatgctcaatacactgagtcctgtaatataaaatatcattcctgttatgctagcaacctgaaaaatcacaggagatcagtccctgtataaaaatgataatgtgca

SEQ ID NO: 49018 - DNA, 388 bp, Homo sapiens
aaggtaggtagactttataggttatcccatttaacaagaaaggacaacaggaatacaatgattattacgtcttgcctagttcacaaatcctattgctaataaaggaatcacacgggccatgtgattcctcttccagaactcttgttacccatctgtcatttgcttctcaaatatgttgcaatatttgttactcaacttactgtactcttcctcttttatttcacaagtgttacattccatgaatcagcttgtccaaaagtactgttaaaaggattttttttaactatacaaatgctaaaagaaagtttattttttttttagtatgctcaaagtggataaaggctttcaaagcatgatacaatcctcaaaaggaaatgactcaaagttt

SEQ ID NO: 49019 - DNA, 938 bp, Homo sapiens
cattaagaaaagaattctcttatctcctctggagcaattttgcctttgaaggcactgtaatactcaacttgaaactctccgcaggtgtcaccgcctaaagaaacaactcgagcagggctctcagcaaggggaaagcttccctgacaaaccgcgtgtgttcttaagaaaatgtccaggcttgagcataccaatgtatgaaaaatcaatatacaggccaaaaaagttatactttgctaaatctgtaatgcggaaaatgaccaatttagcttaccgaggttgaaagaaatcagcacggaaaagtcatcagtttgctaccggggttggatgcgcttgtgtctccagtccttttcccagacgaccttattttctagcacgtcgcaaaggtgaaattctttcttcccggtcctctgagtttctttgtaaaggaatctcagcgctgcagtgccgcggcacccggagctcttctccgcgtcgctcaatcaagcacctcggagtgaatggaaagtggccggaggccgggggcgagcgctcttggtgtccgattacagcgccgcggcgcgcggctccggctgccccggcgcgccgccctgcaggctcgcatcaccaccgcgcagccccggccgcatctccgccagccgcgaggccccaccccgagcgcgcccgcgagagcctggcagggagccgcgggggcggaccgggcggggccgacccttagagctcgcggctggccagacgcaagaatgcgcggccgcaggctggagccctagctccgcaaccctgctcctttcgcagtccgcggcggagtgagcaacttgctgggtgcgctccacggtttttgttgccggcggctctcgaagacttacacaggctttgcctggccgtaaatatcaaagtgcaaagcagttgtggttttttatttttgccagggaaggatcact

SEQ ID NO: 49020 - DNA, 1640 bp, Homo sapiens
tctggatcaaaagtaacctcttagggaatgtgcatttcaaggccctgtcttaccccaaactggaatttttggcccgaggaaaatagcaaattatctcacttagggacagctggtgtcctcacggaggtttaaatttaacttagcagctagaagctagtcatctttagattcagaaatacgaattcattgcaataaggagttcaccaagggcaggccgaaaggacaaagcaaagacaagtacagtcttatttcagtgccataaaggaattgtcatatgagccttgacacacaaattccacaactgaagatcatgcaactattgcccaataaatttaaacagagtgattgcacttagccttaattgtccagtttctgtttttgaaaaaaaggcaatgagtaacacaatgtttcataaccaggaaagaagtttttgaatttctttatatcacagatagtgaacacaatctaaaaataaatattaaataatcaaaatcccaatgtaaaatatatatctatctgtatatattatcacatggagggaaaatttgcaccactaatataaatgctatttattaggcattgcttttctatagattttcatccactctttcattcttctgctctattccttggtcaccttccttccatctcttttctttccccttttttccatcttcaatttagtgtttgtttcttaagaaacaagtttacatatttcttagttctctgtcaacagaacctttctcacttttcaactgcaaaaatcaaggtatttttctaaagaatccatcaaaataggagttctaatgtccactgattaaataataattcttcgcaaggtgcttcaaatgcattgacatatttgagaaagctattgcagacagatagcaaatttattcccctcttaatatgttagtactaacaaacaactcaagtcagtttgtacaatcagattgctatttagaagtttcagttctaactaaaaggctgtttttcatcttcaccaaacactggctagtcagcaactcctgccagcattctcatagctgccccagacagccagttgcaggaactctggctgagtcatgtctctgctcagctactcagtaatgaaatatccctagggacattcctaagacatgtcagagatgtgtttctagtctccacctatttctttgtcgtgccccaagctgtgcccacattagtggaatttccagtgcattgccatgctcagtaggccaaagagaaaagtctgcagaattgctacttaatattacttaataaatcagtaacagaagcaatgaatggaatggaatgcaaaattcttggctcttagccttagatagaaccacttccttcctatgagcaaatagtggttcataggttagcttggggagggctacttcaaagggatagtgtctaagtagtcaattttgcttgaataaattatggaaaatacagttttcaagaggagaggctatgctacttttttcccttttggaatactgggtatatcctaggtaatagagagtcagtgaacaaatctttgctgatgctaatagttaaacaaaatgattcaaatagttactgagcaaacatttgctgattaaataacataatgattcatatatgaaatgcgt

SEQ ID NO: 49021 - DNA, 2318 bp, Homo sapiens
gttacagaagaagtacaggccaaattatctgaagatattgtccaggaagggttgaaagatggattatactgccagattcagaagtaaagagaagtggtaatgacagagagcaaaagaataaatcaatggattgttgacgtcagagatgaagcatctatcccttgactacaattaaaatgtagagatgataaaatgcatagtaagggtaactgaataaaagaattgaaaaagcattaggagtgggattctaaaattaagaacatgaagtaatattgttctgggtgctgatgaagttctgactgcagccatgggagtgtatggatggaagtaaatgttcaagtcacagagctttaagtaagctttacaccaaataaagtaaaggacctgagaatttggagggctggataggccaaaatgtgagtatcaaagaatcctaaaagatggcggccggatctgagacagggagaaacactgtgagtgatatattcaagtccttaggactcaacggagagtgattagtacggtttggtaaggagccaaatatcctgagcttcaattgagcaagggagtttccaaagaggatcggggcaatggtcaagaatcagctctgcggagtgaaaagaatgccgacttcccacttcctgacccagagatatgagatgtgtgggagaatgaataacatgagtttgaggcatgctgcggtcatcccataggacagcaaatttcagttaatgccgagaggtagggaaatgtcacaaaataggttgagaaagtaagggattttatttgtctatttatttaccatataaaagccatgaccatttcacaggacaccactgaaaggcatgagaacgtaagaagcttgagaggttagtttagggggcacatattttccatgtaatcagattcagatatttcaatactattaggtaagtgttatgtaaagaggatgggaggttcatctgggagtcaggccaaggtttgcagtatcacttctagcagaggacaaataggaaaaaataaaataaaaaaataaaaagccctgggtcagaatggcaggcaatcagccgcctgagacgatgggccttattgcagtctaactatcagaaatcagcaactctcctactaaaggaaggtttccagtatctgaccctagtcagaaggaaacagttgttcagattttactcaaaatttgaggtttcgagcacagtcctgtagactgagagaaaagggagcaggtgaatcaacagaagttggaattgatttctgtggaaaagactgagcttgttctatgtgtgtggagttgtgttcagccactggtaaatcattcaagtgaggtgacactgggtggtgagtaagatatcaaattctttttgttttaaaagccattttcttaaatttataaaaatcacgtccagcaatattttgacattttctgagaatgccacacaaataaacacacacacatttttagaaatatctgaaatgtaaataaaacagctatgctaccttatatctcatttcagaattaacatctaattaaaattgtatataactgtagaaatcatacactgagtaaaaaacatcatagtaaggaaataggttgatcctatgtcagaggacatcagaaacatcatttgcctttgcaatttagcattggttggattcttaattgtgaaaacaaatacttttgtgttttgttttttttttaaatgcgagacactgtcccactttttcattgaacctactgagagtctaccatccagccacctggttaggcacagggtgatgtgaggagtacgatgtattttctgccttcacggactaatgtattaatacttcttcttgggaaaaattccactccacagtcagttctcaagcactgacaatatcagggttggtagtcagcagaccaggatttgttctggagaaaactaatggagaacttcaccatctttcgctgtgttcacagatcgaattcggttgatgcaactatccatcctaaagtgtcatctctcactaccatgggcactgcaattccccacaagcactttggaagaaaacaggcaaagtcaacctaaaattggctctagaattttggctaggggttcttttaaaaaggggcacaatcttagcatttaattagttaatttttaatgtaatttcaaacaattagattatgagccaaggatggtaaacaatgcaaggtaaacagagctaccatatcgtgattttatttagtgatacttatctagtttttaagccacatggatgtaaaacttaataaatgatattatttattttgtttatcttcactg

SEQ ID NO: 49022 - DNA, 845 bp, Homo sapiens
taaattaattttagcaagcattcttttgacaaattaggtgttgccattccattaaaaataaattatgaaataaatactaaactcttttagtgcccagtattacttgaaatcaatacatgcaatcatcagttactgtcacgttttataaggacctgttgtgatttcagcactttaaagtctatcctataacagtattaggaggaaaaggccagtggaatcacttggctagaatgaggagtgcactatcgaattgattatccagagcacacaggtacacttatttcttcaagtttgcattcacatgatattttattctttgggtgacccatatatttggtagaatcttttcattcaggcatggtgaaaatatgtgttgtttatttccataagcacctgcacttcctctcttgacacaccgtcacatctgagagggaacctattagaccacattttggctcagctgagctagattgacatggcctaagaatatgttcaattagtcagcatcatgctgtgggctaaggcaacaggaatgtgctgactcactccttggctgtgacccagctgctacagagaatgaggagttggtataatgtgtgttagtcatttatatagtttttttttttttaactgaaaaaaaggttaagttcactttcacaggcagatgtctaggacttcctccagggtgcatttgtgtcacaaaatcagctagccactgctcgcatgtgaaagttctatcactgatgtcttagtgtgttagggactgtgtctgggtgctgatacacagcattctgccactcacacccagcagggaaactacagaaagagagaataatgcttcttaa

SEQ ID NO: 49023 - DNA, 649 bp, Homo sapiens
tttccagcctctggagtatacatatcttttcccagtcaattacaccctgacctgggtgctgctataaaggaatttttcagatgtaattaagttcctagataaattgactttagcaatgggagaatatcctacctgagactgatcgaatcatgttagcccttaaagggatctagcttttcccagttagagagatttgaggtatgagaggaattttagataaagattttctgttgctgagtttgaagatggaaggggtctcatggcctctgggagatgtaggagattccatctgaaagccagaaaggaagcggggacctcagtctaacggctacagtgaactgaaagaggacttcaacctcctgatgaaaatgcagttgcttgacacgttgattttagcttgtgagaccttggacaagatcccagccacactgtgcccagatttctgacctacagaactatgagctaataaatgggtgtggttttaagccattatgtggcaatttactatgaaggaatagataaacaatatacagtttggctgtgctctgaatgcagctttattgcactattatttgatttttagaactttttctattttctagtctactcttttacctgggtaactgtattagtatttaaaaagtttagt

SEQ ID NO: 49024 - DNA, 891 bp, Homo sapiens
agttaaacaggctgtattatcataagtgacagagaagtgtcaagccaaggtcagccagtaactctgacctccctggaaagctggaccttggctagatttaagatttcatgcagttcacaagtgacaaccatatagtcttccttgagggacatggtaagataataacaaggaatttcaaagcagttagaaacccatgatttcccctgtaaatagtgtttttaagtgcatgcacatctcttggttagtaatagccagtaacctgcaagttgcattatttacgacacactttcatatacatactgccacctgctggtaactgtgtaaatatcagcccacaaaaagtcctaaatcctgatttttcaaaggactggttgtttcaaaagcccaatgactcagctttggattttaatcattctttctgttaataattagagaaatgcactggtgtcaacacctagattcaagtgaatacttatgatgataatggaggcttttatacagggttttgtagtttaattgaatcaactttttgaaacaaaagcaagcaatactagtgaaatatatggtcaactttttataaatacactgactaagtaatttgtaacagtctttttatcatttttatgacttagtttacaaattaattaaagttaaaaacatatgacattcttaattatagctgctgttaatatggagggtgtattatatcccaactacattaattatctctttccatccttacagcagcattatggtgcatttactggaaaatccccttcttaaagatgaattcaaggacacaaagctgataagtggattataaatagatcactgaatattgtgaaatattagacaacgtcattgttaaattaaacttgtcctccaaactgg

SEQ ID NO: 49025 - DNA, 1511 bp, Homo sapiens
tttgatacaaaattaacagagcatttgctctctcatcatgataatatctcttagggtcttgccttcttttaacataagggttggggaagttttccagggctgtcgctgatggtaggaatttgtctagatttctttgcatacctttctcattctttgtcaacactgtaaaccaatccaggtgagtaagcgcccaaatacaaatcagtgcctcatctatatcttcccagaaagctaagttccactgaaaaacaaacaaaacaaaactctgaatcctttgactgtcatcttggaatgaatctaagtttggaataagaaactacagctggggattaatccttcaagggcccagctgttgccattcttccttaacaagcgtatgtgtcttgttgtctcaacctcccaaggaaaccagtcaaagtttgaatgattcacctggcttctaccttctctgaaagtctctctctctctcaatgctcagtgaaggtacatgtctctgcaatttttgtgtaaaagagagtggaattttctgcctacccaggacaaatgttagtactagttattagaatcaagtgaatctgaatccaaatggggaggaaattcaccccactctaccctccagagaagagttaacaacagccaaggcatcagtctagcagctgagtttgaacataattcctgttcctcaaacttcgaccacatctccaaatccttctccttaacaggaaataaagtggaacactatttattcttggttaatcatacaatttggtcaacatgtttgctagtgattcccacagacttcctcaaattctgttaatcagcccctgaaacgctcatattttctttctgaaaaagccatgtgtctgttggcgtttcttcctcattgtcaaaactgtcaaagactgtagtgcctgagattttactatacttacaaggcaacaagttagcctaccacagttttactaatgctagcaaaaacctttatgactcacagcaatagcagtagccagagtgtcaatatttgcacaggtttcctgagtgccacttctcacagggttacacaaagtagtccaggtgacccctgtaccatcagtgggttacatcacaggagaggaactctgagactagggaacctgaatcttttataatgaatagtatgctgccctttgttctagaggtaggcactgtctctatcttctaaagctctttgctacacaaaatccttgaaaagacattctggaacaaaggcagtcagagccttgctcacaaaataacatgagaggctcatgtagaataatttcccaacagaatttgctgttggactggatgtgtaagtgtaaaggcaatggtaaagtcaaggatggtctttggcttgcacactgggtggcatttggtgccacttaaacagtgacacttggggaaagggaccaaattttgattacattattacgatatgcctatttcattaccaaaagaatatgtcatggtggcagttgaatatttaattctag

SEQ ID NO: 49026 - DNA, 2319 bp, Homo sapiens
taaactggttgtaatcatttgttttcgttatgaaagtactgccaaagtgtattttgtgaactgcaaccgggtagttcagaacacaggctttggagctgaggcttcaattctaattccaccgccaacttgggagcccttggacacattccttcacttctctttggttcctgtgtaaaatgggattcatttgtaataattgtagcgatgcacttagaacttatgaacattaaatgagtttaatatacgtaaaacatttacctgtcacatacgcactcaaagaatgctggctcacattacagaacccaaaggcttatttatccttttcgtttataagggtattaaaacgcgttttctatttaggatgggtttatacggctgcaacccaaggagcatctgtacttttaagaggaactgggcacagcaaaacagcatcttcctagtctaacagtgagactacattcacagaggacacatttcatcaagaacgacttaacacgcccagatatctcatattatgcccctgcggtaaggcaaatcaagtatgaagacacacactccctgttttcttcagcactgagatcactggttccctccgttccacaccgcggctccctcggctcggagccacagggaactatgaaaatcggcacgcgaggcctaagtgtccccagaaccagaggaaccacagttgcgtcatagcagaaggacctcttttacagcatcagcagtgggatagtcagtgccgagttttcctggcaggacagccgacaaccaccgccacagaccagtacaaacattccaacccaggaccttttttcgcgcgccgacacagccggaagtgacgcgtacagccagcacgctgggccgccagcgggacagacgagcgggaggggcagcgtgcggggagctgggggcggggcgcggccgcagctccgtttccggtggctcgtcgcgctcgctcactccagctgcagccactctcgcccgtggctgcttcctccatcctggtattttttggagcttccatcctggttcttccaaagtgcccggacccaaaacaggaagtaagtgcgatggaaccttcaggttccaaccgccgccagggccgctccgcccagtggagcctgtccggcccccttgctgcccgctagctcccgccggctggcgcaagctgtcggcgccggggcactgcgggcggggtcggagcctggccttcctgacgttgcagctgccgtccccgcacgttccggccagggcctccctcttagggccgggcggtgcccgtggctcaggctgcagagtagggaagcgagcggctgccgaggcacagcggcgatccggcgggggcggaaaatggcggcggcttcggaggagctaaatggcgccgggacccctggggggtggggtgggccgggaggttgagtagagaactgggccagaaggagtggagacagtaaggaagccctacttgttttctcgtggtgttctatttttagtttttatttttgttacgttttcggttttgttttatggtccagcgtaggagaggtaggcttgggtggggtcgagagagtgggggtgggtctcgacccaacttccccccctttgcttttttgttcttttccctcgtttgcgctttagattcttctgtaattttgcgggggttcagccttgctcggcgattcacggcccagacatagagaatcgggatagctggccgaaccgtctctctcagtctgactctctttaaagaagggatgtgggctggggcgcggggacagtcctggtggagcacggaaaatgcggctgtaaagttgtaattaccctattgtgccgagttccgagaaagttcttaaaattgttaagtccactttgttctctaaaatgtacttcgctttgagaatttcttcagggaggtatgtagaatgttttaccacaatctccagagcagatttgagagtagaagtggccaagtgcccttttgtgcaattgaatgatagagcatatgtctttatataaaatactcggtgtagataaggaaaaggataatagtatacagtatgagtcaggactcctccctttctctcattgaatttgtgtagttgcttttttcgcaactcattcatctttgtgtacctctttttaatgtacatggatttgattatgtgtgcctcctttctgacagtcgaggctgcatgttgggacgtcctacaaaatgcatattctgtggaattattttttaatatgacatgtcttaagcttaaagtgacgccatttggaaaattttaaattatacctgtatttttaattcgtgggaga

SEQ ID NO: 49027 - DNA, 1321 bp, Homo sapiens
cgacgattggccgggcaaacatcttgagagggaagtgggattgcagaaccagcttcctccctaaaagtgcttttaggagccgcagaaagacgcagcccggactccgccagagggcaggcagcagacacaccccccatcccagtctggagtcacaatccgcactcaccttggcggacgtctccccaaacagaggtctgttgtccaggccactggtgccgtaggtcctggtagcaaagtcctccattttggggtttcttcactttccccaagccacttaaaagcaagacagcatgacctcccgaggtctcaggtccacgactgcaagcctcctcctcacggctcccgcatagccgaacccgagtggtcggggaagcgctggcgccagggatgggtgggggctcacacgcggggaacgcgactgctccgccccggccccgcgcacctcctcatcttgagcagctgccgcaggaagtgaaaggaaacaaacactgcgtggcagactctcagcgggacgcccccgcccgggcagctcccacttcctcaaatctcagcccttggcgccgcgtggctctccgcccctctgggccgccagggtagcgccgcccgccgctcgcccccggctagcacagcaaatcgcagtcccctcgccccgggagagactcccacacgtcgccccccatttttacacaataatttcccatgttttcccaattttctacggtaagcacgtattccttcatgttcaagggagaaaaagttttcttggaagaacgcattgagaacccctcgcctagccttctgcgtctcccccactacgttccccagtggcggcgggaggagtgaagttgccggagcacagcccagcgctccgcacacccctcccgcagggcggcgggttcaggtcgctgccggggccgacccaagcaacttggattccctctcatgtgttgcatctaccccagggccggcgtgctcgccgcagctcccgccgctgctctccccgcgctctctgccggaactgcagcaggagtacggtctaggcacagcgagagggagaatcccgcctcggccctgcccatattggtcccgcgcccgccaaacctcggcatcccctaggcgctcgcacgctggggggccctggccgcgccggggagagtgggccctgggtccacacccccgccgggatccggtgccgaggcccaggaacgcgggccagatgcgtgggagaggaatcgcgcggtcccgtcgcagcgctgcggatcacctcccggctccttctcaggtcccccgacccggacccgctgcctccgtcgcaagtcgg

SEQ ID NO: 49028 - DNA, 716 bp, Homo sapiens
acacagtaatgcctatctcttcctgtcaacaggctttccagtcctgtgtctttcccccacttatatctcttgcttattcatagcttctattttcccataacctcaacttattgaaacctttagcttataaatgacccattattaccattctagcctctccttatctcaaggacttttaccttttgcctactctgtcaaccacataaaatctttctgcatgttcgatttcagattcatgacacagagactctgatggaccctgacagcctctttatcaaaaaagtttttttgcatcaggcgttttgataggtgattggtcaagatagagactggctaccctggttggactgtgccctgcaagggtcaacattcctgcccttcccagtggagatcccttggtatattatgtgtctggctagaattgtggtgccctctcgtggacattttcagtattacaagagccataattttcttccaggattgttttcaaactatgggtacgttaacttaggatgatgaaatcaacgagcagttgacaacaatacatttggtccagaattgtaataatgaaatggaaagatataagagtgcatctcatttattaagattgagtattattttggccgggcgcggtggctcacgcctgtaatcccagcactttgggatgccgaagcgggccgatcacgaagtcgagagatcgagactatcttggctaa

SEQ ID NO: 49029 - DNA, 650 bp, Homo sapiens
ataagcagatctgcattatagtgtcacagtcctcttggcttgagcacactgtgggatcagatggttttccccactgctcttactgggtcactgctggctgcacttctcaccatgcattaaatagtccacttaaccagctaatatcccttctctgttggagctagggataaaatgaggaattccagcctctccttccctaaccttctgattccttccgtctcattgaggcacgttttctttgaaggttagggaaattttcaaagggattaacaccatggaaacagggacaaagtcctttctaactgggactttgccagagtcctgcaggtacagcatcagagcctggagggcccttctcttatgtatcccccaacccaaagagcctggtccatggtctttccagatcaatcccaaccatttccctcaagcagccagcccctacccacagggaacagtcataagtcctgaatccattctcattccaactgtgtacttcacccaagtctgcgtcattcagtctggaggggtcccagggatgcggctaggcttttagcaatgctgtactcagcttgtactgcaggagcaggcaactatcactgctgctcttggtattgaggactactatggtcttgtgtcctgacttgcttctc

SEQ ID NO: 49030 - DNA, 2113 bp, Homo sapiens
atacaacgaaggtttctgagtagtttttagttactcaatttaaaaactttatcttgtaagcaaactttaacatcatccagagcatcgcacttatatatgaaagaaaaagttctttatcacaccttcagaaattacaactacaaattcctaatcccttatttaaaatctttttggctagatatgtttcaaaattcagaacttttcttagaatagtacgtctgccatatattatgaaacacttccagcaagctgtactgtaatcaaacacaatatttctgtagaaaacttatgaatatttacacaaagggaacattcagttacacatagcctcacttcccttcaggtcaaactttactgctaaaggagttagaaacgacagacaaaggaatggggcctgtcatgacatgttaatttgaaatctaaatctttatctttgataactagttcagagtcagtgtaaacatttggtctttccttccacaaaaaaatgaaacagtgtatttaaaattaaaaatgaaacagtatattttatttcagaaggtaaaagcaaaatgaattaatctgtgaaactaagtcaatcacattatgatcttctagaacttgggtagctccactctggttaaagattccatttcttggcacaacagtaaaagacatcagataggcccgggggtaagcatccctggggtattcaaataacttgggtagcaatgaagagctgcagaagagcaaggagacccgagatgatgtagtgtgctgcggcatacctgagttgggcaaactcagcctccgaagattaaaggaaagagcccaagtaggaatctgtgtgatcactgttcttttgccaagacacggggtggacaataagattcctttacaaagcactggtgtaagtgttcgcctggtgctgcaaaaagcggctcactgggaatggggaggagcgtgtggtaagccagacctgcggcgagaagttgggtgaaaatgggtcttaaccatcgcttcctgcatctatcccagagggttgggtaccttcgtgggcggagcgcggcctgcccagagtgccttctagatcctgggtcaggcgccaagctccccagcatcatgcaggaagctgcagccccgcagagttaggacagctcatttggcacccggcgagcccttcccaggcccgcagcccagaatagagccggggcccaagacgcccactggagacagggtcgggtcccactaccgcgcaggcccggctcgcccccgacgtcaggcacggggcgggacccttgcagctgtccgtccagtcccgttccccggaaagtgaggggcgggaccctcgcggctttctatccaatcctgttccccggcgaatgcggggcgggaccctagcggccttcagtccaattcccgcacctttgaggcccaagggggagcgagccggtgctgctgcaggctgaggctgcggcagaggcggcgaggcgcgggcggtgaggacggacaggtccgttgaagcagcattccctccctcccctaatccttcaactcgggggcgggggaaagttaagtcgtgcagaaccgcaaaggtgcctggatttggtgggggagtagtgtcatcaagcatctcgcctgctggggtctcaggggtaccctcaaggttgggccgcggggctgctccgttgtagtgcttagatttctctcacttgatggcctcttgagtgcagagttgctcttgggttggtgggaagagcctccgagctctcattgccctctgctcctgcttctaccccttgccactctgcgacgaacctgttacccagccactgaaaacgtatcctctaccctttgaacccgtctaatggaaggtgtacttgtctgaaacctacttaattgtatgatcatttactcctgctctctagcaggtggactatttgcgtgtgtttgcagtgattcacgaaaagtttgtcttgggaactcccaactcctagtttgtctgcattccaccttctttcactagcttgttcatttctttttccctcttaaatatttgttaagcttgtttctttcttcccacagtcaccgacttagtccagttccctgtgatctcaaaacaattgttgcagca

SEQ ID NO: 49031 - DNA, 3019 bp, Homo sapiens
caaatgaaatactttcctctggaacatacccaatagcaagtctcacttttggttcagtctacacactgcaaagaaaggtttgagcaattccttaaaggaatgtttgtcttaagtcacccagataggttatttatgttgcctgcactgataaccaaagactgtgcaattctctatatcttttacgtcttggagacctattcttgttgtttgcataagatgtaaaaaatataattctgtgtcctagtcacatcaaaaagctacttattttcagtgacagaattgttgaaaaaaggccacccttatagtcatatcattgtttggagcagcagagcttttattatctttttgggacaataattcagccttaggaaagcactaggttcttagcaggaatcatatggttcattacctgtaaggtccatacaatttttcaacatacattgattcaaattttctttcctgggtcaaagacacaactgtcctaatattttctattgcctctgttgcaatctgtaacacagaatagaccttcattagaagtggtgttttcacttctgaaataatgaaaaataagccctagggctctgtcaaaagtatcctgaaggttacgttgataggctttaatttcctttaaattaaaaaccaaaggcataatctgttcaagactagctttatgacaaaactggtacttctggctgtgctaagtatggtaggcaagtctttgtatgctcaggaaggctgatcagctaagggcaagaactgtggcctgggaaccaagggcctggttctattcccagcctgccaccaggcagttacatgactggccttagtcacaacccctttgtggcctggctttcttcacaaggcagagtcctaaaagaaaggattaggctgtgatttctaagggcctattggagctgccaattatttcctccctgagtataacttcttataaaagctgtccacccacaatgggaaggagatcccaattgtcaacaacatgagcatgctttaaatccgtgattaaatcagagtcagacatctgactaatctgggtcaatcagatttggtttcctggccctggacacaagtttgaaccgtgaggccctggggcttcagaggctgatgtcacattgggtatgtgtaagaagctggtctgaatatacagcatccgaggaatggaatagatgtataggaagactcagatattagagcctgtggctgtaagagccagttacacacaaactgcctgtatttcttgcactttggagtgtccttatatcaaatcgcttttacccaaaccagccagagcagttctctgattcttacagccaaaccacccttgacaaatgttgattgtctgtgacttagctatttagtctaaatcttagttctgtagttgagtcatctaaaccaacagcacatggagcataagatcttaattttaggtttttaacagctttaagacttttttttttacctcagttcttagcttctgcaatgagctgaaaggaagatatgtgatgcttgagactgaataaccatagatttttcatttgtaataaagatataacagatagcaattacaagaatagagaaaaattactgagcttttactatgtccaagtattacctcattcaccaatatgatctcatttagcctcacaaccttgaaagggaaatagtattcctatttacacagatgagagaaccgaggcacagagaagttaactgaattgccttaagttctaaagttaataagtagcaaagcaagaattccaactgagactatctgatgtggagtccatgttcctaagccataatgctattctgctacccctgctgtgtaatttacacaaggagaaaccagtaatgacttgacactcctcttgacattctagtcatggatcaactcccttacgggttagctgtggcacagagggcccttaatctcagtgaccagacaagccctgggtcaagatggttatgaggcagtcttccctccccactccctgcccagtaaccaacaccctcactaccaagccctttttggaaaattgggatgggaatacctcaaaccctgttgtactttaatgatgatgaaactgtacccaggtaaatgagagtgtttctttttaaatagtgatttggggtttttctagaaccttctttccgactcttaagcaagtgctgactgagtaaacaatattaaactatgattgaactgctgatattaacatttaaaacatttttaatctttcatatttaaaatctttcatatttcatatttaatctttcatatttcataaccctattaggttaaagtagctactaaaaaaatttaaactggccagtctgagttattcaatctctgatgcttagaataacagggttttagctggaaggaacttggggcagtatctggtacaatttctcattttactaaggtaggacatgaggactagagaagttggggatcttctccagcctcacacactgtgaatagcaagaccaaagctaataacccaagattttgttttgtttcaatactgctcaattctacctgctctactctgacaaaattctaacaattaatggagctaagactattaactagattcaagatgttttctatcatgtaacttgtctaagaaaagtttattttcattccatccaactgaccattctcccatatgaaatgtggaaagaagcaggattgaggggcaggggaggaaacagagctacacagtgtttcttcagcagttagttgagacactcagaagtcaaggaaatgatgccctaaagtacccacagccagcagccaagagaatcttcaagaactctagacacccaggggttcccaagtcctgggaaccacatattgtcctagcaagctccaagtcttggagaggatgcagcgtgaaaatgaggagagtgaattctgatggaaacctggagatactattatacctaacgctgcatgcagcggcagctgatgctgattacaagaggacaagaa

SEQ ID NO: 49032 - DNA, 907 bp, Homo sapiens
cttaagtaacccctggcagtggaattcctgaagggcacagtacaaagtgtgggagaggatgttggagagagatagaaggcctgcgctggtgggccacaccaagaatcttggacacagtactacctacagaggggaagggtgataccagttgtcacagtgaagtgcacaaccctcaagaactaaccagcagttcagtgttctaacacttcaaaggactttgttactgtcttattagtcctcttccatttctcaccttttctttctgtttttgattgacccatttatggctctctttctctttgttcttctttcctcctctgccttctagactacattttcctcatcttacatttccatttctatagcttcctatcttttttttctctcctctcttttaaaatgctttactctgcccattccccccacctcagccccttttggggacaaagaacagttattgggagagagggtgatgagccaggcttggcacagtggagcctttgagggctgaagctaggtcagactgggtcaataacccgggtgaggctgaggttagaggcacatggtggaaagtggatatgtgtgtacaccattctcaaagatttccaggagttcaggcaaggtttcagggacagggacaaactccatcatcaaacacacagggcaagcaagagaaccgaaagagacaaagggtcagaaaccaggcagagcttggataaaacaatgggagcaggtaaagtcaagagccaatggagctgggtccctaaaattgtcacaaagggaccagtgtcccaaaggttcatttttagtggttctgggaaaaggaaaacagaacacttgagtctgtcagctatagttaaaagcacagggtcaggttgttaacattaaaaagcattttaaatgtttt

SEQ ID NO: 49033 - DNA, 3732 bp, Homo sapiens
aacaaacatagcaagcacaaaagtaactgtcgaaggtactacaaagatacatggatacataagaaatggtcgcctgccttacagagctcacatacacaggaaagataagtatgctaacagtgtcgctaagtcaattaagttatttgttttctaaaattaaaaaaaatcatgatttaaaattaggaatgtctattcttctgaaggattgtggagagtggtgtcaggcaatcttgttggtgatacattcaaagtacatctagaatttaaccacttatcaccagtttcattgctgtcaccagtagggcagcctcctgcctagtctctccacttccacctatgccgcttcagtctatcttcaactagcagtcagagtaattatttcaaaatgccaagccatacactacttctttgctcaaaaacctacaatggctttcctttttcttacaataaaagccaaaatccttgcattaacctctgaggtcctacacgatctgtttgcttatttcctctctgaccacatccctactcccaaacctgcttactctgctccaaccagcctggactctctgctgttccatgaactcaccaaacatgtacctgactcagggtctttgcattgccagttaccttttccgggaatgctctccccttagatacccacacagctgtctcctctcatttctttcaagtctttgctcaaatattacctttaaaataagatctaccctaaccaccctacttaaaattacaaagtactccccttttgtactcctgatccccttaacctggattaatgcttttttccatggcgttaattaccttctaacattggctgtggtttacttatttagtatgtacattatttatgtctgtcctccgtactataatataaactctatgagggagtgtgtgtgtgtgtgtgtgtatgatgatttatatatatatgatgatttttacataaatatgatgcatttatccaggtaaatgataaagttttactcataagatgattccaaattatgtaaagtattgactaaaatcactggacaaacatctgccactaaatatgttcaaaagaatgtgccatgggcaatagcaacataattagaacaagaatataactaatttgattgaagcaggcttaacttcctttaaatatattatctttggtctgcttttataaaaattagtttcactacatttgatttcataatcatgtggtcttaacttattgttaactttctgtatttctcttttgagctgctttcttctttccagcagaagctgtgggcttcccctctgaggactttcctgggttctgaagtgttactacaccttttgtaggaatagctcctttgcacacgcatcaaatgttaagccagtgcaatacataaatagacttcttcatgaaaatgccatctattaatagactcacagtcaatccctgcctaaacagccagctgatgaaaaccatatttttctattgcgtgtgtaagtacttccattggaagtaacaccatctatcactttttcaattctacatggcaaaactaaattttctatgaaaaaatacaatggtgcttagaagaaatacagcaaggttactgcacaaccacattaacaggctaaaataatgcttcagtttaagcatcaggtaggcatgttttcagttagctaatcaagcccctagcagcttgaggacaaactacagagactgataaatttgtccctctgggtgatcacttgacacaggtcaattttttctgggtagcctggtatgaactcagagaccgtaatagcctcataaactatttcaggctaaaggcgaaaatgattcactattcccacagtgaaagaggaaacaaagacacacgccattgactgggaacttctgccccgctcataaagcctgtgaagtgagtttaacaagggccaggggaaccgagaaagacatgaaggcaaaggaagcgctgcttccccctaccacttgaacaaaactgattcggatgtacagaagttccccctccccacctatcctcccagaaaggagaaatacaaataagcctggcgatgagaggagggggaggggtaagacaaggaggaagagacataacaggggatgggcaggaggggagggagtttttgcttcactgcccttgttcaaaaagcacagccatcaacagcagatgtctgacaccctttaagtctgaacaatcagatgatgtatatgaaagtcatttgtaaaagtttcaagagttacgtaatacaatgaatgttatacaatgcagatattcattgaatcccccctgcacaaagggaagggagcacttttcaagacagccttttcttcctgaatctgttccaaaaggagcctcagtgacattctttgaggccacacaacacgtttgctccaaggtcagaaccggatgcaagacccttcaaagaagcctccaaaacaaaggtcttcaaaggcatcaaccgatttttacaacttctttccaagggtgaacttagtcctgctgattggcgtgtaacggaaaagccagtggctgctggggatgtacctgctgatgcccagttcaaagtcgccctccgcgctcgtggggcgccaggctgttccgttctttgccgcctcaagatccatctcagcctgaggagaaaccacagcctcagaaccaagtacaccctctccggcggcccggcgcacgagtcgcggggcccgggggcactgggtggaggtccggccactcccgccccgcgccccacgtcccgggtctcccttcgaggccagacgcgcccggacctctctcacctcgaacctcgcgcgtgtctggcagggcctctggacgcgcgggcgctgcagcagaggggcctggactttgctcgccgcggcctcgcccccgcccccgcccccgccccccacgcgcgtccggcccgggaaacgcctaccgttgcagccagggcgagggccgcggcccgcgagagcagctcccgccgcccgcccagctctctccccaggctaggcgcgggccaggggcgcagcctgccgctcttgccgccggggcgcccggctggggccgccgcccaccctggcgacccgccagaaccagcccggtcgcaggataagaccgagatcaggctggagcctcgggtgccgagaaagcctcgcctgatgggccacccaagcccctgcagatgactgtcacaccccatgggcgctcagttttgtttttaaacccataggggagacagtttccggacgcccaacaatcacagggcggcccaggaccgagagagagcaatagactcgcctcttgcttccgcatccccagttctggtccaggtggcactgaacccaattatctccaaggacggcgagagtcagccagggccggcaggaaccatcacattatgctccttggggaggaggaacgctgttggtgccctcttagcacttaagagacacagagttttagggctagaggggtcttcagcgatcatctaattaaaaccccgtatgtttaacatatgaagaaacggatgcccagagaggtgaagtcctgcctgaggctgcatcggtggaaccagagtctaggggaagcctcctgagtcccagtccagtgccctggctcactgctctcatctaagacttctgtctgtattgaattgtctctgctcctaccacctatttgagtatgactttcttctttctgattaattcctccacactct

SEQ ID NO: 49034 - DNA, 3037 bp, Homo sapiens
tctgaaacccactctaaacagaagtttgatctttccacactaccgaaactatttttataaaagtcactgataatctctgctttgctaagtccaaagatcaattctctgttcttattttacctgacaaattcaataatttgacagatttatcactctgtctttctgaatatatctttttcatatagattccaggacaccatatgtttctcggattttcctatgctttcctgatcactcttcctcagtctcctttgatgccttctctctctctctttttttcaactacttacctaacactggagtggtccaaggctcattccttggacttctcagtctattctcgccacttctgtcatgtcagtcagtcacacagctttaaataccatctgtatcgaataatttctaactttttgtttctagcctaaaattccctcttgcattcctgactcttaaacacaagtgcatctttgacattcctatctggatgtttaacagacatctcaagcttaacatgcctaacctgctcctgatcctttccccaggctgggccctccagtgaacttctgcatccagttggcagctccagacttatagttgtcaacaaaaacactggaatcatcctgcattcctctctttctttgacacaccataatcaatctgtcaggaaatcttgttgcctttactttcaaaatatattcagaatctgacctttgccctgcacctccagctctaccaccatcatgcaagccactatcatctccacctgattttctataatagcttgttaattgtctctctgcctctgtcctttcctcctcttccgcctttgtccattgtcaaaagcatggcctggatgattcttttgaaatgtgagtcacatcacatcactcttctcttcacatttctgtggtagcccccaattcactcagtcatggcctacaatgctgtgccctctccgtgacctctctgatctcatttttatttattttgtctttgcctaactccactccagccacactggcctcttggatattactcagacaagagaggcagcactccacctcagggtgtttgtactagttgttccccctgtccaaaattatcctccccaaaatactgacatggaggacactctcacctcctaaaaatctcttctcaattagaagttggatcttgtaccctcaggactctcagttcctcttatcctactttgattttcttttccacagcatttatcaccttctagtatactatatcattaaagaatttattatgcttattgtctcttgtcatcttagtagcacataagagccgtgagagtaaaaatattaatatgttttcatttcattcgctggaatatccaataattgctgcccacacttactatgtgcaaggacctgggctaaggttttaggataaaaagttttaggcatataaagaaggatttaaacaaggctaatgcaaaagttactcagattatatagtattttatgaatttacagagcctatcacacatatatatcatctcatttgattctcaaaacaaggagcatgttcaaggtaaacaagtgaggaactattattctcagtttagaggtggggatatcaaagtgaattttacacagctagtaaacaatggaattaggcttccagctctggccacgtgacttcagcttctcattctgtattcctattgaagaccactgttagacagaagccttacctgttgtatttctagtgcccacagcaccagtgggctcagtaaatgtgtattgaatagatcaatatttttgaactatagcataaaagggtttgtacaaaaagaatttcctataagtaagagtcaacagagaataacaaattccatctaccaaagtattttcaaattatattcaaatataaattaattagcaacaatttttcctaaagagggtgctatgatggactctattctctgtcctgttgacttatatcttgacaaatatgctctgtggtcttttcccccactatattgcatttgtggctatctaacaattctccaaattttcatgtctgaagatagtgaaaatttgactattctgtttgcacttggctgcacttaactactcttgaatcatttccaaacttttggtcactaatgttttttacttctgctcaaactaccttctcagagtttatagatcttaatttttcctgcctttacttccttcaacccatgttacatcttatacttctcccaaagtttttttttcttttttaaaaaacccttctcattgcttgactcagaaattttttgctttgcctttgacctttctcttaaaaatattatttccttttggtttcgttcttcttttgttcattataaaattcatctaattcggcccagcacacccaaaggcactcataaagatgttgaagacaagggtaatactgattcagctctctctctctctgttttccactaaactcttccttataccttcataaactagggtggacttgcaaaggtaccatgacaagaagtagttagaagaatttgctattaatcactatgttatatcatttctgccaacgtggattaatgggcacattgagagttccaaggtcacattgcctaatgaaattcttgtgttctgtgagagtaatgaaaaccactgggtggacagggagggctgcaaggtgccaaggccaacgatgaaatggataagcaagagtagggtcactaggcttaaggttattgacatttactaactcttaaagttattctaaagctaacgcttttcaaaataaaagaatgactaaaggaagttctctaaatagaaaattataaacaggagaaacttagaatatctagaataaagaacatggtcaagaaaaatattggtaaatacaagaaactttcctcttcctattgagttttctaaattattttttatgggtgaagcaaaaattatatcactgtctgatgtggttctaaatataagtaagggaaatacataagacaattacaagtgaatgagagagagtaaagggatat

SEQ ID NO: 49035 - DNA, 1743 bp, Homo sapiens
aaatatttgttctcgtaaaggaaatccttagtattgttttaaataaactttaacctatttcctttttggcatatttctctccaggctttgtctatatgcatatgttcttgacctggactctctgaatccaaagaactttataccattctttaattaaaagaggtagaatattgtggtcatggggtttttcaaataattcgggaaatctcagccatattttggctagacctggcactatcccaaaataacatggaaaatcattgataagtcctgcatgagtcatctgtttaaactgaagaattgggataacggtgtcattgcccatgctgatcgagacgttttgcacaagagagagttgacaagggacaatgaactctttcggaaattaaaaaataatttgtactaaaatcttgatgaaaatagaaagcctcaactgcaaactggcttgaatatataactaaaatattatatttatgacttagataatattgtttagttttgtctttctattcttgatttaaaataatatatatataatatatatatatttacacacacaaacatacatatatattccttccctcaccttgcctttccccccatccccaaatagaataatgtgattccctgcctatgatattagaatgctgtgtgcaccaacccccatgcttgtggttgaaattctacagatacaaaagctctcttgcagtctacccacacattcaggagtcacaaggcaggtgtctgaagttggtccttttttccctttacttatggaatttgtaaagtgttatattttcatctttataatggaaaaagtaaaatgtgatttattttacaaaatttcaccgcacaggtacatttgaaagaataaggccactctaaagtgaggcatatctcaacactcatattatttcaaaagaatcacaacaaaaataaaaataataaaagctattctggcacacaatatccttcaggctcaggtcctgcctggccctgccccattccttggggcctctacccacccttcctcacacccaacatctaaaactctgaccgcactgaatcacttctggttccagccttctaaactgttctatactgctctccacatccacactcctcctctattgtccatctgacatgcatctattccattatccaggaagctttttatttaatagactttcttttttcgagcattttttagattcacagcaaaattgagtggaaggtagagagacttcccatgtacctcctatttctacacattgattgccttcccaccagagtggcacatttattgcaatgattcctctacactgacacatcatcacccaaagtccaaatagtttattttagggttcactcttggtattgtacattcagtgggtttgggcaaatgcataatgatatgtgtctaccactgtagtatcttatagagtagttttactgccctaaaaaattatctgtgcttcatccctcactcccccaatctctagcaaccactgatctttttactatctccatagtcttgccttttccagaatgtgatgtagttggaattatacagtttgaaccttttcagattgggttctttcacttagtaatatgcatttaattttcctctgtggcttttcatggctcatttctctttagcattgcgtgatatttcattgtcttgatgtaacacagtttttcatctatttaccttccaaaggacatcttcgttgccctggaata

SEQ ID NO: 49036 - DNA, 861 bp, Homo sapiens
caagaaaaatatgaaatgaaggcaatcagcttttttttttgcttatatcttaagtattgggtattgtcttaaatacttcattacagtatttagtgctcaactaattcaatgaggtagacattgaaattccattttttccaatgcagaaataggggcttaaaaaaagtaagtaacttgcccaagaagccacacattttagcaaactggcagccagaacagaagcccaggtttctctgactggagagcctaggagcttggctatacaccaagcataatcatactcttacacagcgtcttgtgtagagaaggaaatcatttaaatttagccacccagttgagaaagcgaaaactgggtttcaactcaaaggtcacttttccttttgacccaaactgactcttttgaaagagcccaggtaaaaatatttcatcatatatctttgcccttgcacatatctgtaagcattcctgcttttctctttgctattctgatttctccaaactgcaagggcagaggtctttcatctcagtgtcggaagttccagctgggacaaaggactacagttgcaggaagtgctccctgaaaatcttgtgtttaatctttgttttttcccaagagcaacaaatctcttattttttttcatttaacaaatatttttattgaagacttttgatatgccaagtattgatagaggtattgatgtatacaatgataaaccaggtgcccaccatgatattgcagctaagagggatttttttgaagatcaagagagttaaggtcactgaaagtccttgataggctctggaactaggagggttattacttgttctggttatgaattggcttaaaacaaatggttttta

SEQ ID NO: 49037 - DNA, 1128 bp, Homo sapiens
cactcagttcaaacccgtgctgttcaagggtcacctgtattttataaaaatgctcactagtccacaataatgtgctgaaaaactgcagagcacagatcacaggcagggtagaggttatgagcaggttttgacatcatgcagtcagaataagtgtgggctctaatgtcacatacaccattaatcaataaacaaatggtacaccattaaccaataaacaaagaaataggaaagaaacatcaagggctgcgaagtatcatgaattaattcaggtgtcaggaatggcctctctgaagaggtaataattttgggatatgaataacgtaaagtcagccaagagaagagcagaggcaatcagcttaaaacattccaggaattgcaagaatgcccactgggccagggcacacaggcataagagactgtgatgccagataaggccataaaggtcatcaggagttagatcatacagagtttggtaatccatgataaaagattagattttgttccaagtatgatcagaagccatttgggagttttaagtaagggttggcattattagatttttatttatgagaggtcagaatgacttctgtaagaatgtagactatagttggataagaatggaagaagttgaagcagggagattggttaggaggctgttgctgtgtgactgtgagcaagttacttgatctctctgaatcttgggtttcattatctatccaacagggataattcaacagggttattgacagcattaaattagatcaagtatttagagctgttagaatgatacttgttatataagaagtactaaatagcagcttgagaagtgtgttcaggtggaagttgattttcaatattatgtggactggttggtgcagatccactactttccctacctacttctgtccctctcatgagccacccctgaattagaaaatgtatcacatccctgacctttgctcagaaaatctgccatatccacacataattcatttccatctgctccccttcctttggcccctctgacagaactccaagagtcttaaatctcatgtgtcacttcaaaggtgctaacctgtggtttgcatgaattagcttaggatcagattgtatcatcttcttcctaaa

SEQ ID NO: 49038 - DNA, 562 bp, Homo sapiens
cccatcggcctctattttggttcacagaatgtttagtaagctgctttttttctctctcaaaaatttattaagcacattgacaggatgttaaggaacattcaagtgttgttttattagagacagggagagttgaaacaaatatgagttcatctttgaattctactgtgacatctcaacttggaacacctttggttataatgtctccatctccacattctcggtcctcacagaattatccccgttactatcacgtgctggagatcaaaggcacagtgcccggcacacggcaaacactcaaatgctatttggtgaatgagtcatatggactccagaattgcaggacagtcaaactctgttgatagtcaataacctgtcatggcttaggtaggttttcagtatcacaggctatctgcccctttcctggaaataagaggtttcttatttcgcatagagtcttcaagtggcattcaacacctggaaaattatatatggaccttcaggttgtatttttctcttcttggcaatattacaaactctcaaaacctaaataacagggttatcc

SEQ ID NO: 49039 - DNA, 1542 bp, Homo sapiens
tggatacatagaggggaacaacacacactggggcctattagagggtggagagtgggaggagggagacagtcattaaaaataactaatgggtactaggcttaatacttgggtaatgaaataatctgtataacaaatgcccatgacacaagtttcctatggaacagacctgcacttacacccctgaacttaaaataaaagttttaaaaagttaaaataaaataaacctgccttactctagccggcagttgttccattgaagtttagcatgatagtattggtctacttttgtgagctgtggttccaggagcggtttaatattcagagtgtttgtagtattattttggtcggcttgatttatgtgaagcttctggggctcccactggcccctgcttctgctgcttgagggagtgaaagtggtttttcaagatcagactgccaggtcgggaagagtgtggtggtttcctgtaccaatgccctctagtggcccagtgtctctgggcgctgggaagacagtcttgggcacaaagtacaaaagaggcttcctgggccaggtcacttgctgtgattgggtccctttctgctatatctatttgcttctgtgtctctaggtttgaaggtagagcctcaggctcacagacacaaagaggcttcccagacacagagtgaactacatttcttttttgatatgattgacatccaaagaatttaagaaatttgtttgaaatgataccaaaagtgtaatgctgagtgaggattaaagcttaggtctctagcagccagcctggggctccttttactaaataaatggcatgtgaagcaatgcataattaatcattaaaagattaactcatggtctgtttttaatcttaaaacagacatcaaaacattttaagtaatttttcaacaaatactgatgtgaagagtttgccacctaacttgcttaacattctagtatacagaaaaatcaattgacaagaagcttttgccaaatattttagttaactgataatccccagaaacattatttgaactctatgttactctgagcaaaaaattaacagagacctgagaacttcagtttctttctctgtaaagtgagataatacctatacttcagaaagataacacaggcatttgcgtgacaataaatgctcaataaatgataattattatttgcagaaacaaaataatatccattatacaggttaaaatttctacagtttcttaatacttactacctgacttattttgtgtgatgcttggttttggttgtccattcattacttttgctacatgaatttatattgccttatctgagttgtgttgaactccacaaaaattacatactgggccaatttctctactgaaaatacactcatatcaaatcagtttaaaattaacaccatgttcaccttgaaatggaaaataagttttaaaagatcactggaaacgtgtgctggggtagagagggccacttctacctctctgccttcatgacaggagagagagctgaaggccaaggatttatatgcatccttaggg

SEQ ID NO: 49040 - DNA, 4004 bp, Homo sapiens
atacgacaataataataataataataataataaaaattagccgggtgtggtggtgcacacctgtaatcccagctactcaggaggctgaggcaggagaatcgcttgaaggcagaagttgcagtgcacagagatcgtgccactacactccaacctgggtgacagagtaaaactccatctcaaaaaaaaaaaatgcaaacaattcttgggcttcactaaacaattaatttttaggttaaaggcaaacattctaaaataaaatacagtattccaatattcccactttttaaacttcactacttaccatcttcaaattaaactgtgtgtttgaatcatgcagaagctataaagatggctaggtaacaagcagacagtctctgacattgctgttcacaattcagcactcagcccatcaggaatcttgggaaacaagttttccccaaactctaccttgtaacttacaatgcatttatcaaggaagatgtaattagaacactaagttttagttaacagataactcaataactaattactatctaagtgttcatgatacaacaagagatagtattctatctaagtgttcattatatagcaagagatagctaatagaaaccccacatcacaaggaaaactcatgctttgagaataagttaatgtattttaaactgtcagtgtatgtttactcaaaagcatgtacatgatgattaaaagacattctgtttcattttccccaatgtaaaaaacaatgcctctccacaggaatatttggaggtatttggtcctcagctttcaaaatatgataaagtgtctccattttcggcagggcatggcggctcacacccgtaatcccagcactttggaaggccaaggtgggtggatcacctgaggtcagaagttcaaggccagcctgggtaacatggtgaaaccccatctctactaaaaatacaaaaattagctgggtgtagtgacacacgcctgtaatcccagccacttgggaagctgagacacaagaatcgcttgaagccaggaatcgaaggtcgcagtgagccgagatcgcaccactgcactccagcctgggggacagagtgacactctgtctcaaaaaaaaaaaaaaaaaaaaatctatttttttcaaatgtacccagatcatttacacagtaatgtaaaatcattttcttctgattcacctacacgtacctttggacatctgttataagctgttctggagaataaacttcaagatatgtaaatcattaaccaaaagcttccccagtgtgagttaagaatagagagactgtattttttctgggatgttttattttattgttcagaatcagatgttgagtttaaaaaaaatttcttttggctgctttcattgtcatgtcgtatgaaaacatccaggaaacaaattaataattataagccattgaaaataattattctgtctctctctttttttgtgggggggtgtgggggacagggtcctgctctttcccccaggctggagtgcagtgatgtgatcatagctcactgcagctttgaactcctgggctcaagcaatcctctcacatcagcctcccaagtagctaggactgtagctatgtgccaccacacctggcacatatatattatagaaaataatgattcttaattcaactgcattttaaaagactaccttaaactcctctaatttccttatatattaatatgatattctacattgatcaatgcatatatgtccattttaagcttaactctaacttttgtatactttatgcagccaattcttttcttaaaaagtctacatatactcttctaaaaactatcaagagtattgttctccttaaaatttctgtgatgataatgcaaagttttaaacatttctacaacttgatgaatatagaaaaacttaacaatagtaaggagaatgtctaattacctggtcatgtcttcctccagattcatgaagaaccctgtatcattgatatcacctagaccaccacaaaacaaacataccatttatgtctctttagtctccattaaaaataaacatgtaaaaatgaatcaaactcatttcatttaatgatttacataaaaataggtcgaactgactcagttttaattgtgtgtaagcattatggcattcattcaaatacttctctgctgactgtgtgcaaccacatatacaccaactcagtgatgtttatttgcaagaagaaacccacatttggtaagaggtagtctgtcagcagaaatatcagtgtccttgaattaaaatattttttggaatatcactccaagatcccactaaagaaaaatcttttgtcctgataaatgccattgagtacttggtactaaggtatatatttaaaatcttagcatttttccagttttattcttatttaaaaatatcaaatacaaagaacagtgtaataaacaccagtgagctcatcacccaatattagcaaatgctaacatttttggataaaaagtacattataaaagtatttcataactttacccctaacacacagacacacacacacacactcagacacatatacacacacgagcacaattcaacatttttgtgtgtacattttcagattttatgtacgcatgtatatacacacaagcacacacacttattttttaacaatggagtcatagtttacatttagtggccaaattttttcctgtcagtatatatatgtgtgtatctattttttcaatgttgcaactatttcacttgtttccaatattttactgttacaagcaatgctgtgttaaacatacttatacacatatgttataaatgtacaaagagtaaatattttctaggataaattatcacaatcgagactgcaaaaagttatgttaaaatgaaagggcctgtttcagttgagtctgatttcaactggtatggaaaagaggggaaaaactatttctagcaaagtgaacaatatggacaaaagtcaacggcaagtttgaagaatgggtaagcctgtttttgacaggggtaggaagtgtgttgtgtggatggagggaggtggttatgtagctggaaagataatctgggtcctgcaggtatggtgcaagaaaacagaccagcagttgttcgacagttttgagcaaaataggatataattagaagtatgttctacgagagtttagccaccagcaatgtatacgattaactggaatgtggagagactaagggacttcagctactataactatgtagggaaagagagtctaaatgagaatagaaaagaaagcaaatacttatgagacttatagaggaagaagttacaggacttagcaactgatagaatataagtagagagagtaaaaattttaaaaatgatcaaaacatcaagcctaagcatttggagaatgctagtgtcatggtgggaaataagaagtcagcaaaaagagctaccctggtcagaggagagattattagtttggtcttgaacatttttgttttgcagtgcctggcacattcaattgaagatgtccaataagtattcagaccgtaactttccagttttagagacagttcagatctaaagatttaggattcatgtgctagaggccatagctaaatccatctctccttacccataaggacaggccagcagatagggagaaaacagcaggccaagcacagaatcctggagaaaactccattaaagggtaagacagaaggtaaggaagaaacaaagagatgcagaagcttagaaaaacatgcaagagggattcttgactgctttgccttatgtcaatacaacaataaactttttcagattgaatttttatttaaatcagttgtgagatttcttctgctccacgttttcaaaaatgaaacaggacattgaatagtcaggtgaggatttttctccaaatcaatcttgggaaagcttacattatgtatcttctgtatttaccaggaaatgtctctatatagtattaattgttgccagtatgtcactaccaaatgaaga

SEQ ID NO: 49041 - DNA, 3041 bp, Homo sapiens
gtgactccaaaatatatctagagctattcaaatcctctccctcttcacagttaatgctctggttcaagtccccatcatttcttacctctcctgtaacaagactactgtaactaatctttctaccccagttaggtcttcatattgtccccagattttatatttgaaagcaaaagtataatcatagtgcttccattgataaccttcaatgacagtccactgcataaaggataaagatcaagatccatgatacatcatattagttcttttgcaatcttgccacaatatacacatgaaagaaaatatgtttaaagtaccaacaatgatttaccagatatttcctttacccccacacctatctcctcatttcagtagctagagcactgtgcagtcactgtcttcagagagagctgctgctgcattaaaaaaatttatatatgtaataaaagccaagaagaaacctacacgatatatatatataaaatgttcccaaagcctatgcctttgagggttggagaggaaactgagcatgacagaatattttgtttaaatttcatgagattaagctccaccctttagactgaaaaaatattttccacatgctgagaagaaaataagtagttgagaattgctgactacataggcactggagggtccaggtaaaagaagcctgcctccttccacctaagcagaccctagagcaagacctcagaaaaggaaatatgtagtgagttgaagggacggctttagaacagcttccaagaatctccttggacctagagagacacggaaggaacagaatgacatcaaagcttctaagagaggaggacgagagagcttgacggaatgcctatgtagatgatgatgctgaacaacacttggccttctcactcatctgaaactatgttggcctccaagacacaccccagggaaaggtgagagctaccccaaaataactgagattgggtttttgccacatttactgaagagggactcaaaatagaaattatgttatacaaaataaaagttatgatttttgcacacttggattctggaataatagttacatttgctacatccctttctagcgtcaactcactccactcccccatccccatcttcaccagctttgctcacttctgtgtagccctggctgtaagcacaccgaagagtttactgttccctaactatcctattttcttccttcaaggctttatccattctgctttctctaactggaatgccctttatcaaaatttttctcctggaatatactcttcctccatgaataaactaaagtattacatcatcttacccctagcagagtgactcatcttgcaatagaactccgtagtaattgacagatgattcaacttactaagtcatacaaaaatagaagtatgactatttacacctatctcttcctcccactcccactggtgtgaggtcatagaaaactgaactatatctagtttatctttatatatccagtgcccaacctgttgtatctgctataacttagcatattcaaaaaatttacgagtggtttcacagagctactacacaagccagaccatttatcaaaatattccatccaaccattctcctactttgtatacaagtgtctcacatattttaagattaaagagagatacattagacctttctacctggcaagaaaagccttttctaaacccaagcaagactttaaaggataagactgtaccatttagggattttttatttgacctaaatacttcagtacatttagtaactttaataactgaacacttaagaacagtatgaataaaaaatatataacatggatacattagtatagtcttatcctttgatgatgcattgataattccctaattggtaaactgaaattatattgaaaaggtggttttcaaactgtcttccacagagacttcatgccaggcatcattccagacactgaagataaacccagaatgagagccactttctctaatatcatcggatttctgttcaagtaagaaatcctttcacttttaggcctcaaacttcaggtgacagggtaacactgctgacctatttagcacagtttttcccaggaacttccgtttttttttcatttagcttttctacccatttaagaagctctaataaaccaataaactactcttcttgtgcagaaagctccatcaaccgcagggaaggggaatttggatcttttgcctaaatgataaatccctatggcattggcccaaactgaaggctgtgactcagtgtagttgggcttactgcaggtgacagagatgattccaggaactacagtctttttatgtgagctgtttatatacctctggcctgaagagctgtgcctcttgcctgaccttcctgacacactaaaaatcaaacttacagggcagcatccaagagatttaaaagaccaagtgctggcatttgcttccaatttaggcagagtgtgaaaaccactagcagagtggaaaagataccagactaaaaagtaggattcctggcccaggaattcagctctgtcaacccgcaagcaattccattatggccacattaattcaacctcctgggcatgtatgtctataaattatgggttcaggctagataacatctaagccccttttcacctacaaaattctattattcagtcttttatttattcatccaatttcttaagcacctagaatgggttaggtactatctgtatattgatcttttttttttttgctgtttttctaatatattgcagagattacattgtaactaattctactttttggcttgaaaacccttaaccaaaaatattattataccatatattattatggtcttagaaaactgtactatattttgtttatctttatatatccagtgcccaacctgttgtatctgctataacttaacctattcaaaaaatttgcaaatggtttcacagagctatacatatacacacacactatatataagtgtgtgtgtaagtatatattatatataaaatataattatatgtaagtatatataga

SEQ ID NO: 49042 - DNA, 2386 bp, Homo sapiens
tatttttaaaaatgtatttgatttccacatttgtattttttctcttacactgaaaagcttggtttcttataatattaatgtgtttactaatttatcttataatttacattacagtttctaatattattaaacttactagtctattttacaatttactactaacaatgaatctatttagtgaagttttaaatattctataaaggcagagcaccatgatcaaaatttactttaaataattattttccctatatgattacattaccaatattatatacagatatttattgccagttaacaacctaaatgtacttttgaccttctgtctcatcagccaggccacaaacgcgatgtttacatagccatttaccggaagcaagagcctggaccacagagcagatcaccagcagcatatggctcacgtgtgggcgaccaacaccacttgaaaagcagaagttcataagacagaaacacatatgagcatccgcctgtctggggcaggaaagctgagaaagaggcacaccaagactaagggaaagaggccgggaagggtaaaaaggtgaaatgaaaagaggttggtgaatgactaagaacggttggataggacaaataagttccaatgttcgatagcagacgagggtgactacagttagcaatatattgtatatttcaaagtagctagaagacttaaaatgttatcaacacatagaaatgaaatatacctaaggtgatgtatccttcaaatacccggacttgatcattacacattccgggcatgtaaaaaacgcttccatgtaccccatttcataaatatgtaaaatattatgtatcattaaaagaaagaacaaaaaagacagggaaaatgcatatgctgtgctccactcagccaacaaacttctgctctaagcagggatattgattccaaaggctagcttgcgtttcttaaaaataattaaaaacaacaacatgtcatttatttcagagctggaggctagaaataaattactcaaatctcgcaactatgtaaactatgaaaatgaaacaagctagttaccttttattgttcagtttaaaaaagttcttcttctttgctcctccattgcggtccccttcaagatccattccgacctgaagagaaaccgcagctcattagccaaatgcatgagcctcaggcgcgctggaggtgagactaacctctagtcccccgtcgaagccagagagcagtaagagggagcgcccgccgttgatgccccagctgctctggccgcgatgggcactgcaggggctttcctgtgcgcggggtctccagcatctccacgaaggcagagttgggggtctggcagcgcgttctggactttgcccgccgccagtgcgattctccctcccggttccagtcgccgcggacgatgcttcctcccacccaccgcccgcgggctcagagagcaggtccccgcaccgcgcgggctgtgcgcgctccgggcaacatggtccagtgccactacggtttgggcgctgctccaggagctcctgagtctagatctaaccccacttggtccccatggacttgccagaggacttcacactatccacgcctcaagaagcccttctcccgtgaagaccaagttcaggaaatctgaaagcctgacacttgggaactgtcccatagtagctcccagctttgcgtgcccctacctcgcgctccttggaacggccaccaagacgtgaaattttggaagaagatactccgactttagtggaaagacctaaaggaaacgaacagcggcctctgcttctttgagcttggaagagccgctactcgaatgagctcaggcttcctgtggcaaagagagcgaagcggctgtgctcagcccacgccccggcgctgttcctgcccagccaatcagcctcaccacagatgactgctcccggcccggattgactgaatgctgattcctcgagaaactgcgaaacaggttgaatttccaggaggaatgttctggcttccgttgcacctctctagaaagggcaagtagagaaacgcgcatcagctgaatcattggggacatttcaacttatgtagacacgtctttcaaagttcacataagtcttcatatccatataactacaggacgtagttaagggaaattttctcgggattcgcatttaatacagttaatacaaaaactccgacctctccaattctgtatcacctttctgcttcctaacacctttgaaaaggctaggagaaatttttctgcagtggtctttcttcagcatgcttgacagtttctgagttacatctgttcatcctttatttgatgataaatggaatgaaagaaaaaggaagttttaaaaaatatatagagacaggtatttcaaggtacaaatg

SEQ ID NO: 49043 - DNA, 1117 bp, Homo sapiens
ttatttcttttgctgcaactaaaactccttacttgtaaaataagacagtgagtgtaaagcaatcagcttagtacctggatgtctatattccgaatgtttacttgtgtttatgttgttattgttaatagactagtaagtgatttgcttgaaagaagtttcaattaaaaatgaaatctggctataaagtaataagccaaattttctcctgtgcttagcaaattattctgaagattattcctcagggaaattcctttgacattcaacacatatttggttggaacaatcctactatgtacctatttcctcattctcttaatttataaccaaaccctttgccctaagatatcagcactgaggaattcctgacataaaaataacaatattacccgaaatggcttttgaattgcagagcttataaaaacaccatttcccttttagttttttttatcgttttatgattcatagactttgaacttgtttaatctcaaatgaactctctcccaggagcaaggtcaagttagttcaatgaggtaacgttcactcacttatttctttagaacacttagtattatttcacaggacatatctatttaaaatatatttccatatacaagaaacactgctagcagaccaatgaacagttggttagatctgactttacaattttaagttaggaaatattttattttaaatttgtattggaaactcattcattcactcaacagtattaatcaagtaccctgtatatgtcacatattactctaagtgcttcgtatatatccatgagcaaaacatacaaaaatccctgcctaggtagaacttatatttgatggtaagagtaggcagatagataacaacacagtaaataagtgattttgtatgttaaaaagagtaaagtattacggtgaaaaacagagcaggggaaagagagtggaagtaccaggtgggcaaagtttacaattttaagtaggatagtcagggcagacctcattaaggagataactttgagccaagacgggatagagcagaaggaaagttttgagtggtgccatgaatatattggagatcctcgaatactaataattttaaggttatttctttaaaataaccttaattt

SEQ ID NO: 49044 - DNA, 1737 bp, Homo sapiens
gtcagtcccgggtgcgggctgcgctggaggctgaggtgggagcgacatggtgtggaggggcaagaaatgtcggcactagacgcgccaagaaggagattctacgagcaattcccccctcgggccattgtgttgctgtttattagcccctgggagggcgtcaggacaaaaggaaccctcctcccttcttagtacttaggcccaaggtcgggtgtgggagccggcgcgctgctttctaggcaggcactgaagctacggcagccacgcaaataggtatcagccgttaaagcttggctacaggcaaggggggggcaataggcccctggcgctgtggggccccgcatcccacaatccccgcggctagcctgtgtggctactggcggcagctagcgggctgcgaaagcgagcccagcgtccttgacagcagcccacgcgtcggggcggggcttgagcccgctgctttaaaaggtccgcgcggccggccccgcccctctggtgccgcgattggatccggcgggggtagcgttgatttgataggcgcagagagggtggggctgcgcacgcgaggccgggggccttgccgctgcctcccgggctggggcacgagtggctgcggagtgtgggtggttgggcgtgaggggccgacgggctcgcgcgcgcgccgtctgctgaggtccctcgggaaggaggagagcgcctgacgccgacccgcaggcgcagcccggcagtcggcggcgcgccgagggcggaggtggtgcgtgcgtgcgtgtgtgtgtgtgtgtgtgtgtgtgtgtgtgtgtgtgtgtggagctcgggtgccaagggcgagccgtcagtccccgggtgcgagtccctgctgtcttccacacccttcctccctccaggctcctttcctacatccttcccgcgcccccacggttgcggaccgagcgagaacccccttaagcaggtgtggggggcgtgcggggtggcacgagacaaaaggggcacgggggtaagcccgccatggcctcccggagcctggggggcctgagcgggatccgcggcggtggcggcggaggcggcaagaaaagcctgagcgcccgcaatgctgcggtggagaggaggaacctgatcaccgtgtgcaggtacggcagcgcagggcgaggggaaccagcctcccgccggggctgagagctctgggcttccgcgcgggtccttgggggtcccgggcatgatgggctgccgcccagtgcccccgcctatgttgcgccagccaaatctgtgagcgcgcagctccttggacaggggcccgggtctggacaccgtcgcagccctggactttgtgtcagttccagtgctgaaggtactggagggtagagcttggggcggggctggaggaggatttgttttgaatgtgcaatctagcgtcagagtgaaagaggagggcaaggaagaagagctctttcatttaatgcccattcagctgtcagcgagctttggataaagtggtagttactgtgattgtttactgtgttgcccccaaatcagagtgcatttcgttgttttggcttgtttacattatcttcagccatttcatttcacacgttagttgagtgcctactacatgccagccattgtgtatgtgagcgtgtgtgtactatccacttttcagctacagtgctagtgctggttctgcagttgttattaagagtgggactgtggaggatacctagtctttatgtcaatgatttattttaa

SEQ ID NO: 49045 - DNA, 1853 bp, Homo sapiens
aatgcaaaatagttcaaaatatcctcttcctcctgaagaaacagatttttttttttttttggagaggcatgttccaacttataaaattaaaatatattcacaagcattttaatttgatctttaatctctgttttacaggaaaaaaaaatgagatgttactttccactccttcattgttgaaataaacttacactcaactaaaagaaaacaggtctgaatacaataaaagtcaacaggacagcgcaaatagccaactacccaaggacacaaagtgacctggaggcgttctgcggtggcgctgccgtcaaggccggggccgcctggccagaccctccctcagacgccccccggggccgccctcactcccgcacgtccctctgcagctgtcctcagccggtggggtcggcagtgaccgcgggaaaaccccgcttgctgtgcgacccagggcgcgctgagcaggggctgcggctgccgccgctgtccggctccggttccggccccggccccgggcccggccagagctgagtccggactcagccaaagcccctcgccttcagcttcccagacgtccgaccagtggaaaattagcatacctggggcagaaggcagctgcagggccggcagtcctggcaaacctagaaggcgggaataaccctggtgacgggcggggccgggctccggcgctaactgcatccactaggtttggtcaacacagagccgcgccaactctctgaggctgcgccaagacctgaagcggcggaccgagagcccgggtctgagactgagagagcaacggaatggaggcggggtagaggcggaaacacaacctgcagggccagagcgaggcgcgagaaggacggcggcgtgagggggcggggcgcgcagcgcgagaaggcaggcacgaggggcgagcgcgaggcggggcacggcgcgtggcgtgagacggggcggggcgcgcgtatcggcgccgcggccgcgtgacgcgttttcaaatcttcaaccgccgcagcccactcgtttgtgctttgcgccttcctcctccgcgccttggagccggatccggccccggaaacccgacctgcagacgcggtacctctactgcgtagaggccgtagctggcggaaggagagaggcggccgtcctgtcaacaggccgggggaagccgtgctttcgcggctgcccggtgcgacactttctccggacccagcatgtaggtgccgggcgactgccatgaactccggagccatgaggatccacagtaaaggacatttccagggtaagaagcccctcctccgcctgcagtccctttaatcctttcctcccctcgtggttccaccattgattcttcagacttctcccgccgggtcctcagcttcttttcttctgaccggcctctggggtctgaaggaaggagcccccgttcagtgttttgcctaagaaggaacggatcctgacccggcccctcgagcgctctgccgtttacagcggcggtcccagattgattcccggtcgtgccttcggttgaaaactagcaaacaatgtgcagatccgggacctcgccgggactgcggcgctgtctgctcccgggctctcgcatatgctaagcctccgcccgggcccttggaggcgacggactgcatcctcaatttaaagtcagacgcgctcgtggcttttcgcttcaggattagattgagtgattgtgggtggatttttggtcttacccttgaaagtttattttcctttcctcataagttgggggaaagcattgtatttcaaacaccccattgctggtttcaacattacaaacagggaaacaaaagcaaatttccattttcagtcactttatttggtga

SEQ ID NO: 49046 - DNA, 1155 bp, Homo sapiens
cgggctaatttttgtatttttagtagagacagggtttcaccatgttggccaggctggtctcaaactcctgacttcaggcaatctgtccacctcagtctcccaaaatgctgggattataggcttgagccaccgcaccaggcctaatagagacatttcaaccatgaatctcctttgttaattctttctatgtcttgcagttaggttattttttttttcttgttgctttcccacccagctttattaagatatgattgaaaaaaattgtgtatatttatggtatgcatgatgttttgatgtatgtacatactgtgaaatgattacatcaagtgaattactttatctgtcacctcacgtacttttcatgtttttatggtgagaacatttcaccatttccaagtatataatacattactaactgtagttaccacagtgtgcaatagatctccagaacttattgccccagtataattggacttttgtaccttttaaccagtgtctctctgtacaccctcctcacttcctccagagtctggcaccatcattatactttctctttcgtgagttcaacttttttagattccacatgtaaatgagatcatgtagtatttgtctttctgtgcctggcttatttcatttataatgtcctccaggttcattcgtgttgttgcaaatgacaggatttccttcattttaaggctgagtcgtattctattgtgtgtgtgtgtgtgtgtgtgtgtgtgtgtgtgtgtgtgtgtgtatgtcaccctgttttctttatccattcattcatccatagatacttagtttgaccccatatcttaggtattgcgaatagtgctgtaataaacatgggagtgcagatatctctttgacatactgatttcattttctttggatgcatacccagaagggggagtgctggatcatatcatagttctatttttaattcttggagaaacctccagattgtttttcctaatggctgtactaatttatattcccatcaacagtgtgtgagagttcctttttctctacatcctcaccagcccttgctatctttttgttattttttgataaaagccattcttacttgtgtgaggtgatatctcattgtggtttcactttgcatttccctgattattaatgatgttgagt

SEQ ID NO: 49047 - DNA, 1651 bp, Homo sapiens
caacgaatggcagggcttcaaattctccttttgttgttacagcatttatggtattttaagagcgttttatgaacgatggaaggctggagttggtaacattctgagacgggtgtagcctagggaagagtaaggtgtccggccgggctgtatctcgtgggtggcgagggaacattgcctgtctcggaaacagttcccaagacaacgcgcatcccagacgcccggcgaggctgccttcctacaggtcttttacttcagcaggttttccctttttttccgtcccccttctcactcgttttttgtttgtttgtttgtttgtttgtttgtttgttttttaaagggaggaaggtatatcattctagaataaaatgactgttgttgctctgggaggcaaccaagaaggcgggggtggggtggggtgggggtcagccaacacccaattaacacgatttcacgccgcgtatccgagaagccgcagggtgggcttctagggtcccaatccaccctcaccttggccccgcagggccatccaggagaagggacggggaaacgtggggagaggccgaaccccaggggcctagggcgaggccgcgagcgcagggagaagccgagggcggaaggagcccgggtagccgcccagcagcgcctcaccccgctggccgcagcatctccaaggtggcctcttagcgccccggagccgcctgggccgcgatcccgcgcagtcagcacttaccccgcctgggtagtacccgccgccggcgccaggatgccccgggtacgccatgctgcagactgcgccgcagccgccctcgccctgtgcgccaggcctctccgccccctgccccgccccgccctgccgctagggggccgccccagagcgcaccacgcgggcgtgggggacgcgctccgcagtcgtctccagctcttgcctgtgcgcgcggccgtggctcccctgcctgcgcgcttcttcgtatctttgccattacggcgctaatgcagtgcacgactgaaggtccagtggcggcctacgacctgcgaggcaattcacaccagggactttcctccctccaaaactaatggcacattccaacaccaatacaccaccccaggaattctttttttttttttttccttcggacttggctattatctggcacatttcttattttaaacaactttattggacaggacggagctattataagcggagcgcaccatcgcgaggcaggggctggatgcgttagggcaagccttaggtgccagtgggtgaaggagtctttgaaagatggaaatacgaaagcgcccttggaaaataagaattaacttgacgaactgtgtgcaagggagagtttggcttgctgttggttgcagagttcactgaacgacaacggcgtatttccttcctaggggacaattccttgcctgtttaagctgagcgtgacttgtgtcctgagtaggacagagggcattttccgggcaggacagactcacacatatcgttcttaggaaaatgaattgtttgaattatctggatgattcagacaaaacaatccatttccctaaaagtattcagctactttttatataagaaaagtttagaacaaactaatagtgtactggtaagtattcaggaagataagagataggaacttct

SEQ ID NO: 49048 - DNA, 1607 bp, Homo sapiens
ataaaggtcactttatgactggttctcaggcaagccctcgaaagttctttaaagccttcattgttctcctaaagagaagcagtcctggagccggggtagagcagggtaggaacccaagagcacctagggcttggttattgcccatccccattcgcatctcagtccctttatccagccaatcttgatgtcgcaaagtttacacagaaccagagataaatagagaagccagacttgtggagagaggaggggaagataatacaatctccatctgttcaataagctgggagaggagggaatttgggaagaaaaattcccaattattcatattgcagctctggggaaggaagaatgactgttcttgagtcctaggtgcctaggtacagtagatatttccagaatgccaaaattccatgaagcatatatataagtcagctacatgtaaattgggagcttcttaattaaaataagatatctcttactttatataattatttttcagtagttacttgcctcttttccatagctgggaaatcagtggcaaagctgagaaaggaacctggattaattgattctcagcttggaaacccatggatcagtagaactacaaagattaggaactttcttattcctgattagtagaattagaacattggagctgcatggaatagtctaatattatatacatatcatttacttgcctgcatcttgagttgaagtcttataggtagaagctggtgatccttagaggattgccttcttgcagagtggccaaatagaagaatcaagaagtataaactgtaatagcagatgaatcacattgccctcttgacctctggaaatcagtaaccaactataaacattactcaacagtgtaggcagatttccaattagccctatagaggccctctatgaaatatgtttatttcattgttacaaagaatgacctatctaaggcagctaggaaccaataacaacagtattaaacacacatacaggtaaatatttgacattccttcaggattattatctctgtctgagaattctgaagacctgcagggctttgtgttggaacagtcatatgtgggagctggctcatactggccagtgagcctattttcaggcatttttccagcctttttttttttttttttgagagagtctcgccctgtctcctaggctggagtgcagtggcgcaatctcagctcactgcgacctctgcctccccagttcaggcaattctctgcctcagcctcctgaatagccgggattgcaggcacttcccaccacgcccagctaattttcgtgtttttagtagagacagggtttcaccatcttggccaggctggtcttgaactcctgacctcatgatccacccacctcggcctcccaaagtgctgggattacaggcgtgagccacggtgcctggccttttccagcctatttttaaacactgccaatcgtataattagaaattttttaacttactgaaaatcaagataataaatactccaaatgcatcaatttttaatgatttttctatatgggtagtatgtaattttgtgctgttggatgttaattctcaattccagactcagtcataccatgtt

SEQ ID NO: 49049 - DNA, 612 bp, Homo sapiens
atttcatgcagattgcacagtgtatgtagagtttgcacctttttcctggggtttcagaaatttgtgctttccattttagcctatcaaaaacacctatattcttaccggagcttatctgaagttgcacgcctccatcaaaagcagagcatttaggcctttgtagggaggtagaagttatgggagaaagggacaagaaatacaggacattcctgcactcccacagaaactctgaataatctaattaagtacatctgaatcattttataaacaaactggcgactgatatcctgaatgggtgtcatcaaaggtcatgaccacatgtggggaagtacctgtagatgatcagggaactttgtataaaagtgcagctgtgcctttgaaaatttcttactagcatctgcacatgcagactagtttagcaatttaccttctattggttgattgccaatcagttaacacctagttttataaatcaaaccttcaaactgctgaacaatgccttcattattctactgtagaactggtttgtgtcacaaaagaatgtgtgactgcctatctcctcacttaaaaaaattattttatcctaatatttttattctctctttcatactg

SEQ ID NO: 49050 - DNA, 1309 bp, Homo sapiens
gaaagctgtatactctgggctttttagtgacatgagtcagtaattgaatgtctgttatttgtataaaatgggattgggtaggatgagaaaggcacctgctcagtcagacttctgtgactgtaatgcctactgaggtggcttcatcacaacatgtggtcagaatgaggaaggcatgtgttgttaaaaaaagcaaaacaaaggcctttctgagttttcttgtagtagctttgggacttggataaataatcaatttctgtgactgaagtttttcagctacttcctggtatattcagaaatcattttcctgtctcagaaaactttttttctacttctttcctattttagtgggggtggacagatagaatccttctcctcctttttcctgaaactgcaaagggtatagtgaagaagccaggccattgacctggttttaaccaatttctaggactcctgccaacacagaccaggaagcaaaaccaaacaacattttactgcccacctgcacccaaaaaaagtactgatgggaaaatacgtcagacactgacagtattggagtctggactagggataatgtcaggaatgacaataaagaacttaaaaataagacctaaagaacttgactttaggttcaagaggaggttgaagagaagagttgagtatgtgggataagtgaataataatattttaaaacatcactgacaaagcctagaagtgacagacagttgcagctacttctgggaattgaaaataggcaaggaaaccctttcctctttatctgggtctctgattccctgggtcacaaggtctgtgttaattttggaagcttctaaggcactggcagggctatggactgactatcaccaataggaatctggaggcggcccaagaccacatctgctgacctcagaagaggtcacttaaatacgatgttaccaaagaacaagatgtgcaaaataatttgaagagatggagaaatatttgagttaattttttgataaatgcagctggcattaatagagatgttctttctgtaattcaaaaactgaagatgtgtcatctgctttcaccccagcctgctggtacacgccatgatatatgaagctgctagcagagctatgaatcaatagttgattggtagttactgttagtactggaagtattattggcaacagcaattccagtccaggcaatttgtgcctagtgccagtaaaggaaggttagttagatttttcacatgctaaagaggagacaaaaataaatttaaaaatattagagtgaatgaggtcctgttcactttcaaatagagtta

SEQ ID NO: 49051 - DNA, 695 bp, Homo sapiens
acagacatattttaagtcactttgtaaatgattcatattcatgaaacttaatgcaaactcaacagcacatttaaatttaagttgaaataggctgtctccacattattgtgaaagcctacttttactcatcgtatagttaccttgctagaaaattgcatgttgagatggaatttttactttctcttctttctggaaaataatcaaatgctgttactagagtgtactatttggtcaaaagtattgctccataaacattaggtctgaagttctaggttttcccatatttatttccccagtctggattcatttagtaaattccagattccccagtgtacactgcaatagaggtcaatggattctcatgtcactggtttgtttactttttatctccacttgacctagattaaaaagtcaaggttttttggtaagagaaattatctgaaaaggagctgtaacattttggtgatggttaaaatgaatctaaaatttctatctatgtaattgtggagagattggagtccaaaagatttggttagtttgtttaatcacagtttcactgcttggctgcaaccatggtatgaaaatgtgtcaattaggcctgtgattcttatcattctgtgagccactgtggatgtaaatgactgactcatttaattatgctttggatgtatagacctggctaacgttttggatgt

SEQ ID NO: 49052 - DNA, 1062 bp, Homo sapiens
gtgctgtggtatcataggcacctgcacttttctttatgacacatcttcatttgcaattgatatttaaggctctgaatctgtttctcccatgaggctgtaagctccaggaaggctggaatcttgtctgtctggcttaacactcttatctctggtatatacacagtgcccaacatgaagcagttattcaataactagctgttgaatgaatgaatccagaaagacatgcctataaacatgctaatcgagatgggatttctagtaattattttgttagttttgcaaatttttattatctaagttttggtacttactgtgttttctttgtgcaataatgaaagtaaagtcctgttatatcacctctatgtactattgtaaatcacttcagtaaggcagcaatagagctgtcagatgaaattcatattttattttttgtggacctctggaataggttagtagttttcaattgggggtaattttgtgatacgtcctccctccccactagacgtttgtcaatgtttggagatatttttgattgtcacaattgcagaagtgctactgacatctagtgtacagagggcagggatgcacaggacagtcccttaccacagtgaaaaccatcaagtctgaaatgttaatagtgcaaaggttaagaaaccctggcacagatggatagagcctagtaaaaaaaaaaaaaaaagtttgtataacttccaaaattggttgagatgttaaataatatgacatcagaattttaaaagttaatgaataactaaaagttaataattaaaagaatttattgtaaattttttggtggtttgtatttgcttcatggtgtaatttgctgatagttttagtatttaatgtagcatattcaccaatattatctatgtcagtagagaactttatagtctgctacgtgtttttctctttacaaccagtgaaagcggttttaaaagaaaagcaccaattgactgtttacatactgctgaataaccactttggcagatttatttttttaaagaacagttcatgaataaatttagccaaagctgttaggcagag

SEQ ID NO: 49053 - DNA, 754 bp, Homo sapiens
tcaaatattaaaattatttggattacccagtccttaaaattgtcaactcttttagctatacaacttgagtatagattgcagttgctgtgattatatttgctcctaattataatttttattaaggatagtttggatttaagagaggccacacttttttggtttggttttctgggaagagtaactttgttttaatcattaacagagttgcaagtgtaagttaactttcgtatctggcatttactctaccttaatataaggtagagaaatagcctggcctagtcattgttatatgggttaaatctctcatctgcttctcaaaataatgcatctatctaccatggacccacatttaatgcctatctcatttgaggggtgtgtgtgtgtgtgtgtgtatgtgtgtgtatgtgtgtgtgttgttagaaaagttcttaaaacttttcagtaataagccattatcatagtagaaagaaagcatacttttaagctttgcctcttgagcaaactgaaggcccattttagatctcaggctcacagggtccagggaggtgatatttaataagtttctagaggttaaggccaatggtgtgacctgtgttcagtgactcattgttgttagaaatttgcctccagtgatctatttgagaaccaggctagttttacattttttataaggtcattctccaagacctatgcctcttaaaaaaaggaaaattcttcacggtcatattattatattggaattcaagtgcaggtc

SEQ ID NO: 49054 - DNA, 718 bp, Homo sapiens
cttgacaactgagcctattctactatatgtacaatacctagcccataataggtatacaatacacatttggtaaaactaattttcaaccaatgacatgtatttttcaactagtaacctagaaatgtttcacttaaaatctgagaactggttacactacaagttaccttggagattcatatatgaaaacgcaaacttagctatttgattgtattcactgggacttaagaatgcgcctgaataattgtgagttcgatttgttctggcaggctaatgaccatttccagtaaagtgaatagaggtcagaagtcgtataaaagaggtgttgtcagaacaccgttgagattacataggtgaacaactatttttaagcaactttatttgtgtagtgacaaagcatcccaatgcaggctgaaatgtttcatcacatctctggatctctctattttgtgcagacattgaaaaaattgttcatattatttccatgttatcagaatatttgattttttaaaaacataggccaagttcattcacttcattattcatttatcaaaatcagagtgaatcacattagtcgccttcacaactgataaagatcactgaagtcaaattgatttttgctataatcttcaatctacctatatttaattgagaatctaaaatgtacaaatcattgtgttgattctgcagggatcctgctataagtaagactcagtccctg

SEQ ID NO: 49055 - DNA, 974 bp, Homo sapiens
ctgagtacttgcaacacagacattatagcccacaaagcctataatatttactatccagcccgttataaaacaattttgattacctctagtttagatcaacgccttatgctatgtaattacggcaaagtaaacacatacgattcatcttctttttcaccgaaatcccactgaaattaaagaaaagctatggctaaagaaggcaccatagcatactgaaaaacagaaaagggtagcatcagtggaccagattatttgaggaatttccaggacataaaaaacatctcggagagaggagacaacagtgagatcagattaaaagaaacaagtatagagactgcaccacaagattcaaatagaggctattgcaaaaagcagcaatagtttctaagaaaaccgcagatgagtattattttccaagtaagcaagctaaatcaaccaccgagaaaacattgggtgaatcattaaaggactaccatcagaagatctggccagtgacccttctacccaaagacttgcacagctggctacagatctcatttataaacaaagctaaaaggctttgggaaaggctcatggcttcagtattggagtctgagaagcagagtacagcaagactgccacagtgacagcagaggcacaggaagaaaagggaagtctgactagagcatttgccaccaagaaaaagtgtcatgtacaggtctctaaagtaagagtactgaaataggagactcccagaatagcttcaggaaaaagtacaaggtaaggacaggaagcccatgtttacccagtaaacaaactacttccccatagttatggattaaattatgcccccccaaaaagatatgttaaagtcctaatccctggtacctcagaatgtgaccttatttggaaataggttattgcagatgtaattagtcaaaatgaggttacaatggagtatggtggtctctcaatccaatatgacttgtgccctt

SEQ ID NO: 49056 - DNA, 2915 bp, Homo sapiens
tagagaaagacactagacttcagagcaaaacctctgtaagatgaaggggctgaggagggaggggaggaatgcacgcctttgcaagcttgatggaacttcaggccaccaaggataaagagaaaaatcccaaaaacttccataaggaagaaacagacttttttctttggaaagaagaatctgattccaaataattgaggagacaaagtaggtgattatgcacattgctaagatttggctctagaaaaagctgggcagtagatggtattgctagaagggatgtcatcaatagtgagctaagtgtactaaaattatcatttttctcacaaagcttcatgttctgaagggaaagaggcaattataattctggtcccagctataaatgggctggtgccaatgtatcatcacccaactgcttctctaaaatccagctagcatccgtctctcataagaagcagcatttatacgaagacattctaatgtctacacatctataatccaatatctgtaatataatctataatctaatatctgtaatccaatataatatctgtaaatgctaactagcatcatttcaaattataaacccctatgaagtctccctgataactgacaatgaagccagcatacggagacttttccagagtcatgagcttgtgggtggcagaacaagggctgggaggcaggcctcctgactttgtagccagtactggtgccaccatgtcatgctgacagctcagcaccaatccttctatactctcgtgttttctcctgtttgtgataaagtatgtacatctgtgtcattggaaggcttggagaagagtccaaaggtgcaaaacaaagcaaatctccccacgcctggcagaatcttcagtcctggcctaatgagctcaccagctcagtaagttctgcgactgcttcgggttaccaaaagaatagagtatgtaacagtgctaggaaaagagacacttaaaaacccacatccaggcattgttcaatgactgctcataaatactttatggcaaaattctttctggtggcacagaaggccatgaacaatctgacacctccattagtcacctctgttagtcaccactacgacttcctgacccatctctgggtttcacttcagtttttagatacccagccctaacaattaagcaaaacttcattgatagttcctcttcaaaagtatttccagaataactattaaaatcccatggactagtcaagatagtgagatatgcttttgagtgaacagccaccatttcttccttttagagatttattttttaacttaacaaaaagcaaatctaatgtgaaacttaatgaaaattgtttcaaaaacttgaaatgcaactacaaaatagcccattattgcctaagctttctatacttaactagttttctaaatctatattacataggctagagaaataacatattgtttttatatgtacaatccaaatctagtctctccgaattttctttaaggccaactattttaatataggccagtattttactctattattcaatcgcaaaccacgtttctttcctcacagtagtgcattttgacaaaatcaatcttttcattcttttcagcaaataatacagaaattgggattcattcatgagaagtcagtgaaaataaaaatgatttcagattttctttacatttgtataatatcactagtagaggaggaatggctttccagaccacttgttaggaaaaaaatatgagtgggaaattacactaagcctatataaacaattccaaagtagaattctcttttctccttggtaaataaatgcttgattttcataattcaacatataattttaaactagggcaaccaaacttgtgacatgaaaagaggaattttattgttaagttacactggtatactgcaaagtcataccaaaaaaaaaggagcaaaatatattttttaataatcttacacaagaatgctcaagaatcttctacatgaggtaactacagaaaaaaagaacactaggtcagctgaaggctgaactaaatttgttccataaaagttggtgagtttcatttttcgcttctaaggggataaaggaaaaagaatgtgcattgtgtttaagaaaacccagaatactgccaaaagtttgccacccactttggcattctgcctttatcctgaaagataatttcttctccattataaacagcctatgtgagatgaactgtcaacaagagggaagctagagtgagaaacagagaaaaagaacagcatcatgcaaggaaagttatgaaacaaattgactcttgattctctcttggcttgcctttcttaatgcaaatagaattaaaaagtcaaatagccctaatgttagccaggtgaagtgtggttagaaatggttgactggaaattcccttgctttcatcaaacaattgttatgtgaatattgcatcagcttggtccttttgatgttcctacatgacttaagaaaactttgtatttccagtagtgtatttccaatgacaaaaactctgctgtgtgattttagaaaatcactaaaattaccagtgcttttgctagatctttcacagttgcaaaaacaaatgtttttgaacaaggctctatttttcatgaaaatattcaactgaatgcagggaaagtaaatgcaaaatatctagggaaggcaccaatcaaatcatgcaagaagagatttttctagacttcaaagaaaaagtattcagtgactccaaggtgtggggcaagggaggcaggggagtgatgaatttgttttctttgcattgttccacttccttgtttgctgtgttgcacaaactctattgaatatcaagatttggcctcttatgaataagatacttaatagagaagaatgtcagttttttcaagcccataaataccttttaa

SEQ ID NO: 49057 - DNA, 1192 bp, Homo sapiens
gggttgagggccaagagggcatcccctgcttgggcctcttcatgacatgccacatgtctctggccttagatgggcatcagcaccacttgaagaaggattccgccatatttggtgacctatgattaagtttccctttagtccccaggtgctgccctcagcttttggcatctctgtagctggccaaaatagttttcttccccaaatggtttccttaactattgtggtaactgtagtttgaagggcaaggaattgcagactccccagcttgaatttgttaaagattggcctcttgataagggaagagaatgccctctgaccagataaactacatgcagtgatttccccatggatccgctgcacaacttaggcaatgatccgagagtctccaccaggatttttctcttagcaccaggtctgctaaactaaaacgatccagatctggtccctcacaaaagaagcagggtttttttccttatttagctattgcctgggtcctttgggtcggggtacagtaatttcttgtttcaacattacgaaaacaaaaatcagaatgttatgtcttgccacacacacaaatacctcacaggcacagggatttgtcttgtgcctggtgaagcctaattgctccgttccccaccagcttatcctgtccgagtcttccagcaggggggcaccctagtggctcttaactacccatcttgtgcccccaaagagtgccatcagaggaaagaatcagaaagcaaaaccaaaaataaaaatcccaaattggcgcttacctcctggctggcttaccaaaaatactacgttaccagctgatgttgcaaagtcccaggttcttcactgagcaaagaactggacatgacacacaaatagcaaagcagcaaaagatttattaagcacagtacaatttgcaatggactgggctgacccacaagtggtatcagccccgatttgtaacatttcatggccttttattatgtttttttactctaacttactcaactttatttttttgtgaccaattgctcatccttgcctttcccttattgcaccttaaccttactttatctcttgtaggctaattgctcattcttgcctttcccttattgtgccaacttactgtttacttctttttatctagtatgctctgcttttgtttttgttttgcttttgtttttgttttgagatggag

SEQ ID NO: 49058 - DNA, 1715 bp, Homo sapiens
tttggtctggttaataaaccacctagagggataatttttaaacttaatttgttgaaatggtactttactaatgtatgaaaaaaatttccccaaatttgagaatttttggtaagttgattttatatttgggaataaagatctcttgcttcttctactgacaccttctacacaaaagataaaaggtacttttacttggtaatccgcagggagaaaatttacagaaacccagagccaaaggtgctctcaggggatcccctgaaacattcaaagccattgcggccccagaaggtaaatggctttcgcaggaacacaggtctcctgactcacggcctaaccttcctttcccccacaccaaagctcgcgcggcaccagctagagtgaaggtcaaagtcaacagaataatctctgcagtccagggtctgtgagggtcctcctatccgagggagttttcatgaaagggcatttccgaacattttattccaaggacacagtctagtcaaaagacgtttgggatagggtaaacatgaggcaaaagaacacttacaaaagaaaaaagcgcagtttcttggaggcttgtcagaagctaagactggggagatgagaaccagggcccttggcgagagttggggtgggaatcgcgtaagaaaagcaatttctagagcggaaaggtgaccccacattacaaaaagaaatggagtagaaaaataggcttgactattctaaagctgcttcagaaagaatctccggaagaccacggaggaaccccgcaggggagccaggcggatactcagccgctcgcggtagaagggcgcgcaaagctgcggagccgcgtgtgtggagctccccagtgcactcactgctggctccccctcggtgctctgggcccttcccagctccctccacacagcccggctcccttcacacacccccgccccctccgagctccccgactcctccccgcgctccacggctcttcccgactccagtcagcgttcctcgggccctcggcgccacgagctgtccgggcacgcagcccctagcggcgcgtcgctgccaagccggcctccgcgcgcctccctccttccttctcccctggctgttcgcgatccagcttgggtaggcggggaagcagctggagtgcgaccgccgcggcagccaccctgcaaccgccagtcggaggtgcagtccgtaggccctggcccccgggtgggcccttggggagtcggcgccgctcccggggagctgcaaggctcgcccctgcccggcgtggagggcgcggggggcgcggaggtgagcgggtcggggaggagcgcgaaagaaggtagcggcggcggagttgagggtcaagatgcagtctgcgccacgcgctgcatccatcctccccgattctgcgccctcaccgggcgtccgccctgagctgcggggtccctcatctcctggcaccttaaggtggaaagtgagaagggtggagaagggtgtctgttccactgattccccctcctcctcctcttggttcctagagctaagggcaagtcctgaggttgggcccaggagaaagaaggcaaggagacattgtcccaggtaggatgtgtcccagcaggaaaggacaggcaggttactttcgcccccttgatagtctccctgctactttgggttgatgcagggcatttcatggaagatcatgcagtgctgctttgcgaacaggtatttctagc

SEQ ID NO: 49059 - DNA, 1109 bp, Homo sapiens
cttgtgaaaaaatgcagaatgtctaacctccctctagacctaaagaatctgagtgtgcattttaaagaggtccccaggtgatcatatttgcattaaagtttgacaagtgcctttctagtgagtcattcccttggaaacagtggtctgctcaggtcagcaggatcatgatgcctggagaactggggaggggatccccttgtagaacagaaagaagagatacagtcatggaaatattccgaattttgaatattatgaaacaacaggaacaaagtatgttgtgcaaggagtgacgcattttaaggaatggcattgcctttcccagaaagtgaagagaggaaattggaaaattgtgagtggaccttctgatactgctcctccttgcgtggaaaaggggaaagaactgcatgcatattattcagcgtcctatattcaaaggtaactactactctttcgcaagtgtaatttttcattactacaaacaacaacgtaaaaattaacataagtgagggtcagaaagccacatctactatcgccaaatgatgaaagtattagattgaattctgaatcttttactagagtgattttcaatcttggttgcataataaaacatctgctaatcttttttaaaaaatgctgttgctcaggatgaaccccagaacaattaagtgaaaactgggtggtaggggggtgacccgtcatcactgtgttttaaaacttgccaggtcattggagaatgcacctagggttgagaaatactgctttagtagctcattcagaagcagctctgagattgcagttctgctactccatgtgccaaaacagtgggactttccctcactaccataagcgtagtgccaagccaggtcagcaatattcaggtcaccctcactggccagttttcagaacattgagggaagtaggatttatttcttgaagaagcctgcttagactaacttttaaaacaaattgatacatgttacatatctatggggtacacatgagtatttgttatatccatagaatgtgtaatgatctggttggagtttttggggaatccatcaccttgagtatttatcatatctatgtgttaagaacatttcaagtcatct

SEQ ID NO: 49060 - DNA, 1191 bp, Homo sapiens
ataatcttgaccatacgggatgctgtgccaagcaccacttaacaaacactgtcatctcattcaatcctcacaacagtcctattttacagatgagaaaagtgagacttcaagggataactcgctctagattcaataaactgactcaaaagccttttaacattctgtacaataccttttatgtttgtttatttaactgtccagttgggccactaaagtacagataaaagctggggaatgtaagcgagactggtcacttccctggggtgagagaaacgctttcaacactatccgtccatcgtatcacgcctaacgtatcccatagacatccctcacccctccacccactcatgcctgtttgaagcaagactatgaagaccgaaacacaccgggagcctaaggcaccactccccgctacctaccgaggtgcatcctgcaggctccttaccgcaagcctgcaaactcgccctgccgggcgcggagtgcaattaggctttggggtggtttggctctccggctttccgtagcctctggccccgccccctagcaacgcgctggcttgtgttaacaaccggcccgggatcagaggtctgggtcaactggggggcggcagcggcgctaagcggactgtatggcggtggcctaggcccctggcggaattttgggacctttcgcgactctagcgactctcaggctgccttcccttctcggtggcggggcctctttgggcccagcggctgcgggcgcactgtaggacaggaagatccccccactctccaccccgccgccaccggccatgtggacagaggaagccggggcgaccgccgaggcccaggaatccggcatcaggaacaagtctagcagttccagtcaaatcccggtggttggggtggtgacggaggacgatgaggcgcaggtatgagcaggtgtctgtgctttcagaggtggagggggtgggagtgaagtctcgagacggggtccagacctgggggtggcaagggtggaactggggacaggagtgaagatgggggaagccgcgggatggagattccaagcgcagagctaatcctgatcccccaccccctgcgaactgcaccggttgcgaggggctggctgttgtcaaccatcctgtctggggaccagcgctgtgtggtcctcctggagggtcctagcaaactgagtaggcggggtttt

SEQ ID NO: 49061 - DNA, 1781 bp, Homo sapiens
atcagcagaaatttacaatgagaagccaacccaaaagaggacatggtagtattaacagataaaaagtgtagtttttgttggtaacattattttttaaaatacccctgttgccattatttttaaatattgcttccaagagtgttgacagtcacttgtattataaatacatggctcactttttactgagtgtcaacttattctttgcttaatgactggtaccctgcctgcagaacatgttactatctcatatgacaacagtatgaactcttaactttaaatgagcttccttcgctgattactgactgcgagtactgctcttctgtttcttggtttttttaatggctggaaacattaatttaaactaaaataattgtatataagatgaaatgttgaacaaaaactcttcatgattttagttagaacttccagtttctactacgtactaataagttatattacattttcttccaaatgatacatagatatttctgactcagaggcaagattctggaaatggatgggggaagaagttggtactctgccctgggattatgaaacaggaagctatgataaattatctaaatttacaggaactaaaacagtggaaaagcagacgaaagaccctagaatttcccataagcctgcatatttggatagtcttgttggaaaagcttagttgttcttgttgcctaatatgttttaaaacctaagtagtgattttgcaactccaaaagaacagtccgaaaaataaataaaatttagagttagaataatcttaaaactgtcttttaagtgatatcttttgcagagattctcctgaagctagggtcaggctttcctttgtgcttcctccttctttccacttgccaccccacttgctgaccacctccagagatgagcgtcttgcaagggctaatgcaaaagaggaattcctaattattcttttactctcagagagtccaaccagttctagtttagttctaaggtcgatattactgactaccgctgtccttgggcattcagagaacctggatcatttccagagtcccacagatcattttcagatacccttggggatcatgtttataggacttcaacagagtagatgcaatccagtttgaaatacaggctgaagccaatttaattgtagtttagatatgactgaaaacgaaccttcctattcgccaaccccatgcagacagcttgaacataaaactattacccttgcatgtggggcagctgcttaaaaactcactctcttccagtctgccaacaaactgaagagcaaagttcacctggaacttctctaagcaaagaatgcattagtaaaggcaaaaaattactgaccctctagttagggagaaaaatgctaacccatatcttgtcaaaataataatagtatctaacacatgtagaacttacaacatgctagatgcttttctcagcccttttctcatattagctaatttaatcctcacaacaatcttaaatgtggtaactattgttatacctgcttaatagatgagaaaagtaaaacacaagtttacatgggtagtaaatggcatagccaggatttaaccttagacagtctggttctagcatttgtattaataatcatcattctttcttccctagaaaggagaggctgaattgattgaggggccaaatgtataaggatggattcagggtactgtttatatgtatgtatgtgtgtgagcatatgtataaaaatatgcatataaattgaacatgatccagtttgaatctctgagaatattttt

SEQ ID NO: 49062 - DNA, 595 bp, Homo sapiens
atcatacaagattcaaatggctgaagttggaggattagcaaaaacaatggtccagtcaatgaccttgcttgaaaatcaacttgttgagaaactttgggtacttaaagttctgcagcatctctcaacttctggtttgtatattattaagtttaaacacttcattgtcaactacttttgtttatgtctaaaaatgtcaatattgtaaagcacaaataatttttaaaatttattttcagaagttaattgtactataatgatgaaagcacaagcagccagtggaatctgtactcacctcaatgacccagatccctctggacagcttttatttcgttcatcagaaatactttggaacttgctggaaaaatcttcaaaagaagaagtcatacaacagcttagtaacttggaatgtttgctgtaagcgtatgtggttagataggaatgttcttttaatcttaaaatgacagccagtgacataactaacatctttgtttgaatctgtgttcaattatgttttagattcatgtaatggctatgtttcaggacatcttttttgttccatggtataaatgaatctgcacaataacaagccacactt

SEQ ID NO: 49063 - DNA, 2501 bp, Homo sapiens
tgatagtaatcaacatctgttgctggtgttaatattcaacattaaagtaatccacagagggaaaatacaactactgcaggttaaatgacaactacagcttttctgattggtggttgtaagcagaaggtccagtagcagcaaagtaatcaagacggggttttcacatcatgtctttccaaataatcactgtcctaagtgaggagtagaagacactgtcacattgaggtattagtcagttttcacagtgccataaagaactgcgcagactgggtaatttataaaggaaagaggcttaattgattcacagttctacatggctggggaggccttagaaaacttataatcatggcaaaaggggaagcggaaacaagcaccttcttcacatggcaagcaggagagagaagaaagaaggaggaacttccaaacacttataaaaccgtcagctcttgtgggaactccctatcaggagagcggcaggagagaaacagccctgcatgatccaatcacttccctacttccacaatggggattacaaatgaagatgagatttgggtggcgacacagagccatatcgtatcaaagtatgaaaggtttctaggatttattagtttgggttgttaagagttatacggctggcaacgctgtgcagggccgtttacttcagctgcatacattttttcgctgcatgaggggttggggagagctactctcttctggtcctgaaaagtaatcaagagagagagggatttttcacatcgtgtcttaattctcacaaaggcacgcttcaaatgacggataaaaacccgtcttcccgactccaagaagctactttctgacagttgtaaacaagcttctttctcttactgcacaggagagtcctcttacagatctcagatcctgacattattttcaataaaactttgtgcggccgctagttttaaattcatggtctcctggaagctttggctggagactactcagctcgtcactgaactaacggcttttgggggttcttttttcccagttgagtttctgtgtcttttacacgtttggttttatggtccgttggaggttttttcacgctgagggtgaagattcttagtttcctcaattagcataaaagctgctccaaggctgctgagtcttcagttccattccattcaaaatgttaattcctgagacacgcaacctacgccctactgtcctttgtcccacggcttctcgagattatctctgtgttttaatagataaaacgccttctctccccacccgtggggtgcaaagcacagcgcatggggctggtggcgcccgagagcatcacacaacgcatgcgccagtccgcaggtgtgggcggaggagaaatcgcgtcggcggcaggggatgacgtaaaaaggccgcgctgtactgcggcttgtgccgcttccgcaagaaggtttcctggcctgttgcagccatggtgcattgcagttgcgtgttgttcagaaaggtccgtgcgggtcccctcagcctggtccccttagcgctgacagctctggttcttctttgctcccctgtctctccactactgtcttcgtggcggccttttccttgcttggttttcccatagacttctccgcccctcctgtagtggcgctttgtcagtaagcggtgacagtggtgtgtgtacctggcgtggtttggacggttgtttgggggcaggggcagggtttgaagttctttagagacatagtgtgcacgtggtatgaggaactgggatacctgcctgctgtggcccaaatgttgtggtggttttttttcctttaatgtccacagcctgtttttatatatttctccttgagtgcgctgtttaaggtttttctaatggatttttatgaagacacgaaagcgtgtaattgatgtgccttcctgcagaacatttaggtcgatttttgtgtggtgtcggtcttaagaatcgtttccgtaaaaatttacaactgctttgaatttttattttttaaatcttatcctatcagtaatgctttttgaaacgttgcctgcgtcatatttggccattactttatttctaacgaccagagtaaaatactccttttaagtaaggctcctaaacccctgaatctgattaatctagagcaggaaaaaagtgttacatatttaatggaactgtagaaactctcctcgagtatatcagaatggtcaatatttcaactttcttgaaaaaaaaatcccatttgttttttataatagctatcctaaatgactagagatgtggattatgaatttaagaaattactccttaagttattttgattttaatagcctaagaggttaatacgtaagtcctttacctacaagaagttcttgatttagtgaaggaaacaggtaaacactaaatgcagcgtgagatttataaaggtgtaataatagagatataatcaaattgctgggagagccagcaaagtcagagaattgattagaggaatttggaaagacgttagaaaata

SEQ ID NO: 49064 - DNA, 3454 bp, Homo sapiens
tccatttgtgtgtgtgtatgtgtgtgtgtatgtgtgatcatttcgaagtagtaggcatcacaacacttcagcatcctttattttttaaaaaatcagatcattgctatttaggactttggaatcttttagtttaattcagatattcattcactaatgcaggacttcacattggagagaagccaacagagaaagggacaggacagtagaaattgtgtgggagagtaaaattagttcaaatatctaatagctagctatactgtactttagctatattaggtccctcagttttcaagacaacagtatgatgtgggtgatcttatccccatttttccagataacctccagatgtagagataactttcccagggccacccaatcaatacacagcaaagccccatacaaatctgggctgtttggttctagactttgagctctttttctactttttgcctagataaacactttgaggggaaaaaaaatccagatttaagaatttttgctaaccttcctacgggcaagtcaccttcaagtcacctgggtacttaggtatccaactcaaaactacttttagttttgtttcgttttgccttttttttttctttaaccgataacccaattctagacggaacataaggtgcaagagaaatccggggaggtggaggcagagaaagggaagggcaggaggtggtcgcaggatgttgcctgcggctggcggcccagtggattctgggaattgtagtcccagccatccagggcattgccgttcagggccacgggaaaacctgactgcgctcccagaagcctccggtgtacctcgctgggaacgcacttcctgggacgctgagagggagacgctccaagaggctcctcagtgtgggcgagtaaaatgccctgcgtgtgagaagcaggtaggtgtggtcaagatgttccgatttctgggtcttttgcataagtaactgaggattttatgtaaaatggctaaatccaggagaatcaggagcgttggaaaacgctgaccacatctgtggatgtgaaaattgagtaggtatttggtaaggctttaaaaaattattttgtacacaggagtatggaaatgtcgaggtgtgttgccggagccgccaaggactgggagctttgctggcgcgggtttgtgggggagcccaagctgctatttttgaataaccagctgatgctggttgcgtaatgatgacctgcttgcggttcaaacccactcagtgttgcagggatgggctagctctgagagcgttaacagtcactgttgcggtctctctccattggctctaactagtagggcgttttcttccttctgccaggtctgggtctaccacacacagggctcttcgaaaagagggaggaggagaggaggcggaggggggaggaggggggcggagggggatgcggattgctctggaagcttggtttgctttcctgtaagttctgtgcacccggccttgtaaggggcccatagccacgttagggaaaggtcagacttggtgacctcacttaaaatgattgctcaaggattctattgtgcgttattaattgtaaaacgatttcctctgactttggagtgtgcaattatgattgataccaacccaagaaacacatttggggcgggggaggggttgggggggacttgactgaaatctccgagcagccagttgcagagagcattctacataatgatcgtaatagggctagtgatgaacgcctcaatccaggaaactctcaggcgcacataataatgagtttccattctcatcctacctgtttgagataaatggtatttgaagaggaagtggctaatgtttaaagtagatatatagaagcatctttaagtatcaggttgagccattggtggaactattttttttttaagcattctggttgcaaatttcaggatgcagaattcagatcaactttgtctggtcttgttgtcagtgtccttttttaaaaatgtaaaagaaaatttcttttacttccaagacaactgcacagtctttcaccaccttccttatcctttcaccgtagtcatgaaaatgatctaaaacattcattaaatatcaatcatatattcccaagacagcaaagtgtttttcatcctcatttctcctatattctcaagtcacaagatgagttaatttttttcttctatttctacgtatttttctatattctatatatttctcatatataatgcatgaattaaggaataaacagcctttttatttttttttttttattatttgagacagatcattgctatgtcatccaggctggagtgcagtggcatgatcatgactcactgtgtcctcaaactcctgggctcaagtgatccttccatgtcagcctcccaagaaactgggacaacacgtgtgcaccatcacacctggctaattattattattattattttttgagccagaatctctctctgtcaccaacactggagtgcagtggtgcaatctcagctcacggtaacctccacctcccaggttcaagcggttcttgtgccttaacctcccacatggctgggactataggcatgagccaccatgcccagctaatttttgtatttttaggagagatggggttttgccatgttggccaggctggtcttgaactcgggctcaagtgatcatcccgcctcagcttcccaaagtgttgggattacaggtgtaagccactgtgcccctgctaaactgcctttttaaaaaacttactgtctgccctttttagtataacatttcattggttttaggtgattactaatcatttcttctaatccatgggaattcaagcagggtttttagagaagtactatgttaatttggagtatttttcctatttctttaggctcagattattgctactctgtattcagatcttcatgtgtctcttctaagctgaataaagctgttttggaactgtcaggtacctcaaagcgtaagtacgtcctttaattatatcttatttccctccctcctgctaccacatctgccaacaatgactctttttttttctcttgttcaacaaaatagaggtataggacagacctctcttgtgagtacaatgactgatgacttacagtttctaagaaaacccaaattataggtagaaggaactctcaatgttaccatcaagaattaagttagggctgggcatggtggctcagccctgtaaccctagcgctttgagaggctgaggtggaaggatcccttgagcccaggagtttgagaccatcctgggcaacatagcgagatcctgactgtatgagaaaattttaaaaaattagccagttgtggtggtacatgcctatagtcccagctactctggaagctgaggtgggaggattgcttgagcctcggaggtcgaggctgcagtgagccatgattgcaccactgtgctccagcctgggtgagaaagcgagacc

SEQ ID NO: 49065 - DNA, 1031 bp, Homo sapiens
tttttgtatttttagtagagatggggtttcaccatgttgaccaggctggtctgaaactcctgacctcaagtgatctaccagccttggcctcccaaagtgctgggatttcaggcatgagccaattcgcccagccagtatattacttctgaaagcaagaaggaattgtgattgcattaggactttgagtgggttatctgaagacttctgaagcttgaaagaaacgagggaacctttttcctatgtcttcacaactttaatcaaatccttattctccttcatttctcagtctttaactcctgcctgataaatttttatgaacaggtaccttattcactttgcttaacacctaacaataatcacttgatacgtagtaattatacagttgattcaccaccaacactttgagtttacataagacagccgtttctttccacaagtctctataaacacattgggagcaaggtccagttatcagtggtcttggtgtctttccagggcctaacagagtgttttgcatatgctagacactcagcatgatgtaagtacttgctgaatgaatgattgcttcttagtaatagctacttccttgtacagttcttcattaccagtggcccacctttgtgagttactggggtctttgtacagagcccaatactcgtttattcaaataatcctagaatcacttgtgtgccaggcacacaagttgtatgggggagatagacagatgaataagcaaagaccaccagagagctgtatcctagagcttggcatttctagtagctttttccagtgcaaacattctcaaatctgtactagtttccattgctgtactgaggtgtttggttgccacaattaagcaagacagctttttcccaatttgcttgaaaaaaatactgtaattagtctctccctttcataaaattttcttaagaaattgctacttctgataatactgacagaaggtaacataataaatactaaactaatactaatggaaaaacttagaactaaccatgtttaacttgagggct

SEQ ID NO: 49066 - DNA, 1681 bp, Homo sapiens
atggtcccagctactcaggaggctgaggtgggaggatcgcttgagcctggaaggtcaaggctgcagtgagccatgattgtgtcattgcactctagcctgggcaacagagtaagacttgtttcaaaaaaaaaagaaagaaaaagaaaaaattattcctatattatatgactagattaaatatacaaataacattgttttctaaagaacattgtgccctcccactggaattcatgcaacaatcacattctaagccagcttcctagcattttggtcataattgtctttctgatcctgaaagcttggaaacacaacttcaccatcccagcagatgtttgattctgcaaaggttgatggaactgtattcagaaataaaaattattctcaaccttgccccttcatcatgctctgaacaaaaaagtaaaccttactgaagtagtctgctctattgcctcatagtaggcattatagaaggcagagaaaatacatttgagtcctgctttgagagtgaatatcagacccttgaggaaattaaagctgaataagatgcaagctttttatagtttgccatatacagaaaaagaacatggccttttaatttggaatgaaaggcctggcgactgtttttcttataatagcattaatagaaataggttgtcgttacttgaaaaatgtttgcattcgtcttatatgaacagtagtagtaataaccaacaagtgctgtagatttccctgaaaatctacatcttgaatcaacaaggaagtaattgggtcatgttgaatcaacaaggaagtaattaagcagaataatttcagggaccattgttctcatcttttcatttgactgactcattggagatgagctcatttactttttataatttcctagtgtgcctagtacataggaatgagatcagtttgttttttcttatttaacattcattcaatgaatgttctttgaactcctgtgatgtgccaagcagtgagctgggtcactgaatgctaagaagtagttaacacttggcatagcatttgttgtgttctagacatgttttaagcacttgacattatattatctcattgaacccatagaacaaccctgcaaggttggcactgttattttttccatttcacagatgaagaaaacgaggcacagggaagttctgaatctggcccaaggtcagtgagctagtaagtgaggagatggggattagaattcaagcaaccttgctaagagttgactctcaaccattcccctgtcctgtactgcttctttccctacacctttgctttttatgagccaccttcacccctgctgcatgagcatttgaggctgaatttgtggtgtttgtagctaactgatgattgatgagtgggcccttgctgtgtgagtgcctgacacatacagagtgcttgatgtatatgtgttgaaagaacgattattgacaaaaagaagattgaaggtgtgattgtaagagactttaacattatcttggttgtttttttaattgtgaagaaaaataccgatggctaaagattttagttgctctatgacccagtcagtaataaccaaatgtgtgtgcacctgtgctctgaggtcacacacacctgcatgtatatacatttgtactgtacagagaggaaacaagggagagactttccctctttgcattgacatttcatc

SEQ ID NO: 49067 - DNA, 1349 bp, Homo sapiens
agaatatttttgtttttcagcttttaaataacatttgatgttaaatccttacaagaacgttgggagtcaggctgggcaacaccttccccatcattcttctgtggatgaggacatggaagtcagggaggttagctgatgtgcttgttcagaggtgcacaggaacccagaaagtccaactcttatttcatcttaccctctaggtaaaacatctaggatcaaacaagactgataatacagtctcctaaccttttccaaactattttaatcaaacttgattctaatgtgaagttgtctttaataaggaaagaatcccacttagctatttgctcagcgaggtctgggattctatctaatctctatatgtcagtgtataatttgagcaaggttaaaaagaaaactaaacatttccttaatatttggagagggtggagtcagtctatttgtctgtaagaaataaaaaggtaaagcgtatccctgcttttggtgaggaaagttcagaaacgactgtgttttgtttctgaaaactttggaatacttatctttggctaaatatcaaatataaaaaatccataaaaaattatcctatgataatttttgctggccgcccatgatggctcatgcctataaaggcaggaggatcacttgaggtcaggagttcgagatcagcctggccaatatggtgaaatcccatctctgctaaaaatacaaaaattagctggacgtggtggcatgatcctgtaatcccagatatttgggaaggtgaggcaagagaatcgattgaacccaggaggcaaaggttgcagtgagctgtgattgtgtcaccacattccagcctgggcgacagagcaatactgtctcaaaaaaaaaaaaaaatcgataatttttgtaaaattatacatagtaaaaataaatggatcagattttccatctgttgcaaaaattttatagccttaaatattgcgcaaatgcgtggtggctcatgcctgtaatcccagcactttgggaggccgaggtgggtggatcacctgacgtcaggagtttgagaccagcctggtcaacatggcaaaactctgtctctactaaaaatataaaaattagccgggcatggtggcaggcatctgtaatcccagctacttaggaggctgaggcaggagaatcgcttgaacccaggaggcggaggttgcagtgatctgacatcattccactgcactccagcctgggctacaagagtgagactctatctcaaaaaccaaacaaacaaaaataattaattaaaatatatatattgcccaaatgtgtataaatgctgtatatggagtcattttcacaataatttctcatttttattg

SEQ ID NO: 49068 - DNA, 796 bp, Homo sapiens
aggagtaggcaaaggatgggtggtggaacaaggaggagagatgagggaagccttcattgacctgagttgtgaatacactggtttctggaaccttccattttactcccctttctgatttcaatttgctctttgtcaaagaaaaaaaaaaaagaactctttaagtttggatactgtccaatagttggaacataagggttggtgacaagagttttagagtcaatgtaccaattttactgatgactcactgagaactttgtacaagtcacttaaccttgtgttacttcagttcctgatgtgttcaaaaaggataaatttgatcctaaaactagttaaataggttgactatttagagctctaagaggatatttaataatgtaaatgtctaccactttaataattatactctggcactatgtcttaatctttaactatctatgctttggctaaattctaaaactttacattataaacatatctttttgaaactcattttccagctctattcttcatgttcttggtatccttgtttcatggatttcttttctctgataatattttaaaaactgtttcagatcaataagtctgcttttgctggaattttggattctaattaaatcctttatattttatcttacttaaattaggattctttcccttataatctactaccagcatactagcctgatatttttcttatgtggaaaatatccacattttattttataataaaagcataatgtatatgtaatgtgactagaaatgatgtatcttaaatttcacataatttttggcaatg

SEQ ID NO: 49069 - DNA, 2765 bp, Homo sapiens
cgttttaactcatatggtctttcctggcgaattccttgcccccctctgctccccacttagcttgacttcctgtcttttatcatccgcaatctatcaagatcctacaatgtgctcagtgtagggcggaacaaatcactgttttacctcacaatttaaggaaggcagggggctagtttttaagataaaaatcttttaacaaaacataaactccccaaaatttcctacaagccaaacagcattgtcacaccctcacaagctcttattacttacacagccaaatgactcaagattactaacgtttctattcataaggagtttgctggcctcagatcaacacaatcaagccctcccccaccttccttctctctcccctgggagactgacgtttggaactcacgccgcaccaggttttttcagaatgaagacgatgtgtgttcgctgctggaactgtttgtcctgggattttataaacacctcccccactcctttttaaagttctgtttttgaggtgggggaaaaggaggtcggaatctgtttagcctttaaatctcccaattcagaaatatattctaagaatttaatagaaaaagaccaagggctgtgtctgctatttactgcagaactgggtattcctatcagaaatcacctacatgtgtcaccaagatcagagacaaggatgagggaaacagcatgatccctgccttctggagggttacagttgaagcttccgctgcttctgcacttgacctcaaaacaaacaaaaaacccaccgcaaacaacaacaaaaaaatccaggcccacctttccccttggatctttcacttgacagctttctcggcccaaaataaggcaccctacatctgaatgcatccctaaggccttaccgcacccagtccaggaggcagtcctggcagctgccctccaccgaactccgcgctttttcacacacgctcgtggaaggagaaaaccgctcaaacaactggactcggcccgtttcctttcggtaacctccccacagcccaacacgctgtccccagacgctgcccgctcccaccccggtcccttcgtgatcctcccgcgcgcgggcggggcgggggaggagcgcgggggcggccgggaggggcgcggccgggagggggcgccgccggggcgcgagccagacacagagggccgcggaggacgcgggaggcgagcggggagccgaggtcgtgctaggatcccgcgcccaggggccttcgtcgagggaggggcgtggcggcggcagcaggagggcagcaggagctgtcaggctggcggttccgcgccgcggctccttctgcgctgcgcccgcaactctgggctgagaacttctcccgccggcccactcgccctcgccccgcgcactcggcgccaggcgactcccgcaccttgtacccggcccgccccgcctcctccttcggccgcaccactccccctgccggccgcgcttctctccgttacaaaggagggaaaatgagccgggcggcggcggcgcggcgcggggccaccacggcggcggcgagcgcggccgcccccggcaccacgtaaaccgcccccgcccgcccagctgcggcccaggccggagcggagcctgccgtcctccgcctgcctgctgctcgcctccctagacctgcgcgtcgcttcccggcccgccgaggaggtggtggaggaggaggcgccgctttccccgcggcgcgcgccctcgccgttgtctgagctgtgcctggaccagtttggggaagttgtcggggctccgcgtcgcccagatgtgtgacctcattgagccgcagccggccgagaagatcggcaagatgaagaagttgcggagaactttgtcggagagtttcagtcgcattggtgagtagcgcgctgcccccggcccccccagcgcccgctcccctcggcctgcgcccccgccgcgttcctggcaccagccatgcagctgccagcggggctggcgtggggtgcgttgtaggcggggatcgagggcacagtgctagggacccgggggagggcaaggacgtaaaggaaagagacccctcttcctcaggatctgggggttcatttgtagattctctcaagcctacaatatgggttctcccctcctccgccactagtgctcgccctttcgcgcgcgtgggggacgggcgaggggacccctcggcccccaccgcgcaaggggctgcgcggctgcttgggccacttgttattttttgcgcacaggcttggatattgggcgtttagtcagtaatttagctttggaaattggtgaaacgttagactgtgccctggtattgtttaacgtatccaacctaaagggaagtgggacagttaccttgggacctattgttcggtacttcgggtcctggaaagcgagatttgggtgttcagtctcgaggtctctgaatcttcccgctgctggagagaaatgcgcgctgtggagttgtctggacatttaggaatgtctctcgaacttgttccatttaatagagctcaggggctgttgtctttaaaccaaacaacaaaccaactgaccaacagtgtttaggacagtgacgaataaatgcatgtcacaggttgtaatagggtgacagcagtatcacgtggaatgggtttgttagattttgagtactgggcatagaaaaccccttttaacctgaagagttagctgcctcccctactgtcacaactttcactaataacatgtaactgccctgagcaagagaatgctatagacacaaaagata

SEQ ID NO: 49070 - DNA, 1393 bp, Homo sapiens
ggtgacacatgcccattgtcctagctactcagaaggctgaggcagtgggatggcttgagtccaggagtgcaaggccgaagtgagctgcaatggcttcactgccctccagcctgggcaacatagcgagactctgtctttaaaaaaggttatttttaagtggaataagttacggtagtacctgccatgtacattaagctttcagttggttagtttcttcctctcctatttagatgttttgaagttaagcctaatgaaagcaattcaaaaaccactaaaatacatttattttaatatttgcatcacatttaatttgtgtaattattgatctcttataccttggacattcattttttaaatgtagtattttaaatgtaatatttttgcactattaatcacttaaaatattgtgttatatcatgtctaggaaattcattataggcctttctaagagagaaggctttgtgataaaagccagctgcccagacatttccaaaccctcctcacccatcccccagcatgctacagaagcagcaggctggcagaggtccagatttcctaagtgatgggattgttcccccggccaggaatgagaggaatctgcctagattggagatggctttagctactttgcttttcttcgtactcgtagtcttattcccaaactgaatctgacccagcaccattttccattattggagatgttttaacactgtgtgtggaggtcttgctatttaaacaatgatttctgaatctactttttaattccatgggagcttttccatttttctttgtactatggaagaagaactatgagttaattttaatttatagttatacctctgcaaatcaatacaatctttctgtgacttccactggtagcaccattcttgatctgaggcgagtattgggattgtggttttactttcccatttacttagaggcgggaaggtttagttatttgaatgccttagaccaggaaattattggctattgtcagtggaatttgtttatcttttccacccctacattcctaggctgtgagagaactggtcatcactgtgattgcacctcagtttttatcagttcctcccccagcgctatttttattaaatacttgatgtttctctcttctttgggtataaatttagagaccctcaggcagacatttctgaaagggctctcttactcagctgttgttaaaatgaagagatcaatactgccaagcacctctttttgtttggctacctccaaaattcatgttttctgcagttattctctaggattatctgtgattatctgtaatttctataatttatctatagattataatctaaactgaagattgatgcatgtataattctaatgagcttctcgaccagcactgttcaataga

SEQ ID NO: 49071 - DNA, 950 bp, Homo sapiens
ataaaattattttaacaacatataccaaagcttaagcttctggaaagactacctaatattccataatagaattagcaaaacagttatcaagcctattgatggcaagcattgaagtccagtaagggatgtaacaaaactacagtcactgaagcagcgtaaaggtcactgaagcagcataaaggaatgtggtgtcctcaagagtcctccattcagcagtgtccactagctgaggaattcaggatttaagtgaaattgggtcagatgccaaagaaaccatgtagtagaaaaataagcattttaaaactaaatcgcaatgttagacattgaattctgatgaatggaaacatctggtgaagtgttttcatgactggaaaatatctcaactcagaaggtaccttgtttttaatgtagtttctcaggactaatttttttagtggcctatttttagttaaaggggaaagcttataattagtaaaacaatccatcattgagtaaatattaacagaactatttcatgcccggtcttttgtgctttgggaacactaaagaaatagaagatatggtttgtgtgctcaaggtgtttacactctggtcatggaaatacaaacacgtgagaaacagtgctcagcaaagacggagctccccccaccccaccaaaataaaccaaacacttgaaaacaaattctacagtagcttatataagaatatataataacatatatttcagtaacaaattataaaatacaatctaaaaatgatgtagttggtagtgagggcatttttggttgtgacagtgacaatgatataagggcaggactagcatttagtacacagaaccatggttgccagatgctctacaacgtgtactgctgtggaaatgctgcacccaaataattttcagccaaaatgcccaggatgccaccactgagaaacagtgccaggatgtcaga

SEQ ID NO: 49072 - DNA, 929 bp, Homo sapiens
acttatttagatttcttccagggagttcagtaataatattttttgtgtctttttgggattttgtaatctttacaggaccacaagtaaaagaattccttctcagaacagccacggttacaggatctgagttattgactgttggggtcctggatgcttttttcaagtcagagattcacatctgagtcacgggttggcagttaagctgagttttctttttaagggttaaatttcatatgtattattaaaatttaacttctttaaaaaaatgctttccacactggttcacataggttttctttttaatcttgtttatctccaccagatgtgtactttgtaatacgttgcttaggcaacatcacctgccctttagcctgttgcattacatccacccacctggtctgctgccattggaacatgctgtgttgcttttctttctacactcatgctgcttggaccctccccacaggccctgatcattcattcctgtccttgatacagttccttggtactttttttctagcacttcttggcttactcacagttctgtatcttaaaatcaaccatattgtattatattcatacttcttttatattatagctgccatttggcctttatagtaacttttctcttttgaaatcataatgaactcatggtctttcagcaactcatcttgttctatttaaccatacttttatttttccttttgatgctcgaataaataatcacagtttgatcgttgggagctcctttaggcagattcctttgtccttctagcacgatccctgacatttttgaaaggatgccagttttctggtaacagctggatgtttcctggctctttcacacttcctgcactgtgaactggaatctattactttccaaagatttcttcctttccttactggagaactggaacataggccaaaat

SEQ ID NO: 49073 - DNA, 2555 bp, Homo sapiens
ttctctctttgtaatttagagttatgaaataaagctactatttattgaacactccatttttttcacctgtgaaaacagggttaataatagaattgatttcatacagctgtgaagaatgtatgtaagcaaatacatttagtgtttagaacattgtctcacataaatgttcaatgaatatcagctacttctttttcgtttcttataacaatcctagaagagatttgagataatacaatttcccttattttacgggtgaagaaactgagacccataaagtttgagtaatttgcctacaatcacacagctaagttccagggccagaattcagatccagttagtccaactccagagctgagttcttaacttttaccattttttgtaaaacttcaaaatctgctttcttgaaatctattcttaccctacccttctgtcatgccatgactatgccaattgtaaggtccagggtcaggtttgagccccagccgaggtccgaggggagtgggtagatgggcagatagctgaaagaacactcggggggccataggcaggggaatatggttttattcagcagctctctcatcaacagctctctcacactgtccgcctttatcttggttgtctgctccggctccacagctcctctcagcagccagctctgccgctctggctgctcccacacacagctgcacggccagctctcccttgcctgcagtgtcagcagcttaactccttccctctgggcatgagtgtgagccatgtcgagccatgtagtaccctggctcccctctgtccatctgcaagatggacaactccggtactctctttttctctaggtgcaatagccaagccatgccatgccatactgacccatgctaaaccaagccccccatgcacagtgtcagcagggcaattatacctttaacagacaataaataatggcttacagccaagtatgaacttacacaaacaggttatttaacaagtggagtatgtgcctgcatcctaaactcactgagtcatgcaggcctggatgtctgccttggcctatttcttgaccaaagcacatccatgtaccttataccttccttgttaataattaactgtagggtacatagccaatttcttgcataattctcttattttccctctgtatccatgctgttttttctctctagtcatttattattaatattctccactgttctagtcaattccacagtgaaatcatagctattttccccccttgtttcacctaagtgatttgtgagttttggtatagtaggtgcctgcatgaaatagagcgctcactgctcaccttccctttctatcagatagatttattttggacaaggttttctattcctttgctgccttctcatgtggacttcagcccaagatttgatgggctccatttctcttactacctttttattcattgccatataagcatatgacaaacataactcctgactcgccagcacctttcaacccttttattcttctcacaaataacataggaactaatattatagtaagaactatacctgaaaaaataaaattttttctaatacgtttttgagtaaatcagaatctgagccctcttgagcctccacctgaggtatatccccagctcttgctgtgaatgtagttaagttttcaaaattgagttggggagacattgattctctcaacctgttgtgtcctttgaaactcttgccaatttttcattatctttgttctcatgtttttagtcacttccttgtacattcatatctacgtaggtatatttatattgtttacacgtatttattcacataaactgtcagatacaactttcttaaattgctaatcactgttgtgatgattgatgtgacctagactaacttaccattgaccctctgttaaaaaagggctcgtttaattagtaagacctggagagaaccactgtatttaaggttatttcatccaataaacgtggttttgtagaggatgtttatagttgtaaatgtaattattgtagctggcgcagccagatctctatttagagataatattaggagacacttaatgatcagcatgtatagttatgtttctctttctacttttcaaaaacttttcctggatttatatatatttgtgcacatgtgtgtgagtgtgggtgtgtgtatattacaaagaaagttcagagaggtagcagcgattatttttgaaagttggagaaagcagagttggcaggatgaatgatggccctgtgtttacgtatgtcattggtaacagctgcactgaaaagttgggcgtctcagtttctcatctgccactttcttactgtacttcagagttggagccattccattatctgaaatgagtgaattgtcctcttttttcgaatatccgatataatttgtattttctttttagtcactcaaaattggtgatttttatagtataccgattggatgcatatttgacaactaagcaattgtgttctctcacttagattcaaaatctgtgagttcagctgactaattagtggtctggatttttaaaatcatggt

SEQ ID NO: 49074 - DNA, 1331 bp, Homo sapiens
agagttagagatcactgatgtggtcatggcagacatgggatttgggctgagccttcaaacgtagataaaattcctataaacataaatgaacagagaaagacataactgccagggcagctggctggagtaggactagtacttccactccacatcaaccaacaccaccaccagtttggctggcatagagagaattaaatatcttgctagtagggtgtgtgggttgctcctgaaagttttctaatgaaaactcgagctgctcagatgttcactgttattctactaaaaagataatctgggtattgttctgtgcggtgtcagtttctaggacttattttctttatacttgttgtttgttactattccttttgttactttggcatgaatttaattattgacactggatcattaatgtggccagggcatttgggatgattggtcaggagacccagggatctgtaagaaaatgtcatcctgggaaagaggagatataacaagatattgaagattgtgtccagttcagggatattagtaaattctgagaaagatttgagtatcttcagcgagggtgagtttgaggttgataggactacgtacagaaacagggaagtcagacgtggcaacagttttagggccaaagtgactgaattcatgtggtatgtactgaaactgaggtgataaccatttatcccagtaaatcactgaatctgaggatataaaagctgaaaagagcattagtggtgatgtaatctgttcccaccattttacaagagaacaagtgagtcctagagcgagtaggtagtttgaactaccaagatcaggagtgaaagtcgtatgagtcatcactgcagagaagatggtcagagatctggcagtgaatcacttagttaaaatacagctctcaccacagattatatctgatcttggtgtgaagtgccaaaaaacacgtcattcagatctctctgtattttatattttctcctgacattttggaatgtggtggaactcttcaaaagactatcaaataattcctattttaattttataaaaggaaaattaatagcatatgtggggaaaatgtaccatatagtacattgtgggaaaagtgtagaagtagagaattaagggaaattttagtatgggtcatttatatattttggacacatgccatttcagtcaagtccttgagtatacccgtaagaatcgaattgataatcgtacttttaaaaaccctagcaacctgaacaggacccaagaaatagaattaaagaaaataataagccagaacttggcggtggttctgttatctgtgagcttgacactctttccttttt

SEQ ID NO: 49075 - DNA, 336 bp, Homo sapiens
gtatccacaatgtgctggacaatgttctgaaactgctatggatgtttaccagttaattttcacaataaccatgtgaggttaatatgaaaattgaactaggattgtcttcattacagaggttatgtgacctgctcaaagttatgtaatgctgatttacagagattatgtcacctgctcaaagttatgtaatactgatttacagaggttatgtcacctgctcaaggttacacagctgaggaagccatgtgtgtatagatgatgtgtgcgcatacacatagtacgttttcgtgccctacatctaaaaaataacctaaaattttaaaggtttaggaaagt

SEQ ID NO: 49076 - DNA, 1055 bp, Homo sapiens
ccattctcctacgtatcctcgcctttttcttctgaaaaagcaaaagcaaccaagcctgtcccgcttcagagcaatcctactctttgtgcctgagtagtgccaccaccactacttcctcctcctcccgcctcctcctaccccgccctcctgccgctggctttcgctctggcgaggaggcggccggctccctttgcgccgggaagccggagccgcgattgggcgacggtccctgagcctccagttctgcgtcggtttcaaggctcctccctcctggtgaaagacagactacggggcgcctggaaaccggtccgagggcgcgcgaggcagaggagagggagcgagttgagggattgacacaaatggtcaggcggcggcggcggagaaggaggcggaggcgcaggggggagccgagcccgctgggctgcggagagttgcgctctctacggggccgcggccactagcgcggcgccgccagccgggagccagcgagccgagggccaggaaggcgggacacgaccccggcgcgccctagccacccgggttctccccgccgcccgcgcttcatgaatcgcaagtttccgcggcggcggcggctgcggtacgcagaacaggagccgggggagcgggccgaaagcggcttgggctcgacggagggcacccgcgcagaggtctccctggccgcagggggagccgccgccggccgtgcccctggcagccccagcggagcggcgccaagagaggagccgagaaagtatggctgaggaggaggcgcctaagaagtcccgggccgccggcggtggcgcgagctgggaactttgtgccggggcgctctcggcccggctggcggaggagggcagcggggacgccggtggccgccgccgcccgccagttgacccccggcgattggcgcgccagctgctgctgctgctttggctgctggaggctccgctgctgctgggggtccgggcccaggcggcgggccaggggccaggccaggggcccgggccggggcagcaaccgccgccgccgcctcagcagcaacagagcgggcagca

SEQ ID NO: 49077 - DNA, 452 bp, Homo sapiens
gtgctcatccccatggagcatttaatgattctgaaaggggcagctgagaggctaagcagggcttttgatagcactaggtgagggacagactaaactacagatcctgaaggaaaaggaggactcataaatactcttcattttggcttcagaccaaggagatacctagaaggaaaggtaaagcagaagtaggcagacctacacagtgttaaattgtttcagtccctgaaattggaatgaggtgagtcacagattgctaaggcccaaaggtatttggcagaaaacataaatcttctatggaagaagttagtatcattccatgtctcaaatgttttctaaaccttggcaaatatgatgtcaggtacacaataaaaaataaccaggcacatgaagaaacaagacagtttgaatgcaagccagaacaactgaaaatacaaatttaaaaaaggctccag

SEQ ID NO: 49078 - DNA, 1551 bp, Homo sapiens
caaagggctaatgttcaaacttaacaaacactgaaaatttctatgcttgtagtatgaggggtctaaaaaaagatttacgttcgcctctgccccacaactggcctgttaaaaaggctgttaatggaaataactaatcactggccctaaaataccacattccagctggtcttcttttgatacagcaagctaagtttggagatctttacatgcatttctcaccttgtttgtcctaaggaaaggctctgcatccctccagaaaggctggagaacagctatctctggaaatgacacacacacacaaaaaaaaggcaaaatatttcaggccttcctaatacaaaataagagatcgatcccagctaacgttctcgttgcattatgttctcgtgagatgcattacctcttgcaaacaacatttctcagacatacagaaaagaaaacggcaagtacatgcctacatatgatgggaaaaggtagcggaatcacgaatacgttttgtaccaaagctaagtgcttcatatatattgtctcgctttactccccacaacaatttaaaaggtaggcataagccttaaaattacaaaatctgaaacagcgccgagctcccatactagcctgccttcgctagctgaagcattagggttcgaacccaggtgggtctttcttaactcaaaaccaaggtaattccacaccgaaggctctttccatccctcttcctcctccaaagacaaatctgcaaagggctgcactgtacagcagtcacccacacccacttcttaacaaaaagaaaggaaagcacagcctcaccaccttcccaatctcaccctgaactgcacccatccactgtagttcgcttttacttccgcctctggggtccggagcggctaggaggagcggaagtggaaaagactaacttccggcctcgggtcgcgcgcagaggtgatgtcgttggtcctgcgccccctcgtggcggtacttcagcccttcgcagcccgacgctaggggcctggcagggggcagcaagagaccgcggtgagcgcggggtattgaacgccaaagaaggggtttggagggtggggtggggcctgggactcccagtcgcctgggcagatgtccgtggggaactgtaaggcatcttatagggatcctacagggggcatccactgccggccgacgacacgtggtggaaaagtagctattatttacatgcgtgttgcagtttttgataatgcgattgctgctgctaatgtgactaacgcgatgccgatgaacatctcggcgttttttggtgcaggataagcgggtgtagactctgtctgtttagtcccagattctcctcctttaatgaactaccgtggaaatcctggagtgtcactgctggtctgaattcagcatccgccttcaggctggaaatcaattctagtatacttcgatttccttacttgcagttcgaattcaaatatgattcttttgacattgtgagggtttgcgctatttaaagaatggaggcaaccgaaacctcatctccacagtggatgcatttttgctccctcc

SEQ ID NO: 49079 - DNA, 1673 bp, Homo sapiens
tatgtcagggcagtcacatatattaacaacccttccaaaaattccaggtaggctcagggaggataggtaacttgtcattaacgctagaaagttagtgtagtctggcattgtccctaaccgaggttctaaagctcaggctcctttcagaacactactgttaaagggaagccccaaagagtcgggggaggggactaagttttgactggatgtgtctcggttgccgtggagggaacaagaggtcagaaaagccatttggaggcagcgtgtgcgatgggactataaggatgaaccggagattgagtgggaaccagtggagggaagagggagggacttttcaggctaaggaagtaataagagcaattagctgctctcataattcttgagtcaagcagttaatgtaggtagaaaacctggcgtccgcccccccaccaccccccaccggaacttttccgttggagcttgtaggtgttcgccaatttcaccattaggtgtgttagttttgtaacctgaaggaaaaaaaaaactcatgttttaatagcagtggattcctcggacggagggtgggggtcaggccaggagcctctggcacactccgtctctcctacccctcagctcggccgccacctgtgagccgttgatgtgcgggaagggcgctctctacggcgggatcctcgctggtaggaggcaggtcccaggcctggcaagggttgaccccggagggctgggccggggcggcaccccaggagcacctgcccacgaggcggctgcgcggacagacgttccagcccctcccgcctcgccgtgtgtttacgtggagacgaagatggcggcggcggcggcggtgacggcgcttcccgtgcggctgaggacgatccgccagtgagcgcggagactgcttccacttcgggcgggggagcgccggaccgaatcggctctctaggccgtggagcttgccgtcccacctccgtccaaatcgacctttcctttctatccccaaccacccctcaacccctgttttcccctgccttccttgcagaggccatggaggacgaggagagacagaagaagctggaggccggcaaagccaaggtaggagagcccgaggcaaccgggcctgcggtgggaggcggtggctagcacggggtgggagggggcctgggaagcggagttcgccgcagccccagtgcactgcccgagagggaggtgctgcagggtcttagggtctgcatctctcctcgccctcctcctttcccctttttccagttgggggacaaagccttgtgctagctgataatacttccgcgaggattgaatattgtggctcctttctcgtgaatgtccaaataaaactccccttttactgtattgctgtaaactagtgtttagttgcttctaaacctccgatctttcatttttttaaggagttttctgggtggtgcaggcattgtgctttccagggtggggatttagggcttttctttattgggttggggatttgtgcgctgatcatcagcttgtcttccttaggtagcacgctggcactcttgggtgtgtgtgattggcctgtgacagctgtctcagcagtggcttgtgtgtgccacaagtgccagctgtgaacttggctttaggggcgtttttagaagcgtgtctttgtatgtttgtacttgaaggtc

SEQ ID NO: 49080 - DNA, 1805 bp, Homo sapiens
tatcacaaacacctaagataattccctgcacataataggtactcaataaattatttgtttaatgaatgaacagtttataatttagttgggaagtatgctatagtatataactagctctataaaaccctcagagatttcttctaactgtggctggctctgctattgtagcgcggatgtcttcctagacacttgctagtaaaacctcaacacagtttttttgtatagtggacgaaatactgaatgtctgcttgtttggaactagtcgttactcttttttatttgaaacctacatatgggctttggaattatttgctttagccttataaagcttccattttctttgagattggtggtttctaaacatgaccatacatcagaaatagtggaggtttttgaactttaatataatttttttaattacttacaatgaaagatcactgaattataatttggagagtcatactcaatagctttgagatggaacttggaaatttgtgtttttaacaatataattcagaggcacggaacccatagattgacatttggaaaccactgctttctgatatgaaacaaaataggtaattaggaagaactttctaataaacagtatttcaagcagtcttcctttaattagtgatgctttctgtccaaagcatgaagaaaagagaggcttctggaaacataggcttacattgttattcctgcatttgggcttctgcaagctcaccaccctctctcagagtttctataatactccatggaaatgtgttgacaaggcctttgaatgaaaatcattcgtttgctccctgcacccctaccaaaaagagttttactcaccaccgtcctcattcttactaatagtaatgagtcaaaattattttgtgtaaatagcatcacatattttggacatgactgtaacacattttgaatagagtatactgttccctgtgggtagacttgaaatagttaagaaaaataattgaatcattcttttaacaaatatttggtgatttcatactagaaacctctaagagaaacactaaggttggaaagatcatgggttttagtcagacggatctgcatttgaccctgatttgaccttttactggctatatgatcttggacagattatttaaacatttctaaatagtaatagggataataataattacccttaagattgtgaggattaaatgaaacagtaactgagaagagccttagctagataccctggaggtagaattagatgtttatgtaaagtggctgtttccttccagggacttcagtgtaatcactgaaataataattacttgcaaaataatttttcgaaggtaatggttggggaatataacatagtgatataactaaaatgctggaatttaaacccatgtctttgtggcgtttttcactgcacatctgtaatactgcctattagagtaataacagcaaaatggaaatgaaggatgaatatttagacattgcaatggaaggaatgttggaaacaaagcagaggggaaaaaacaaagataactctgtgttgcttgagcctagggaatatggaaaatgaaggtacatcatataaataggaaaatcaacaggggttgcagatagtaggagcttaattgcaagaggggaacaatgaattaagtttacgccagactgtttttttcagtttggagtaataaacactttcaaatactgtaaagcttaaagaatgaagtcgctctccctctccctctccctctccctctcttctctcttctctctctttccacggtctccctctgttgccgaggctggactgt

SEQ ID NO: 49081 - DNA, 2909 bp, Homo sapiens
caaacataaaataataagataattgggagctgagcataaaacattatttggaaaaattaactttgcttttcttcattgcattttgtgaattcaaacttcttaattttcaatgcaaaattgacaaaaattaattgaactgcacaaattcctgaatatatagacttaattggcttttaaaaaatattttaaattttgcattgatctttgtatatacttttaaccccttacgatggaatatgaatcataagtagaaccagggcctgttggtcccgggggttaaaagaaatctgcttaatatttctaccctttttctctatcacaaacagtattctttcatgaccttttttcttatttagagatcctccatagataatgaaaacctggtttcagagagagagagggtgcttttagaggagctggaagcactaaagcagctgtctttagctggaagagagaagctgtgttgtgagctgcgcaacagcagtacgcaaacacaggtagtatggactttgccccacctaggagcaatggatcaccaattcagtaggatttgtttgtctttgttgttggtatgagatgtattcttttataggtactgagcttaacatatttgtgactgcatgtgtgtaaggtaggtggagtcaaaatgccttacatttcatttaaggtaatttgaatctgacattctgttaacagcaagtattgtttcaccaaagagaacctaacaaactttattgttgcactacagcatggataatttgaacccattaaaattttttatttgtgtacgagaatgttttatcctcttttgataacactaatctcgagtgtagttaaatattataccaaccagtatcaattttgtgcacagaggtttctattttatctcataccaatatagaagaatgacatgctgtttccaagttgacaggttttctttctgtcttctcctctcttcctttacacaaacttaaacagaatggaaatgaaaaccaaggagaagttgaagaacaaacatttaaagaaaaggaattagacagaaaacctgaagatgtgcctcctgagattttgtctaatgaaaggtatacaaaatgtgtactttttcagtgcaaagtaaattaaaatggttgtttcaatgtaatagactttgtccttatttttatcttgtacattgatactttgtcttaaaaatcatcataccatctgtgtatgaaacatgtccatgtatgtgtagtatgtaaaggattttcagtttttcatcattaaatagataacattttaaaaaaatcttttctatataaattttgattggatattaatcacatacttaactgttaatcacctgatgttagcaaaacttttccttactttgattttgtagaggttaatataaaaatgtgaaatattaagtgagaatagttatcctacattagtattaaagactttaagcacaatattttaaactttgttttgttcaaatgaaaataatttctttaattttaaattaaaactaatatttacttcttaatttcctccttttccaatttctgtgactgtcaaccctcttgtgtcctcctaacctccttcctcagcttgcatggaggaatttggcccctaagattttggcttccccattggatcatcagtatggaacgcagtcagtatggaactcaaacaagaaagacagtgtatgaaaattagagttaccacggcaatataaaataaacactttgtttattttatattatttatctctaattggtaaattttgaaaactatgcagtatttaatttctaggaatttttatagtaagtgccaataaaatgagtatttttttttaaccaccatattaattttaatcatttctcttaagtagaaatattttcacattattctagttctggggtttggggcttaaacaaaacctcagaacaagttaaggaaataaaacccttggcttcctactaaattagtttagttttatttttagtattcttgattatataagcagagaacttgatctaggtgcaaaaatagaaccgtctctttcacttgacaaatactaacggaaaacttctccatttattatcttgtcttaaaatagatatgtcatgtgcctgtgaaacaggtatcctttagcctgatttttggcaagctcctacagtgtgaagctaaaagataaaactgtcttaaggcagaagacctttaccatgaaaatcttttattttgtctgcatgtataaagtgtgcctttgttgaactgagttgctaggacaagagagttgtttagtttttaagaaaattaatcaggcagtcttctgaatcaccatttatggaagtagctttctttgcatggtagaatgttcatgttaagcaaaaaagagagtgtacaaaaacactttgttcgggatgatctcatttttgtttttaaaatacgtatatatttataagagaggcaggaggaaaagtctagaaatacaggcattaaaattgtaatagtgattgctgaggttttttggtgagtggttagcagtattttccaaattttttaaaataaggattactttttaaaaagagagacacaccaaattcattctagttgaaaacaggtttcttctgccgacttaaatgagtgtggtgagtgtaacttgagaaatttctgtccctggagcagatgtaataaaaacggcctatgatactctctgtggtgttgacagatagtgaaatttcattacagacctttttaaaaacacatcgctgcctaactattactttttgtaatttaaacattcagctcattaccattaacttgtacaaatactaccacataattttttctggtgtgattttaaaattatgtttcaaaatatgtttttatgtttaacatatagaaagatttaaatgtgcaaa

SEQ ID NO: 49082 - DNA, 556 bp, Homo sapiens
aggccttttgatagcaacttaatgtaacataaactaagatttaatatgtggactctttcccttcctcctatgactcttttctgcttcaggagaagagactaaggtaggaaatggctccttttatccttcctcaggaggtttcctctctgctttgtgtaggatagtttaaggatggccagtttgagcatgtctaggaaccacacaggtaacacagattatacctggcttagaaaaaccacattcctttattcttatgactcatgttttaagcatgcatactttgtaaagctaatatagcactcttcattttatcttgataaacgtttgtataaacattttttctcttttgataattttgttattaaagattacaaacttagaagagcaattagaacagtttagagaagaactggaaaataagaatgaagaagttcaacaattacatatgcaattagaaatacagaaaaaggaatctactacccgcctacaagaacttgaacaggaaaacaaattatttaaggtaattagttaagaaaaacttttatctgtaaataag

SEQ ID NO: 49083 - DNA, 2472 bp, Homo sapiens
cagcttcccaagcagctgggactacaggcgtgtgccaccacatccagctaatttttgttttgttttgttgtattttagtagagatggggtttctccatgttgttcaggctggtctggaactcctgacctcaggtgatccgcccgcttcggcctcccgaagtgctgggattacaggcgtgagccactgctcccggccgagaaactgttacattattagcatcagaggaaggcccttaccacactccagtcactaccattaccacactctacacatcctccttaatatgggtataaaccaccattaggggcactgctacagcccacagaacactgaaccacacagggcagcctccaggatgacgggccagctgccaacagcatctccgtcaggacccccaccaagggccccaacgaccaccgggtcgttcaaacccacagccgccaatccagccaccgccactaggggcaccactgctgcggtcagtacagaccgctacaaccacaaatgccgcaaccacgaccccgtctaggatcagatacacagccggggaggccagcaccgccccccaacacaaggcaatggcgggtgctacagccagcgccaccagcagcagtgccgccgccgcagccactactccagcccccagcgcgcctgccaccaaagccacgccaagcatggccgcagtcgcccccgcccttgccatccactgagccggtcggggccacggagccgcccacgccagcccttcggccgcctcagctgcggcgcgcgccccactcagaccctaaagaatgtacgtaccacccctgcgggcagctggaccaggtggccggcggccagacggatcaggtagaccaggctgagggtgaaggcgcaggcgatcagcagcatggacaagaggttgccgcctgtcaccttctccatcgcctggcccagcaccgacccacccgcctgcagcaagcccagcagcagcatcccagccgccgccgccattcactccgtcggaaacactgaaggccgaggtcgccaccgctcctcccaatcgacggaacgagagaagctggcagatggtcgtccacagggggccttgccccaggtctcctactaaacccagccccacccctcgggtcccacgcgcgccaccccgtgcgtcacagaatggggcgggatgttccgctggccacgccccttaaataacactctgtgaagccgtggtcttcttgcgcgggatagggcacctgaggaagcgggctgcgcctgtggcacagtggtacggggccggaagataacttacctgaagaggcgatcaatccctgagaatcgcgggcgacccgttttttgtgtgcccgggtgcggggtgccgggacacggcgttgaaggcgctgagcggagggatctcagggcgagctcgagcggcgacggcgcgctctgtgattgcaccgcgagcgcctgaggtgatctcggcctacatcgcgtcagcggggccttgggcgtgagcaccgccccctgtccggacgcagggtactggggcacctcgaactgtggcacctcacccttctccggggccacgtcttggggactccgacagccccaaataagccctcggggactggggttgtgaaaagcgaggtcgtgaagacgccggcctcataccgaagggtaggacggtgaggtcagccccgtcccactccaactaaaatcaacctgacaggtattaatatgccaccatgaagttaacaaatgttggtgattaagtatgctaggttttacgaaaacagattttccaaaataaatgtacatgttttaggacgtcgcgagccgtttgaggcagcattccccaaggacgccacttagtctgtaggtttagcggctagaaagattcagaagctgagttcagtcctgccgccacaatcaatcttcgctcctatggcttcacagaagcgtctcccatgactaccaaatttaactccttccagatcacccacgggagcacctgaccggattcatttatttaatcaatgttaagaactaggttttgtgctaagctaggggatagagcagcgaatgagacaaaactgcaaggccctgggggaattagtaggaatatccagtgaaagggaaattaatgaattttataagtatactaatcaagaagtatattcttttcctttgaggtagaatgtaatatagcacctcccctacccaaggcctgggttaagagtatattaactgcttatttctcccctatgcgtggagaggcttatctgtgttccatcgtttcacattccttgaggcacagcgagttcttgcttccctccctagcgctgctgtaaagtcacaaaactgattagcaagtgttacaaaagcatgtattcccaaggacgtaagacatatggtgtaacaaatgtaagagtaatttactgcctttgttcttgcttctgcaagtacacttcatgcaacacgtaactccc

SEQ ID NO: 49084 - DNA, 652 bp, Homo sapiens
catgtcttgcagcatcaacaaattgttttctaaatgtggaaaaagagacattcagtacaggctaacgtaacgtgggacagcatgcaaagccatgagaagtgggaaaatgagagagaatctgggcgtggcttacagggctgctgaagtaagacacacccttcgcttcacctgtggcctcccgcggcggctgcggctccttcgcaggaccggtagggggcgcgcgcggttgagtccagcaattgcgaggacctccgcaggcgcagcccagcactgacgcctctccgggccgtggctcctctttcccaggccgaaagcggccgggccctctgctccgctgcgccctggcgcggccgcacccactgcgcgtttgtgagctggccatcggtcacactgggatactcgaggaggaggcctggggcctgcattcaattccctaagagggacccgcgctggccgctgcaggcgggtggagaacgggcgtctgagtctttggctttcgtaccggaatctccccgggagattttacaagcccctccgaatgttctgattgaattggtctgggggggtcggtccgggcatctaacgagcagccgggatggagaattactagtctggattctggtcctcagaggttcactcacgttaatcaacc

SEQ ID NO: 49085 - DNA, 2021 bp, Homo sapiens
cagaaactgtaaaggcacatatgcactccagaagggtaagaaaataatgaggctgagatcctgagttggaccaccgagatgaaagacttctggtgaggctaaaaacatgtagaaaaagcgatgaaagccaaaaaccttaaaaggtggagaaaagtgtagaggcgagaagtgagttacagggggagaagtgagttagaatgacaagctgtgaatccctttccctgcaatgacaaaaatacgtaatcactctgcctgggaggttttttcctgcgccaccacccgtcaacgtccactactggggaaaaacgtaagcctctttgctcaaagagtttccacccaaaaagtggctatggtttctctgtaactacatgtgaaaaataaactccttgcctggggcaactagatgtggagatggttcagtctcccacctccgttttccctcgctggagtcgaacttgctcctcctgtttcccgaaggacaccgagaggtcccacccgtacgggctgccgcgagtgcctctctggccgctacattcaactaaatgggtgggacagtcacctggcgagggggggcagggaccgtcaccgctttctcattcctccttccctcctcccaggcacagcagcccggcccagcttcctgtggcagaaaaaccctcagtcgccaaaagaaagccgtcttgagggttcccccgcgctcccacccgcgccccaaaagctcaggtctctggagtcggagaccctcctgcccacctgctctttactgtccttccctctcctcgcacctcagcaccattcacccctcaccctctcccgaaactacggggtcccaggtcttcaaaggccttagctttccaccccgccgttaccgtggctatgaaatcgcttccgggttcacaccctttgcagcctcgcggttggcggtgaaagagcttccgggtcggcggccgggctgctgccgttcctgctccttttcactggacctgcagtctctcaggggctggtggcaggcgactaggagactagggtggtggcggtgggggtgccagcggctgagccggagccggagccggaggcgggggaggggaagagggcggccggggctgcgagcgcgcaaggctggaacatgagccgggcttgaccgcgaggcggaggcaagagccaccgccccctcttcccctcccccgagtgaggcggcgcagcggccggagagggatggggggcgcccacccagtctgagcctcgccgcgggcgccttcggctcacgcagcgcttcccgcgggccgccagtgcgcaccctcggccacatcagcctccgcctggcgggtgcacccgggccggcgaggaaggggcaaccgtccgggtgggtggggcgggctgggtacctgaggtcaccagctcggctgtagaggcaggggcggcggaggcggaactgcggagttgctgggtccaccgacccttaccctcagcgagagaagtaaccgtaagtctcagcttcgcggtacagatgtgtttgaggctgcctctacccatttgtggctccgagttcagagctacctacttcacaccctcccggatctactaggagtgtgtctgtcgcctgttttggagcattgttgttctgtctgtccccatccctgaacaggcagcattctctgccctacagggcttttctcccagcgaatttgcaagcctccgggtctccgtgacgcgtcccatcctccccatctggatgcatctccttgtccctctgtcctcaaaggatctgtgtccttcctcgcagcctcccccccacccccatcctttgagacgtggaaagccacgggttctgccgacctcgggggctagagagagtcttgagaagcggatgggtaaaagtgctctgcagggctgtgatgggtggggataggtgcagatggctccagtgaacctttatttttgcagcttctgccaccaaaacaaaagaatggagcgctcccctgtattcttattcttctccgtatgtatgagctgtttttctg

SEQ ID NO: 49086 - DNA, 824 bp, Homo sapiens
ttctgaaatgggctttttcccatatatcttttaacccttgggcatgaggttaagtctggaaaacataactaatgctttgcccctgtataatatctcttcttttaagccgttacttgctttgagataaacagcaaaacctcagagatgagagcttccttggagaccaataacttttatctcttgtaataaacgttaaggccatttaaaatttttaagtaaaaaactcaaacatttctgggaaaccagcacgccctcctgtcgcccttcccccaccgtctcggctcccagattcccgcctctgtctggcttccagccccgccccgttctgagtgtgatctgtgctgtcagtgcaggaactgggacaccccactgctggcccgggcagtgaacagggtacccacaccagctaaggaagcctcctccatgctttggcaggtgaggcaatgtccaaacgtggacagcaggcagcccgtcttctccagcctcaggagctagctattcctcccagcatgtaaatccccagggtcgctacaccgtactggtgctgagtctcaccgacggtcacgtgttcttgctcactttgaccaccagggggcgcagaaccaaacctaggctccagacgcgtgcataggacttgatgcattttgtacactaatctaaccattatctttattttctagcccatttttcctttcatcagatttctccattaattgatcttatcttcgtatattatggatatttttataagccacctcaagtcttatttggaatcagatggggaataaatcaattggtaaataaatcttcccgtgaaagaatga

SEQ ID NO: 49087 - DNA, 2364 bp, Homo sapiens
taccccagagcccgccactgagcccggctaatttttgtatatttattagagaaggggtttcaccacgttggccaggctgatctcgaactcctgagctcaagtaatccgccggccttggtctcccaaagtgctgggattgcaggcgtgagccaccacgccagacctggattgccagatttagcacataaaaatacaggacccccagttaaacgcctctcggataaaccattattgcatgggatacactcacgctaaaaaaattgttcgtcgtttacctgaaagtcacatttaattgggcgtcctgtattttacccggcaaattctaggcctgagaccaaaaagtttgagaaccctgcccctaggcgacagcaagcggaactgcagcaagctcccagtaattccgggtgctgcacttccggtcaggcggtcgggctgcggggccctggggccagctcaccgccggaagtctccgcgtcccccccaccccggccagatccctttcccagtcctgcttcccagtgcctcgggccagggaatcctggcctccgcctgcggagccggcggaacccgcttcccgcctccacggggcagcgccagcggcctggtcctttcaccggcagctccgtgccgacgctctcaccgctcttcctatcgccgggagtggcgggccgaccagggggcggccgggctaccgtccgccattcccgtgtctctgcgcccgcgggggccgcccgagccggccaccatgccgctgggcctgaagcccacctgcagcgtatgcaagaccacgtcgtcctccatgtggaagaagggagcgcagggggagatcctctgccatcattgcactggccggggcggcgcgggcagcgggggcgcaggctcgggggcggctggagggactgggggcagcggcggcggcggcttcggcgcggcgaccttcgccagcacctccgccacccctccgcagagcaacgggggcgggggcggcaagcaggtgagctcctccggcccctcccgccggcggaggccgaccaggtgctaggcgggcggggacgggctggctgggagcgggcgggcgcgggcttccccgatcgccgtgctcctgctggctggaacgcccctccccacctcctactgagatctttcgtttggcccattccgaagcacctgttattgtaagaaattcaaagcaataagaaccaagatgtaaagcccttaagaaaatctcaatatacacatgtctacacagtcgtatacagtgtcatgccacaaatgcaggcgctggacctcattccttgttaaaggttttgtcatatcaggttatgaagtaagattattatgtcattattgtaaatggcagcttaagtattccgttgcagggggcgccataacctactacgttctctggccttagggagtaaagttgttaagtgtttttctctattgtagacacaacaaatgaatagtgtttgtcttggtcaagactgactcctactcccgcctcctgccctattacaagcagctcacaccttttggaggctctggagacgcctgtccagcgagctccgagattccgggtgctgaacttccggttttacttagcctagttgctgtaattacttctcttgaaaagcaaaagggcaatcttaattgttaaatgctcttataaagtacatactctgggatccttgtaagatgattgtactgcaacctttatgcactttttacttctttctctttttgttctttaatttgtttgtgtaacagagtaagcaggaaattcacaggaggtctgctcggctcagaaacactaaatacaaatctgctccggctgctgaaaagaaagtctccaccaaaggaaaagggagaagacatatatttaaattgaaaaatgtaagatatttgtggacagtgccttttactgtaatgacgttgtgtgtatcctgccactgccttcatttctcaccattgaacttggactctgcccttggtagcccttccttagtattctggggaatggtccagattccccaaaagggaatgagctctgttgcaggaggctcactgtttataaagttaataatactctttcctttttgttttttagcttttattttttcccctggaaaatataaaatatgggtttaaaagaaacatcaaccttgagcccattttttggggttctctatggaaaggaagaggagagattatggttcttgatatggccaggtacactaagaaaacttttttttttcattctttaaaaatctaagtaaatattaacactagaactcatcatttgcatatttatttgttattaaagccccagaaaatgtatcttactgacttatgatgatgatgtat

SEQ ID NO: 49088 - DNA, 2129 bp, Homo sapiens
aataacgacgatgataggaggattctgctgaactcatgttttcagtggaccaaaaatatcttcccctaggtatggggaagtaactcaagtggaaagaagggatgcttgaaattattgcaaactctattcattgcatagattagccactggtgggtaccatgcatccaggatttatgaggatttcaaatacgccgtccttttgcccccataagtacactcaaactcgtgagaccatgtgcctctatttttaattatgaaaatatggacgctgtatctccaccagtggttagaactgtgaaacatcctaaccacaacgtccagaagggcgactgatcgcagagcttcaagtgatcttaactacgttatgtgttcctaacacactacagctgtgttccgcgtcagcgacgcagggcagaaccatcattgtattaacctttcccgctcatgggacgcggtgcttagtccccgggaaccgacaggggctccgccaacaactctgcgtcccgctctcgcggcccggacggcagcagcgcaggttaactggaaatggctggcaaggaaaacaccttttaaaataataaaaacaaaccacttctcaggagcttttccagcctggaataaggaatatttataaaaacagtggtagaatattaggacgtttctaggttcagtttcaccaagtgaaaagacctgggataagacgagcccagggctgcactggacttgtgggatccagagactacccagaagggccctgccgtcgagggaccctgatctctgcgcgcttcggcggcgcccgggtggcagccggtgtcccgccgcgtccctgagaggcttcggcctcgtccgaccccaggctgaagatcaggtggctcggggccggcaggttacctgcagcagatgcagctgggccacgagacgccgcggcaggtggaggaagcagtcgcgagcgttggtgaaggccacagtcactgccgccccgcctcccccagcacccgccaggcgatcgctgccccacatcgtcccggagcgtcgctctgggttcgcccaccctagcgccgcaaaggacccgggacccggcaggccgaggacgtcggagccggaggagatcgatcggccccgccccctgcggccccgccccctctccccgctgcgcatcctgccgtaagcctgtagtgggtgggacaagaaagcttctgtcacccaccgcgcctctccgccgagccgctcgggggcggcacctcgttcatcaaatcttcgcacgcaggaaacgatggccgacgctgtcgattctccagccaatcctggcactccttaactcatcccgctctcttattggataaaagggagctcagtagggcggatgttgtcctccctgcgaggatcaaagtaggcaagatggcgtcgagcggcggggagctagggagtttatttgatcaccacgtccagagggcggtatgcgacacacgggccaaatatcgagagggacgacggcctcgtgctgtgaaggtaaagtgattttggtttcattcgctctcctcggtagctttatgtgagtgctagcgccatatgaccagcctacggaaataaaggcacgacaaggcttccgtcagatctgtctctcgttagagctggcgtgaagaaccctcggtcagttaccaaagattctcacgacgcctttggtcaagtattagaacatcaactccacgagaataggccttggttttagtcattggatcttctgtgtttacagtactacttggcacaggtaagcactcagtgaatattcgttgagtgattgttcccagtgacttctaccgactcaatttctggaaaaaaatgtcgactgaaggtagtctgttatatgccttaggtagcctctcacatggactgttattctttatgcagaaggaatggcagaaatttcattttgtgttcttttgctgactgggttgaacagattatttcttgttttcaaagttctctttaaaaaaaaatagaggcagattcgtcctaggcttatttgcgaaatacgtttaataactctgcatttctttcaggtatatacaatcaatttggaatctcagtacttattaatacaaggagttcctgctgtgggagtcatgaag

SEQ ID NO: 49089 - DNA, 1280 bp, Homo sapiens
accttttcttttgaatgcctttagaatctctaacaactatcaaggaccatttcctactctttctgctgtaagttatttatgcatctcttttatctcattcactagagtaataattttcatgcccagtactcgctcacacatcttgccttttgtgatttcaattaatctgtaaggttgtagataataatgatccccttttataaacgacggcacagagaagaaaagtaacttgttctaggtcacccaacttccgacggaacaaaactgacattccagttttgtgttggactcgaaagccaactattttcacgccattcattccctcacagtgtctatgggggccaggtcctacagggcgctggagacacgaaagcaaatgctgccatcccattttcaaacgggagcctgcttgtcgctaaaaccaggcgcgctgctggctctccggcacagggaccgcgtcgaggcctctgtgcctccctcccacttgggtgcgcaggagaggggtgcggacctggggcggccgataccaaggggcgggtgagtcggatgcgtccaagggcctaagtcttcggagttacatggcggggccaggtgtggggggggttccccgagccctcgcggttctaagtgggcactgggggcccgcgtacagcaggcaagagtgcaaaccagcagcgccagaaagagcgacgaggtgagggaagaaaaaaggggcgggcaagagagagctgggaaccctaaagcgccaactgcgtgcgcggcgcacgcgcatctgggatcggcggagggtgctgggtctccaggccccacgtctgagggctgccgcttgccctccggcccggccgggaacagcgagggttctcgctgtcctgccgccgggccctgcgtcgccccactgttttcccggctgagtactcaccacccgattgtcccgcttccccatggtgctggatcgagcgcacagtagcacgccgagggaaaccgggccggagagactgccgaagagggcctgccgcaggtcctcttgccgcctccccactccgcctagagagcggcaccacgcggactcgacggccgcgctctgctacagcgccccctatctctgtggaggacaggccggctccagagatcgctgcagttggcggagcgcctgcaggagtccggtcgttcattaggcacccaagagcaggcgacgctgcgcttctgcaccggagccccaccaaggcagctcgcttcagtttggccttggattgttttgctttcttccattcttttttttt

SEQ ID NO: 49090 - DNA, 3849 bp, Homo sapiens
agtgtctagtattgtgagtttagtgtggtgattaatcaacaaaagctagcatttattttatcagaataaaattttactggcccaacagcaagtttaactttttcaaaaagcttatttactgaatttatattttgaatgattcatcatgggtactgttaaaaataacaaattattgcatacctatatcaaaacatctcatgtaccccatatatatctactatgtatccacaaaaattaaaaataaaaaatttaaaaagtaacagattatcttgattataaaatatatacgcattgtggaaaatttggaaaatagagtaaatagatgaaaataaattacacagcatcacttccattcttttctctttttatatacaaatggatatgatggtatctctaaagatctttttttttttttttttttttttccaaacaagctaagatggcaccaatcccagggcaggatctgagtcttgactatagtccttagttttgaacaagtacagggtgacaagaaagtgcataacaaagctatgactgaataaaactcaaatcttggtgaagaaaagaaatcaaggacacattaaaaaaactatgggtacacacattttcacttcttagtttatatcttatggcagggagcaggagtaatcttttctttttcctttatgaatggtaaagacaactggtatcctgtctgaatataatatgcctatccagcacactttgggtagaatccaatgatgtgtgataactcaacaatttggtacaggaaacagagcccacaacattcctcagaaatttcacagacaatctagacagaacagacctatttgaatagggttttttgttcagtaatatttgaaggatgcaatttttcacggtggacacattgggtttgtgacagatgcaaattcagatatgaataaaacacaattaaatgattcagactcttgaactgtgcttccacagacctgatttctgcatgggccaaacaaaggaaagttggtgtttgacaactgtggatgactcatcagaggaagttcttaccatgtggatgtgcttgttgaaataaagctggttaacaaagctagccttttttttttttttttccctctgtgggccagcgagggtttcattttaggaaatggaagtgtcaatgtggacaaactgttctgaagtatttatagcataatgtaatgtgttagtttccttaaactgcctttggacaaagaatatgtgaatggaaaataagatctgaatttctaatactgtcttgtgtcatctgaactgtattatgagtataaaatgatttagcactgtgatatgtacacagtgtgataggaatgtagtgtagctacagtggggtgtgctagtggctttccaattaattttaagagctcttttattcattaaggatattacacctttgtcatattcattcattttctccaagattatcacatgctttttaacttggcagtgtttttattttctgatgaacaaaagttttcaatttttatataatcaaatatattagtatttttgtttgtgacttcttaatgctttgaaaatatatctccattctagggtcacagatacttcctatagtttctttattcttttatggcttcacttttaatatgtaactctttaagccatctgtcatttgctctgtggtgaggaatagtgagaatctaatcaggttaccatttttcccccatgaaattgaccaattaccctattctcatttgttgcatatgccgttctgtcctcccagatttgtgatttatgataaattgcatcacttcctaaattagggtttcaagtctcattctctattctgttccattaatgtctgtcacttctgctggtaccacattatttttattactgtagttgcataatgtattttagtgcttggtagcaggagtttctcttcataactttttttttttggtaacaaaaaattcttggctattttcaccagtttaactcttccaaatgcatttcaggaaatcccactggaattctgactggagttgcataaacctatgaattaatttggaaaccttttatatccttacaactattcaatcttcctgttcaggaaaatggaatatttaatatctttctaataatcaaatattctctatatctaggaaagtcatttttatgtatctcaatcaagttttatagttttcttgatatgggttctacacattgacttacatccatctacatttttgatttttatactgggaatgagatggagctgctgctaactctggagaaacttactgctgatcttttatctttggacatgatcctgactgttctcctaagtgatggattatcttagatttgaaaagtataggaagtaaaggacaagagggacatgtggggggatgtagtagagtctgttttatattcatagtgagaagactctgaacctcccaggagggctctaaaggttaaaaaacatgcaaccaaaagcaccgaggattagtaaaaagaaataatgtgcagtaagtgctcagagggatgactcattgcattggatcatctttgggaaaccacctactaagcagaatttagcagctaaagcgttatttttggtgcacagtttattgctacttcctcttgggaaaaaaagattaatcctagctccctaaaacacttaagaatggtcaccctggcaaaccggcctgtcaggtaacaatgttgtttccagatcagggcagtgttaggttccctgtagggatttcttcagaacaagggagaagcactttaccacatgttatggaaaggagtatagaccaggagacagaagatccagctcttagtgctggctctgtaactgattaacaaataaatcccagagtgcaggcaggccacttaatctctgctcatctgctaaaaaacagatatcacagcttctgtcgtactccatatcatggaagaaaataacacaaaataataaaccatgtgaatgaagcagttaaaactgctgagaaataaaattaacctgctcagtaaaagtaaggctaccaatcaagaacaaatagaatgaactgttactcgttccaaagttatttatttttgcttaatactgtatttccttctcctttttctctgtcctgtggtttcttttccttgtttcattatgactaaatatgcaaggaaaattcaatgctgttattttggtcctatctttggcccaaatctctagatttaatttacccatgataccgtgctgtgctatttaaaaagatcactaagaaaactttatagatgatgaagttaggaaaatgacaaataaggggataaatgcgtttccttatttaggtgaggactatggctgagaagattctgtaacttagacatagtcagggacgtgataagagcaggagctgtaatcagttttgctaatcatgatttctaaacaatactattttatcaagtatttaaatgcaatctatccgtagcacatttaaaaaaaagttataagaaatatttttaaatttgttattattattattttttgagacaagatctcattctgttgcccaggctggggtgcagtgaagtgatctcagcttgctgaagcctccattttctgggtcaatcattcacccacctcagcctcctgagtagctgggaccacaggggcatgccaccacaccaggctaatttttgtattttttgttttgtagagacagggttttgccatgttgctcaggctggtttcgaactcctgagctcaagcgatctgctgccttagcctcgcaaagtgctgggattacaggcgtgcaccactgtgcccagccaacacaaatattaaggtcaact

SEQ ID NO: 49091 - DNA, 638 bp, Homo sapiens
gtaaatgcaaaaataagctgttaatatgcaatctgtaaaaaaggtactaggttagagaaaaaaatgaaacatgtctaagttcagtgctgtttttaatcagggctgtatgccacctaacagagtgcctttgaaaacaagtttattgcatgctgatgcctagagaattcaatatgactctgataagcaaaacagataaagcaattggcttccaaattacttctgaatattgaaatattagcatgtcaaattattacaattaaatggttgggcaacacagtgcaaacacatttggcacgctcttgttgcccaactttcaaagtattggatctcctcccaagttttagactgggaatgtccagcaaactctgtgccagtgataagagaagagctggtagtatccagttcagttcatggtaaaatctaatctccactagaaatctgccatcttgaattgtcccttgcaatgtttcaattagcaagtaagtacaatccatatgtctgcagctgtctgtcacacctttctttttcctgttataaaagtgcatgtatgtgcatttgcacatacacacacgctcctaagcagccaacaactcttaaacaatcctatctatgagtacattctaatacctgtaaattta

SEQ ID NO: 49092 - DNA, 1294 bp, Homo sapiens
ctaaggcagaaattagggggaaaaagtctcatagcttctttgttggtgattaagggaccctgaggtaaaaaaaaaaaaaagaaagaaagaaagaaagaaaaaaaccaacaaaaatcaagaagcaatgctcaaggtaataagtgctttcatgtttccagttctcatatctgagggcactggatcaagctaaaggacaaagagataaggacaatattgcaagttacaaacaaatggcagataaaagagctcttctgggttctgattaagtgacagcattctacacattcttttgacttgagaaagtcagactaagagcagcggctaagttccatgtgaagccccgctaaataagcgtatctgcatgctttcacattctggcaggacaggattcctcccctttcattgaacagagacatgttctctgggctcacagcaataatgcgcctctgcttcaacttccataaaaaagcataaatgtatatgctgaaagcacagagaagttttgtgctttgggacgaggtggctgggagccaatgtttacaatcccctgggtggggaaggcaggctgaaaggctcaggacggcaggctttaaaagtctttgctgttgccgccagtgaccttcgcctctgttttcaaagcagctctcacgttaaccccttggattctgtgtgcactggagctgcacaaaggaaatacctttctttgaaggacacctctctcacgcacatcggtttctgatttcagttggagcagctcagaaacactggattaagaaagaagcatgtattcaatctgctgtcagacccacggacatgtcagcggtattggatctgggtttcggagtgtgctctgttgtacaaagtgaaagtttccagctttaggcaatggactcaaggttataaaccaggggattgtgaaacatgagcatatttggtctccaggggagaaggaagcatccaatttatgcagaaatgctcttttcccagctagccaatgagaggcgaggctacaagagtgggcttcctattgggatctcctgactagaagaatggtgcttaaaattaaagacaggctaaattgctaacaggccaacttaaaaagcagctgaagagaaaacaccaattgtaaaaatgaaaagggagttttcccgttatgaaatcaaagctgaccacatttagcttattattatatgttgttgtttcacggggaaagaattaataatcttttattcttaatgctaagaagatcctacaaaatcttaccatatatgtgtatttttttaatagtctttac

SEQ ID NO: 49093 - DNA, 2030 bp, Homo sapiens
tgtgaggaaacagcataaaaactgttatcacatacgcagttttattaactttttgcaaataaattaggctgtatctttgtaaagcacacagtatgtattcctcaatggttgtaaagtaaatatgcagtgataagagtatattctccttaactctgaaaataattttagggatgttaagcaaacaacaatatattttatgaatggccaaaatctaatgaaaaacttttatttctgaatcctatcatttataccatgtggtttaataataatacaattaaatatatgtcttcatttcatttctgaatttattttatacacttaagaggattataataattaaaattataaaaataaattaccttaatggcccagagggcacggaaatgctaaaacatttatgttaagtaggagttaactcattaaagagcactgacaaagatataaaaattatatttaattctactatggtgacttagatgaaatgaaaacagtctaatgggttgtgcaagagtcacaaatctagctcctggctctatacttgtgtgaacttgggcaaatcattaagtagctatttatgccagctgcctccatctgtaaaataaggacagtgctgcttcccaactgcatgagaatgtcctaggctcagctttgagaagtttccctcagagtttaatctttaaaaaaaagccaaacccaatcaagatataaaggtataggaaatgttaaatttccttaaacttgcagactagacaatgtcttccaatggcattgcagaggttgaactattccactgttcatgaaaatagtcatgttattgattcactactaggcttgtgtctacatgagacagaactctgagagtaaacaggggataagttctggtgaaaagaatgcagtgagtcattaggaccacaagtgaaatgaaatgctataccaaatgctgttgaaactttgggacctaaaatgagaaactactttttcccatgagaactcagtaattatcattttaatgcatgttaggaaagattttcaagttcttagatgacatgtttaaacgtaagtgttttcaatgaaatacgccattttataaaatacagtcactattaattaatgccaaaactaagagaatttttatggaattacatacagacatatgactaccaaagcagttcatcatgattgatgttattattctgaataccacaggagttagtaatgattcggtgccttcccatgaagttcaagccaatgttttttttgtctaattggctcatcattgttcactaaattggtattttctctgctattcctatttccaatcctctggtattcctctagagtctacacaatcttcaggtaactgcttcaactgaagcctgacattatacgacagatcctgaaattaggccaaagaaacaattctgaaataataatgctttttaaacatgaagcaagcctaatttatttactttctctatattttcatatttaaccaaagaaacaacctactttatggtgattaaatctacttctgaacatcaaattgtgaccttattaagttattaaattatatgcttcacctgtgaatactgaagcatatgatttaataacttaataaatgtcacaacctgatgttcagaagtggatttaatctcaaatagaattcaattactgatgatcccctaaaatcagagatcagcaacaagagtagatgaaaaatcatttacagtctacccatctgtaagaccagagatcccataattagtgattgagcccatactcatgagggctcgcatttatgtgtaccttactgattttcctttgtgatctaacatttgaaaaattataaataccgaatgaggcaaatttctcagaatctacacattattttgagaaatacttttatttctcaatttttagatatacttaaaattgcataagaagattatcttatttatttatttatttttgagacggagtcttgctctgtcgcccaggctggagtgcagtggtgcaacctcggctcactg

SEQ ID NO: 49094 - DNA, 763 bp, Homo sapiens
ggtaatggtttactaatttaagaccctagagaactgttaaatcattagtgtatatgaaacaaatagcaactttcaaaggtcaaatcatgaatgagtgatgaacacttttttaaaggaaagatttttgtgtggcttaaaaatttttagttggaattctcctattcctaagcatctctttaatttatatctcctattaatgagtaagtatttttcaatagaacattttaaggaataaaacttcagtgcctttaaacaaatttcctacatatcaatgacgttagtaaagcaccacacctgacttcacctgggcttagattgcctaaacctactgattggctggggttaccaatgcacaggcaagcaaatattccagatgtctgagtcatctcagaatgtaagggagatgttttccatttcccacttgtgtcatatgacatactgcgggggttgggagtatgtcttaagctgcagtgtctggtgtcaccagagggtacttattagaaactccctcctgagactatgtttgacaatgaggaatcagttagggcaggattgtcattttaagtgagcaccccaggtggttgattcactgaccacacttggagaaacaaagcatagtgtttacaaagcctttatcaaccctttattagatagttactcatttttgcaaaatctgttgggtttaaaaaaaaaacctgttgggtttagtccattttccaggcatcctaattaatctaaccattacatggtagtagccaaggtt

SEQ ID NO: 49095 - DNA, 4086 bp, Homo sapiens
taattttaaaatgaaaaacatgtatcactacaaaattattttttagatatatactcctgagatacgagaatagggtctaaaattcatgacatccatccgtctcttcactgagcttagttctccatccttggtataaaacatatttaagcgtcccaccccggggaagaacaatttctggaattcagttagtatttttggaattagtactattttaaggagaatatatcttatagttttggtaggatcagttattggttttagactatttctaaaccaagctatattcttagctacaacacagataatcccagaatcccggcccaccacagagaactgaatgcgcaagtgcaaagtgaatgtgccaagatacaacataccttcagcttatttttctgtaatataaatatttaaaaattttatccttgaaaaagtaccatttcctggcttgtacaatggtggtattgatgcatacatttctgagttaattagaagataaacacctagtacagttacaaacacatgtttactgaggatcccctatgttccaggcagtatgctggccctggagctagtgcaatggactagagtcttgacttaaagtctcatctagttgggaaagattaaaaaacaaacataaaaaataaatgagataatttcagctaagtgctatgaagaagaagataaaataggataatgtggtgtaatgtgataaactataactagatgtggagttgtagctgagagggtcagagaaggaatgatgaagacatgacatgagctagagggtgtggagcattccaaacagatgaaaaatcagcacggacaaatgccgagctagaagcaagctggaggaacagaaagaaggccactgtggctggagaaccgtgggcccaaggaagagtggaggcagatcagaaaggcagggggtggggagcactagatcatgtaggacttctgattttattctacaggtcatgagaaaccactggagctaagttttcagtagggaagttagataattttatttctgctttaataaggtccctctggttgttatacagaggatggtccataaaggggcaggagcagaagtggtgtgttgagttaggaagctggttgatgggttaaactagaactatagcaatgaagatattgagaagtagtcagattggggatatcttttggggataacaccaaaagcacttactgatggattggatgaagactgtgaaggaaagcaaaaaatcaagaattatgcctaaacttggggctcaaacaactggcagatagggaaggcttgagtttggcagaggattctcggtcaatgttttacatggttagctgactatctgtaccaagagcatgtgggagacgtcaggctggagaataggtatttgaagattctggactaaatgacatcacttgattagaaagtgtagccaaggaaaagaagaaggctgacagtgaagccttggatgttcccatgtttagaggaagaagagccaaaaaaagagactgcaaccaaggagtttagcacaggctaaatttagatgagaaatagccttccttctacgcagaagagcactctgctatctgttgccatggtgatataaacgggtatatactacctgcaagttttaatggactttgtaaacagattcaatgcctagggtgaggaagcattttctaaagagattctaacttatctgttattagctgaatctaagtgtcatttgcctatttagtgagtcattatttatttagtgagtcagtcttacagtacctttagaaagaaactagcttttcttaaacccatatttcctatccccctaccaccactatcaaccccctgtaccccaccaaaggttcccttggctctgcatagctctgccccagcttccttttagtccctggctttaggctgtctccaacctaagtcccaagattctttcatttttagttctgctgctcttttacattaatgtagctttttataggattggagattttaaaaaacctactaaatagctgttatattttttgttaggatacatacacatgcataattctgtcctctttctcttctgatattttcagctactataagggttaggaatttgcaaaaggatttatttctgagagtcttcagaatctagactgcataaaaatgttctcctttaagaagttgcttgagttactgagttttcccttggaatgaaagatacttgaaagcacaatatgtatgttcctgattggagcagagggaaacaaatggaaattattagtaagattacactgaaatcttactaattagaaaggttacactgaagattttatttctctctacactttagatctgggcttctgactttagtagtataaactcccacagttgttagagctcactcactctacatttccccctgaatttggaatatactcagtattgactcactattcttccatccttcaaatcatctctcctattccactcagtggtcagctgctggcactgctttgatttatccccctgtctactctcaggctggctgcttaatttttgcttagcagtatagtctttaaaaaaaaaccccaaatttcaaaactctcagtatgtgtgggggcagaggggtgcagagtggggaggggcagtaaagttgtggtttctgtggagaaaatatttctttggagtcaaaagactatattaaaagctcgtcttccacagaatataggtcacattcctggtaaaagtttggatgcctgttttttaaaaaaaacagaatgtctctaaacaccatagttaatatactataagtgatatactttgaataaggcataataagggtctacaatgtgcataaatcaactaggtaaaacattataataaccaatactgtaaaaagctacattaatggagaagggcagaagaactaaaaatgaaagaatcttgggactcaggttggagagagcctaaggccagggtaagctggggcagagttctggagagacaagggatgctgaaggtgggaggctgatagcggtggtgggagtttgtagaggggtaaacagtgaaaacaaaggatatagaaaacacagggtcttgagtgccaaaaagaaaataaactgggaaaccacgttcgcaagttaaaagccttgaaagatctactatactgtgaggagtgaactattttaagtcaaattgctgtaggttaaggcccatcttacagtaaaagatggcatcactgatctatgaggtcttttaaaccagaactatgttattccaacattcgactttgcttctttaaagagactttattgaacagtcctctcaggtgtctttcacaaatgtactttctttttaaaattatttcctgttactatgaaaagtagtttgcatcaaataccaggagagatgtgtgtgtgtttttaaaaacatggtctattcaattagtgcagctatgatattagattgaaaaaaatttccttccaagatctttatcattatggtagagtatttgttctttgaatttcttgccttgtttttgggatcaccttattatgcaacatctgctctgaatttcaaatgtgataaacagagtatgagtgtcggtggcagatggctaatgaccagcagcgacagggcattcaagcctgccttgttttctgggaagcgatattttcatgttaatttgctctgtgtcctgcaaagatgagacaaatcacctgctcgtaattcaggcaaaatggagaccaccaggagctgagaggggccatggcttgattcctttaggagtgagaagagaagaagatctgagaggctttcctcatctgcagtacagggaccagtcagtcactttgcattatgtcaaactgagaaagatgaatcagccctgggcatcccatactgacatcagagccactgtttactgcaagcagatattattcatgaaaacagacatttcccagaggcaaaaaacaggtgctattaacagtgtgtgtcagtttctgaagtctgggttttgtaaaataaacctaatagtgtgttttatctcttactaaaaatattacaaccaatagaaaactcta

SEQ ID NO: 49096 - DNA, 881 bp, Homo sapiens
atatgaacaaaatatctcagatgacttttaaaggaaaggaaaattaccattaaatatttatccattagagcttagcataatgtgatccaagtgaatgttcaaaaagtcaaagtgcaaactggttattggcattaactaaggctatgccttcagtttagctgtgcaaaatgcaatccaaaaaaggcagataggtcgttatcatttcacaattaagttggccaagcccctaactctcccacaaagtaagttctcttgctgtctctattgtcctgacccgccagctgcagggcagagaacaaggcttgcagtccagcacagcactcagttttccagctgtcctagtgatgtaattatctaataacaaaatatctctctgaattaactctgcatcctacccattgtaattcttaatgactacttcctgttcatgttctcaatttaacttgctcttctggaactattgcataggcaagttgccttcatctaatggatgggattacatccaataggtttgggatttccaaagattacaatttacaaaggtctcccaaacaacatgctttgtaaacacaagccctgcctttctattgtggttacaataaaagggaaatctgtcttatttgctgtgattaaactttgacccattcacaggaagttctatgaggatttttttccggtcacttttttttcccccattctcttcaatgtttggacatcaaatagttcaagagctgagagatgtctggcacagctacctaagggccacaacaaaattctgcttgaactagagccagtatttggaatcgagaagaatttttaaaaatatctaatctcctcctcttaagtgcatgaagcatattctgtgactatgtcttgtatgc

SEQ ID NO: 49097 - DNA, 792 bp, Homo sapiens
tgcattaacatttttgttcaaacctcagttttcttgtgaggtcgggatgagtctgtcaaccttggactcccaaaccctctatatatactaatgaaattgggcttctaggcatttagtgccaggtggatactggaacatggcaaccacatcacagaattggctccctatgtttgggcagccagccattgttctgactgcctcttaaaaaggccctggccctcagacataccttttcttcacactgtagcataatgtttctgcattttgactttaactcctacaacttttaacctataagaataaagatcaggactaccctggtttgttagaagaacttctaaagaaatcaactctttgggcagcacagatgagcacttttgaaaaggctaattgttagtttggtttatactgaattgttttggttatgaattgcctcatgggatgggaaatcccctgcagggccttgtcaaacacctcctcactctccacggaaaatcagccagacaacaacgggatcttggacaccttcgatgtgttaacactggaggtgctccagtgagcaaaactgtcccctctggaagttactggaatcactatcctgggagccactataacagatgactctacttttctcaagtgtgctagggtggaaattaaattgaaaatgactcgtcctgaatgatgacttgacttttcaagtgaattttgtcaacactgttagagaattttgttcctggctttagccatacaaagcccaaatttgtccaattcatctgatgtaagactaaacaa

SEQ ID NO: 49098 - DNA, 1366 bp, Homo sapiens
gttttctgtaggaatttttacttttgcttatttggaagcagttaaagggccagaaatcctggctatttagaggcctctgtaaagatgaaaacacataaacacatttaacaataaatatttgtattttaaatataggcatatttttgctatactatagctatttccttcactgcaaaccactggtttaagatttcctttaataatgaagatatatttctaaagaaatatatctagataatctataaaatggtttttaaattgtttcataaattgtaaaacaaattggctgtcaacatggagaaactctcaatagcccaggaaaactcaggcttaaaaagtttcaaggtttcctggaactttcaatgttttctgaaaattttcatctccaaatgtgctcaatgttaataattttagagtctaaaaattgtggctgatcctaaatataaaactaattgacaacgacaatctggtttcactcatggtagacctattctggaccattcagaaagtgatgagggacccaaggggcagatccacaattaccttcccttacttggccttactggtcactaagcctttcctaaaaccaaagctgcaaacagtgcaactgaagtttgaactccatttccttccactcctgccctacttattaggttgcacagaaacaataaaagaccaaatgagttatagcaggactgctcttacttgagaggtaagggtatatttatttatagtccagggtcaaagctacttccttagattgtgaccatcttaagaacaaaaagtatctaatccagtgtgaaatataatggttcatacctagtaccattaactaattaaaaacagaaaggaaagactgcaaatttttgatgatgaagaaaccaaaggttccctgaaactctcagtttgaaccaaggtcattcgatatcattagccagagtgtggctgaaaagagaaaccaggaagtgctgagtcatcgtgagcatatgcaacatcctcgtcagcacttctggtgccagattcaaaggtatgcgtacttcctttgacctgctactcttccatccttttctcagtaacgcagggtaggtcatggaaagctaactgccaccaagttgagaagcagcatgaaccctaacaaataacactacttaacactgtcaattctatatgctggtctctagatatggctatgaaaatagattgtttgaaaatatatatgcgtgtgtatgtgtgtgtatatgtatatcatttactatctgtcagaattaagccattatacctctagtttccagtaagtcaagatagcttcctcttcaaataaacagcatgcctttgtcagcatgcagtttatgtgcatttaatttgc

SEQ ID NO: 49099 - DNA, 5568 bp, Homo sapiens
aaaaaaagtcatctataggtttttatatataatctcatcttctaaaacactcattctccttcactagctaggccgaggtataatgcggtcttaactttataaccatttactgccttatttatatatttatgattctttgatgccttctagcttgagtctaaactgcgttgggaacaaagcaccgcacaaatcaccagcctgggataagaggagacaagttaaaacctcccaagaagattctgtagatatttggtctctctgagtctgtagagagtttggtatttcaaaggtcagtcttgggtctctccactttgatgactaatgttaaattgtttgactttttacaaaaatatttagctgtgcttatttacatcatttcatcctcagcgcacacagtaggcatgtatttgttgaacagaagccctaaatggatgagaaaaaagatatttctgctacacattttctcaagatcgagaaaggtaaaatcacaacccaatttgcagaagtttctaggcattccttttcaatgtaaagctatgcatctctgtttaaaaaagaaaaggatgacacaaccaaacaatgtcaaccacacaatggggaaattccaggatcactaagaaaacaccattatcctaagtcacacattttcatttaatactggttaccacacaggagagagtaagaactgctgtctccccacccactcgcacaatccatctgggaaaagcatgggcagaacatttatgatctaaccataccacatcttggactcacatttaaccctttggagaattagtctaaagagtatgtccgcccagagatataaagtaaaacagacacagggataacagttttggaagaaatttttatgacgctgtttgagattgggcatcagcactcaaactccttagaccaccaggagtcattcttactacgcaactttaataaagagaaactgagagtatgactggcaaaaatattatgatgtttctgcatcttgttaacctgatttacacttggctccacccataaagttcccactgattatcacacggcatcctcattctccagtctcacctactctgtctttcaaaaattccccaacggcatggccacgaaaaatatgcgggggctagcggggcatgtctcaggttggcttatcctgtccctaaaacgcacccacttcccccagaccctccttcagggtgggcagggagaaaacgcttctaagttgcacagctgcagggaagcctgctcaggtcatgtttttttgacttgtctttcggctcgctgtctggcaaggtcaccggctctggctcgcggctctgtcgacaaaacttaactctcactctgtaagaccaacaggtcgcgcaggacctccccagtcgccctctgccccgcacctttctgggcctgaggattcccggctcggccctccccgcgcgcgcgaggccccagatggcgagggcgcagctccctggctcacctgaccacgttggggtgctcgaaggtctccaggtgcctcagcaccgccacctcgcggatggtggagagcggcatgccctcctcgccggtctgcacccgcacgcgcttcaacgccacgaaacggcctccgttcttcaagtcgcgggccttgaacaccttcccataggcgccctccccgatctccgccacgcattcgtactgctggtcagcgcggcacaggccgtccttctccatgccgcctggacgccgcccgccgcggcgccgctggggcgggcggggggtgcgctcaactagctggcggccgccgctcgcctactccggggctccccggagatcggtctagctttacttgctccccgccggctcaggcgctcgggcgctggggctttcgccgctgcagaagctggatggagagacctccccgcggggctggcgtaaccctggtgccgccgccgcgaaactccgcctgcagagtcgccgccgccgccgccgccggaggagcgagccgatccctcctcttccctcctcgaagcgaagtcctcaacacagacacgattacatagcctctgcccaagcgcgtctcagtccagaatcattgcacctaaaggaggagacgggaggataagaagaaagtgcaatcagacagcccagaagccttcctcggggttcctccagactcccctcctcctcctttacgaagcctccatcgctaccctccgcgcgctcctgccctctcccaagccgcttaatccttcctggttcctccgagaaaagcgaagttacttttctttccctgcagggctgaagccgtcttcgcgcggagaggttgcaggggcccctcggggatgagcgagcggcgcgggacgcagtggaacgggagggggcgtgccgagcagcccagagtgtgccgggagcgcgggggaggggaggcgccgggcacgtcaatgtcacggcttaatatttatccctatatcattgtgttgcgccgctaccctccccgcctcctgaggcccggacgtgcagggagacggggtccaggggtgccggagggcgttcaggggtcgcgcacaagctggagcggaaggactgtgggtccatccgtgtggggccgcagaatgtgggtgggggctcccaggaccctgtaacccgatgctgggagtgtgcgagaaggggtggtcagacatctgctcagaaattgcttcctttctttctactttcagtttttctacgaggagacatttaaaaacgactcgcatacacaaatggtctttttggggtaaaggagtctcggttggaaacggaattctctctccggctgggaggacctccctggtggaaaccttgggaagaccagccatctggtcggggagggttggggcttatcgggggtgggcgagcgagcggtcctgggggaggggagacaccgtcccccacgggatcccaagggtgggagaaaggggtgttcgccacaatttcgcttgtcgtctccttaaagaataacttcaggaaggggatagcataatcgcgcctcgtccttaagttttaaactgatttcgacctgagcaaaactcaacctccctttcaaagggtggggggtggggggttaaatcctgcgcctccaggggtgagagagaaggtctctgtcctcggggcccggactcgcgaaccttttcccattcccaggacctccccgctgtaggtagcagaggtggctgccccattccccctccggctaaaggcccggtccagtctgcagccggacgcccccggagccctctgcacaacaaagcgccagagtagggtaccctaactttccctccccattcagcagctatctgggacctagggggcctccctcctccagggccgccgcggcctcggcaggactttcaccacgacggccgcatgtccggaattcccggggcacctcggaattacctgcctcgcaaccgctggcccgctcgccttttgccaggaattaaacaaacggcgcgacccccacgatgagcgggtggagcggaccgcggcgagagcagagcttctggcactcactacattcagaactttccttaaaagccgaggaaagagcccccagggactgcccgggggtctgagccaggtcgagggccacacaggtagccggggagccgccgccggccgcccaacccgcctgtcctgcatccccccaaccccctcccgctcgagtctagccccgggctccgcagcgaaggaagcgtcggggacgtcccacccccgcagggaactgcgcctgctgcccccgccgggccccgcactgccctggctctccccccactcgccccccagacggtcggcttcggcggagagaaacgggagcagcaatgccttttccccccctctcctccacttttttttgttgttgttgttgctttcccacgctggctgaatgtgacttgaccccatttcaaaaaaagtttgacatagtgcttcaacatttccgcattcctccgcgactacaaaggctgcagccgcctccttctgctttctgtctctgctctctgtcttcacactcaatgaaatccttcatgcgcctctcccgaagcctgccaagcaccacaagggtcgccaccagcacagcgacaagaggccacaccggggaccgcgactcccgcgtgtgcgcacacgcagatgcgcccatatgcacacggacgggcgcgctgcggggaccagggctgctcactgcggggcgtgtgtttaactccaatattttaaattataaaagtaaacttggaaactacagcaaacgtgcgtcttcgcggggctccaagcctgggcactggccggctgcgtgcacttttctgtgtataacacgcccgcaggaagcctgcgttaacatttatctcgtggaggggaaggtggagcccacacccacacctcagcgagctggagagggagttttcgagggggaaatgcaagcacattctccagcatggagtccctagaggcagtgcattttaaaccctaaatgtgaattattatgtgagtgtccgagtagagttccagttccgtttggagaaactgtatgaggcgtgttccgtgtgggtgtgtgtgcgtacggatacgtggaagcaggatctcggtgtcgcgggtgtccctaggctgggatctccccctctcatcagataaggagaatcctctagctccccaaaactggcccccataaccaatcccgtctcagttcgtaaggggttaaccaaagccgattccaaggaaacacaggtcccccccaccccccgccaccctccacttaccccacccacagttctgcctcggaccccggccaatcccccagatctcccccgggaccccccaccccgcagcccacccacccgagcgcacagctcctcacctgaggggcccagtcgcgtcgggcctcccgagggggctgcgagtgtcagtcggctctccgcacgtgtccgcggcctcgcggagcaggtaatcagactctggggaaggagttaccagcactctctccggcgagggggtgggcacagcggcggagggcggagggacggcggagggcgccgcccgcgccgctcgctgggggcggacgggggccgctgggctccggccggcgctgggggccccagccggggaggcagctggggcgaccgtgcggggtgggggcagggacccgcgaagccaactctgccggagacccaccccccggcggggctgggggctcgtggcgcagtggcaagaaagtgtgcaaattaaagccttccggagagaaatgaggcggccgagtcccggcagtgctccgagctccgggctccctagctcccttctacgagtcgggggctagaagggcgcggtgggggtgggggtgggggggagagttaaatgaaaatttccggctttcgctgaaactgtagtagggggatcctgcgactaaaataagcggcattagtgggagagagtgggacgtgtcgtcgggagtcggcggagtttccaaacccagggtcgcccagagttggggttttgacagggtgaagcggggggcatcctcactgtgtgacgtggacggatgggaaaaacacaaaa

SEQ ID NO: 49100 - DNA, 1685 bp, Homo sapiens
tcgtcatctttaaaatgggaacccacaggattcttgtgtggataaatgaaatcatatatttaaagctattagcagttcctgacaggtactcggctttcgataagtgttagctatcattgttagctttagggctgctttttcttcttcttctcatattctcataattgtaaagtccttttaaaattgtgtccccaaagacacttctgttcctttccccaatttaactaaactgccaaaagttgaaaagaggactttaaagtgacaggtatactcgttattgtcgtatttcccgtcatcactgctttagagtacggaggtaaaataataggcgggcgtcaaaatccttcgattttagagcttttgcaggggataccaagactgaggtagaacagccctaaacctggagggccgcctattgggcaacctagagcacacctttcctcaggccaaacccagcgcgcccggggtagtctcgagttctcaggttacccctcagtgacagccctttcttgagttccttctccttcgcgtcagtctctcgttctcccaccccgcccctctagaccaggtgaggtttcctccctcacactcctaggggacatcgcgtcaatctggcttatatattgtctcctctgagtttgatctttcgctcaacgcctagtcacctgtgacttaggtttccgtctcgccgaagagtagctactgcctagtgcaagcacctttgtaagaccggcgatcgcagtggtcgctctgagcagtaatatttaccggcttaactgaagcacccgctcttttgcttgctgggagatgtagtccctgggttggccactttagttcatcgttgctaccgccggcgtccagaagactacagttcccagcaggcccagggaaagacaggataccctgggtcggctcctccacgtgaccacccactatggcttcctagtgtcagggccagctgtgtagtggctcggtgtgatttgttagctctttgaggcagggtaccctcctcaggatttcgatatgcaaaaaatcaaatctctcatgacccgacaggtaagtcgcggcggctgaagcaaaggcttccttcatctcggaagtgagaggagccgagatgttctgtccccaaccagtggcgggcggggatctaagttatgggtggtggcaggtgtcagggggactgggaagccggggcataccctagaaaactcacctgggccgcctgggttggagcactgctccagcgggtaccagcctcccagaaatattcgtttaaaaataagtcattgaaggaatcagggtatctttgtctcccctcctcctctttttgccgtctttccagaacagcccgagcttccttgcaaggtcttccgcatccaggctgtctgtcatatgcgagctgatagcctgggtagggtggtgtggtctgtgcagtagaggtgacctggaaagactgaaaacggatgatttgaagacagaattagtagcttttggattttgggcaagtccccaaactttgtagcttacgtttctggatgtgaaaataattatttttgttcattttacttcacagttctgttatgagggtcatcgataagctaatatatgtgaaaactctttgtgaaattctgctttaaaaaatttatttttgtcatggcaaaatactgatcttttcttttttttcc

SEQ ID NO: 49101 - DNA, 767 bp, Homo sapiens
atgcttatgtgttggtaatttagtacatatttaacaccacataatttcacaacacccttggctagccgcttatgggggacccaaaaagcacaatatgcagctcctaccctcaagaagcccacagtctattcaagaacatttgtttcttcctcttgtagtctccttccaaatagacaacagctggtaattattctttatataattactcttcctagatttacaggcctcaccatgacagggcaaataataatttgccttagtgaaaaataaatgttttcctttgaaaacaattcgaactttgacctgataaatcatgctctcttgaaggaagtgtcctgcttcgattttccacctgtctttcagaaacaggagctggggtacttgtaagtctctcttctctcctcatctttccaagggtgtgacacggctgtgtttctctagagaacgtgtcttttggcatggaaaaaacaaattccacttgaactaggaagtgtctttccagattgtacttacataaacttcactttggttaactgttaacttaatgtgtaaataactcagagtaggaggagatggcagggacttacaccataaagcagcagtggaaactaattgctccatctctgatgaagttcagaaatatccatttcttatattttaaataaaattctaaagggaaacccaggagccagaaaaaatactgcagaagcaaatgtacgcagacattcattcattaattcattcaacaaataatgaaaaattgcggc

SEQ ID NO: 49102 - DNA, 1014 bp, Homo sapiens
ggaaaagttgaaatattttcctttaggacccagaacaaggccaggatacccaccatcgccacttctattcaacatagtactggaagtcctagcgagagcaatcaggcaaggaaaaatttttaaacgcatccatatcagaaaggaagaagtaaaactgtctgtgtttgctgatgatgtgatcttatatatgttggagttctcattttaccatttttttttctttgaagtgaaaggcaaagaagtttttattgcaaagcgaaagtacacaagagttcaagtgtaattgggaaagtcgccatttacgtatcttagtatcacttttagttttctgttttttgtctctgggctttattttagacagtttcttcaattctgccatctggagatttccccttgtttcatttattcctatatgaattttttgttaatatttgtagtattttatctgtcatttctatgtgtttgctgttgggggtgtttctacacaaattcagcctacctttgtaaatttctcctaactgcttttcacagtgaccaactcttcctggtctgcccaggattttcccagtttcagcactggaagtctcatgccctgggaaatccctcagtcctctacagactgggatgatttgtcattgaattgctttttatcattccacattgtgagagaagcaaaaggtcattaattgtttacattacttcagtagtgggttgtctatgaattcttataaatagcaaaaagctatcatgttctcccaagtaaaatcttttccaagtactgttttggcccacacttcctgaaaaacaaagcctgattcaaaagcttattgggaagtaaatttggggaaaacagcagcaaggcagagaagaaaggggaccaaaatgcaaagagagcatactacttaagctgtccacagcctcaaaggaaaaacagtaggttgctgattctcatataaattctccagaagggcaattcctggaattcaagtaatgtatcagctggctgctgctgtc

SEQ ID NO: 49103 - DNA, 1551 bp, Homo sapiens
ataaagctaaacttgctcaaaattatttcttttttttttctcttcaatttacctggccccattttctatgatctaagtattcataaaaacttcattaaaaaaacaaaaaactttctcatactacaatttattgatcaataaacaagtctacggttattggcaactttcactgactttaaatatctgacactttggggattttttttttcttttttcaatcttataatgactgagaaaggtaatatcttttttcaaatgtttcatttattttctgaagtatactgcactctaatttagcggggtcttctttaaaaaaaaaatcgtgtcctaagagaaagcttcagaaccagaaaatgccgttctagtagctgtgcgttactataagggtccattaaaattccttgtgtctaacttattcttgctgatgagccagtttcctaaccccaaaggtaaagatcaaatgttaagtcgccaaaccttaaccacgttctactgccttaaccgtggcacaaggttcagattaagaaatcgcctttgacccagaagttccagttccaggacctttaacaataatgacacatacatttacctttgtaactcactgttaccagattaacgaccattactagcgtgctttgggtgcaaccacccactcttcaaattccgcttctgaagaaactaagatccagggccagtagggaaacagaaaccggagtcgggctttggaaaacatagcagcgtccataaccacgctcagtcaataacactaaaacactcgaccactgagatgccacctgtacacacccacccctagtccactactttctctagcctaccatccaaacttgaatctgactcaaacttaaggaaattccaaagatctgggacaaatggtgtgtttccactcgacatggaccccaaagatcccctctagacatcctgttttttggaccaaatgccaggaacataagacaggttcgatttcctcccgcgccccagcgctcccggttctagggccccgaacttcgaacctcagccctcttcttacccaggcctgcacgcctcatcctgccagaggagagagagaaaaggcgggtgcggggctttgggtgagtaggaaacagctaggggcgacccggaccgcgtcttcagtaccagggcccagcgaaacaccaacttcttcccctaaagcgccacgacatcagtggagtctaaacaccgcgccggatgatggcgtcaccacggcgctcattggagccctgggaagaaggttgaaaggcattctgggaaatgtagttcaccaacgcataacgtgttgctgagggcgtgatgtgaacccggttccaggagcggacggggcgtccggaaaagggggcggcttcgactgcggctctgattctgggtctctgatccaacgttcccgctgttccgctcgcagcccgcgggtcgctgctttcagtttgttgaccaccaagtttaacccagcagatctgctcctccccacccacaagaggatggttggggtatctttcctgatttagcctcgaactc

SEQ ID NO: 49104 - DNA, 941 bp, Homo sapiens
gattttcctccccctatggatcagaactttaatcacacaataaatattcttgttctccatgtggatgatgcaggtgacctcaatttcacaaaggcttgtaaaatccagtatgtgtttctctgttctgtacagggaaatttgagtaaacgattgacttttcactgaaatttaggtttcctaatgacccccacataaataatgcagctagaaattactgaggactagcccagtcgcttggtggctagcactttcccctcccttcagcggtatccctgcattgtgcctttaaggcagcaggggctcactagctcctcgggctgaactctgccctccctgggcagtgactcacactctgcaggctcagacaaatggaatctccccctgtgagagccctgcagccttccactgtgaaaagtcatcacagggcctgaagggaatatttcccccacttccaacctccaagctctgaggccacaagtgtttttcactgagagggccagaatgttctaaagcctgtggaaattaaaagcgtaattcatgacacagcaaaactttttcctccccccatcatctaagaccacctagggaaaagagagaaatggactaatgccagattgaggcctggaggagaagccccagtcaactctcttttcagtccttccacagcacagaccaaacacacacacacatacacacgtgcatgcacacacatccatactatacatcatcgtattgttgtctcaggtttggggaaaacgaaatgtttcaagacggatgagaagggaaattgtgtgaggaactgcagctctcctccaaaaatgtgtgtgtgtgtgtgtgtgtgtgtgtgtgtgtgtgtgagagagagagagagagagagagagagagagagagggaggaggaggagaaggagaaggaggaggaggaagcagaggaagagaggg

SEQ ID NO: 49105 - DNA, 2063 bp, Homo sapiens
gcagtgagcgaagatcacgccactgcactagagcttgggcgacagggtgagactccctctcaaaaaaaacgaatttttttggcacatcgacctagccaaacttgcgtaaatacaagtgagagtcagactcttttctcatcaacacctacactaagttaggctccttctgtaccttccattcggaactttggtgtactttcgcccaccagaactgggcaaactgaggacattaaaaaaacggtttaagagaaactggccagagcggtgagttaagtgttaagactggtttcactcctgggttggatgccagcaatccatcggccagcaccatcaactggatccatcaatccaatctggccagcacccaggggcagccagactgaccagccaggccacggatagccagacaataaacgaccttagggtgtccttcgcatcccgctgggcgggttctggcagtagaaggctgagaaaggggagtgttggggaaggaaggaatgggacgatgtgtacttttctcccggaactgtagttctattgccccaacctgggctcaggtagcggccagtaaactaggagacagccctaaggctcgcgtccgggccaggcgggtacccctagtactctctccccacacccccatggctctgccgcagccgccgccgcccgccggggcgcgtgacccggtgaccccggagcactgggcatccggacccccctcgcaggcgcagccgctattaaggcaggaggctaaagaggaggaggaaggggaggagacaggcgtccagggcgcctggggaaccggcacggcggagcagcggcggcggggctggggggaggccgccgagtcggccgcggccgaggaggggcaggcggaggtcgggggcgccgcggccgcggggtcaggttccccggcgggaggcgcaggtggcggcctggggagctggcggccgctcctcgcctggctgcagcggcggcagccccagtgctgcccctgtgcggcgcccctttcccgctccgccgcgcactgttgtcatggaggaaccaagatggcggctctggcctacaacctgggcaagcgggagatcaaccactacttcagcgtgaggagcgccaaggtgctggcgctggtggccgtgctgctgctcgcagcgtgccacctcgcctcccgccgctaccgaggtgagcgggccctcccctctgcccgggcaggccgtgggggaggcggcgacgcggcggctggaggccgcccccatcgcccaacacacgcccacgcggccttccgccggcccggcccgcgggggaggcggttcccccaggtgtccccagcagcggccggcgcccgaggccaactgagtggaccccagtgggggccaccaaaggacaatggctggtggttctgggcgccccgagccgcccgcgctggggtcgggggcgccaaccctggacctggccaaaagtgctgctgaggtccggctcctgagcggtctgggttcggggagacgctccagatcaggggctcgcgtgcaggaagtcggacaggcggtccttgggggcagcccggggcgcatgaagcccaaggccgccctgcaaggggcaccgctgccagcagtggggtcgcaggtcctgcctcttaagggtccggctccttagcctttgtttaattttgcctctgccctgtaacacccagtctgggctgttggacagcggcaagggccgcccccattttcctttgccaaaagggcgacagctggcaaaagatgcctgtggccaaatggaagaggtgccacccagcttttgtgatgcagaaacgtttaaaggcttcggagtgcacactttttacaaagttaaggcaccagagcagatttttggaaggaagttgtgggttgacaggcgtaaaggtgggcagttgaaagcaagttgtaagcactttgaaagcaggccttggccatgggttttgaaattggtgtaaaggggaaaaggaaatatgacctgatttgagaatgaattatctttcagtaatcaagggatatttacttctccttgctgattgattgtttttt

SEQ ID NO: 49106 - DNA, 2046 bp, Homo sapiens
aaaataccatctcagactttccctgatcgttagattctggcaaatatccaacttcatgtaccttatcttttttgctattggagaaataattgcaacacactttagctgctgcatgaatgttcagatgacaaaatgagcaccagttttctcatcagatcctgtggtttcagtgaaaacccatatccagatgacttaccaatcatagcaccagtccgaacctctactctgagtttcaaattcatatattcaattgcctactaattttggttttctcagaggtacctcaagttcactttgcataaaactaagctcatattatttcctcaatcctgattctcatccactattgtctatcacaatggatattgccaccatttgaccaagaagaacccacacgtcagaattggctcctctctgttcctcaacactatttccaaagtatcaatgtaacaacaactgctgcctttttacctcctaaatagctcttgaatctcccaccactatccgagtcaaagctaccatttctccaattatatctacaacagatttcagactggtataaccacacccattctgcccaactgctgtatctgctctctatattattgttggattatttgtatgtataaaaaggtcaaatatgaccacatcctatttttcattcttaacatccttcagactttatttttctcctttaagttcatgcatggttttggcctaccttgggtctcaccttcccctatacttcaccatctcatgcttagtcttcgttactgcggctacactggactttctaatggaactctagactcactaggctctcttcttccaaaagggcttaaataatgctcttctatctgcctcaaatattttttcttattcttcatcatcttagcattttctttctttgacatttccctaaatttttattgaagattttctaattactcaagtaagatatgaatactttcttccttacaaaaaattataacattgcaaataaagtcaggatataactttcctaatcttagcaccatcacaagttcagttagatttgtttttccaaaatcacctttgttccaacagatggccttagaactcttgagtcacttgtcacctgagactactcatcttaggctgcaaagccaccaattatttcacaatgcacatagtgtttactcctgccctacccttttgctcatacttggaatacttcttcgcataccagcactgaaacatatcattctcttagtttcttttcaaataaactatattttctgttgcagtttgaattaacagggagtagtcagccaaggtgttgcaaaggataccaattgcatcattgtcaagagccctctccagggaacacttactccttcaattaaccatagtccatgggctggcttttggtattacaggatcaggagcctgattttgccagaatcccataaggaaagctaccatttaggggtagactcacattagacacatagactcaaaggccaatttttaaatatatagtgaaaaatatcactctcctagtgccatgaccagtgctgtgtctccacaaaagataaacatgagaatccaaacttaaattagaaattgcttggtgcatatgaaatcaagcttaaaggctcttagaacatatcgtcaagtctcttcccaggaaagtggtaccaactaaaaatctcactggctgtatatcaatgccagttttaatacactgtccaacactagttgtcaggcaaacttccattctcattctttcaattgacatcaaatgacatttttttcatttcatttccaacttttgttttaagctcagggttacatgtgcaggatgtgcaggtttcttcataggtaaacgtgtgccatatggtttgctgcacagatcatcccatcacccaggtattaagcccagcacctactagatattcttcctgatccgctctgtcctcccatctcctgccctccaacaggtccctgtgtgtgttgttaccccccatgtgtccgtgtgttctcattatttagctctcacttatg

SEQ ID NO: 49107 - DNA, 1190 bp, Homo sapiens
ggtagcatcaaccaaggggaaattatctggactcttttccccatcaaaatgttaagtcagaaacaagatcactttttcacggggaactgcagcgattaaagctattattaaagatttgtaagatgctggccaatgatttctctccccattcaatacctcaatatggtcagtgcaaaaaccaatgctaattccaactgcactttgcaatctccaaatggcttctttactagaatagatgaataaagttcctgatttctcatctgttgtccatgatatgtcgattgtgcattactttattcctgctcacttggactattaggagcagtttgatttcacctggtaagagcaacagtttgtttactctgtgtctgtgccaaaatctggtcctctggagccttgacaacattgcattcctcctaggccatgacactgatgcaatacatttacaatctcaagctgattactcctggagaacagcaagtggcaatgccctagttaacttaggaagaaattagagatacatctttaagaaataagagaacctacatcctctgtcctagaaagaagagggaggttctaatgtcaatgatatgacagagtattctccctaagtggaaaacaagttacggtacctaacattaacagggaatctttctggattttggaatttttgtgacctctgggcacctaataggtgacacaaaaatttgcccaaagtagattaagagaaggttttccagctagtccagtctgcaaggaaagctgtcctgccaggtgacatgatagccacactgatccagtagtatccaagatgcatgagagccttgaacataaaagagttactgcaaggtactctggggttttggagctaactgatgtcacattagcagtaactattctctttttgtgtaacagctcctgtcttgcttctagatccaaatgtcctcccattccagtaggtgtagctgtagaaaaaaaaacccaccaaatatctgattatgaagtcaagtaagtacgcagcgtgggctgccctgcatgaattgggtgtcatcagtttcacaatccataaaactaggtttattcgaaaacactcccaagtggtatataaaacaacaggatttacaggccacaagagttaaagtattatttaaatgggttgctcaactggaacacggaggcacaggcatttt

SEQ ID NO: 49108 - DNA, 925 bp, Homo sapiens
gtgacaaatgtaccatggtactgtaagatgttaacaacgggagaaactggctgaggcgtatctgggaactctctattatctttgtaactttcctgtacctctacaatcattccaaaataaaaagtttattaaagaataaacacattagccaagatcaaattaagttggccttacatttctagactatgtgatagttttaacagcctatttatattgtctctgtaatttgaaaagcaaaagaaacacagtacaaaatgaaacacctcatttctaggcatgtgctacatctccaggttctgctccagcttccctgtccactgcctctttattcattttgcttataacctgaatcagagatccttctgaggtcaatgaccgacactatctatccctgcctagatatcaggataggtaaataatctaatctcagttctgacctaatttaactttgtctcttatcagtgtctcaaatttatcatctgcaaatgattaaacattttttcttactgactaatttatggtgccagtctggagctctgtgaaacattctaccaaaaagaaaatattactatgtaattgataatggtggcagccattcattacataacattgtgagttctctataactttgatgtaaattgacttgtttaaaggaacaaactagttttatgcagttttgaaagaaagctttgaatattcttgagtcttgcttagaagccaatataaacctttagccatatccatgtctgaatatttccggtatcaatctgaagaataaacatgaaatcctttggctagctaaaaattgtttatgaatgataaattcagtacacttagtatgaatgtgaagatgaaatgcatgcccttataggaagggtaaattaataagtacaagacagcattatccaagcatatacctggttat

SEQ ID NO: 49109 - DNA, 1191 bp, Homo sapiens
catttcattcaatgtttttacatccagttttcttaaaaagtatctaaaacttttttcttatgatcagtgctactttttggagaattattatctggcttttcctgttccacgtgacccagcttcatggctccttttctgagacctgctgcaaagcctgtggttgccaccacacccctcagaggctttgagctgggcagctgcctgctatctacccatccaagagctgctgccaggcctcccagagatgagtcacagcagctttctaactctggggaaatcccatgcctgctatatttggaaatcacagaggccaagagaacagtaggccaacagattggtggcaggcctctgaggcactaaacccaatttagagaatcactttatgtactctccttgagcttcatgcggtgtgagtctacatgactaatttcccattagatctctcagaacaggagacagctgggcagggagttggacagagcatgattaccctgatatataacttttgttatttcttttcctaaatctaatctgggataaataacatgagtgtaggccatgctcaaacatgtacatcctactgcacatatacatttctgtctagaccagcaaggacaaatgcatggactttagtgcagtggttcaaataggtttgggccactaaccctacacaaaaagcagaggaacaagcactgcctggagtaaaggtggaggcttctaaaacctgtctactactccttctcactagcacaccttccaaacccgttatttagacaaagagccctgctgccaattttcaatcctacagttgtctagcagtcttccattagtatctacttgaccacaggtcctcatacgtcaacaacaacatctattgagatgccttgagtaatctgtatctacagcactgagactagatttgagaaggaagaagttcaaactatagaacaagctttcaatttgtagggactctcacacctgacagagtttcgagtccctttgagagcataatggtgaggtgagatggtccaaggccactgtagtataactttataactgtaatgatgaattcctaaggaggaaggaaacttttcaattattctgctcattaagtgtattccaattctacagggccagcttagacagcatgtaagcatccaatcaccactgtagtcaagaacaaaaatctcc

SEQ ID NO: 49110 - DNA, 1959 bp, Homo sapiens
gcaaatatttgtggccgaatctcggcaacccgctggaaaggattaaacgtgcggttgccgtgactaaacgcattcattcaccctacaagatttaggaaaatgtaacgttgcaagggaagcaaggtctctgtgtaaacctcgtaatcgccaccaaaagtcggtagctgggagccttcaaagcccgccaaacacactggaagcatccacagctgttttaaattggttttggtttctggaaatagcgcactcggtacggcagcatctctggcctccagccggggttaaccctgacctgaacgccctgtttagctcccagcatttcatgattccgcttccctgctccgtaaaaccgaagaaaaccgagatttccgtcaccgagaaatgcacttagcaagagggggaaattcggtgttttaaatgtcacatttttgtgttctctaccactatcaagaaaaggaaaaaagatgtgtttgtgtagcggggacgcagcttgacacccatttcctttggctcgcatcgcggtcgcagagcccaatcgcggggaaacgggccccccagaaaaacaggcaacgacccccagctctttgctacagggatcgggagaggactaccctggggctgggcggggagggggatgttgggaacaggaattggagatggaatttctgcgcccgcagagcagggaggggcccgcgggggcgcggagaggaaaaaaaggccaggggtcaagcctggggagagagaagctgggccggggaaatggggtacagggtgtactgaaggaggggtacggtggggtccgggacagaaagagaggctggtgcccaaagggcgcgctcaggcgcccggaacccgagcgggggagggggaggcggcggcctgttggccccgggacctccacgtcgcgcgcaggccactaacctgtcagcaagaatgtgccagtggtcgcggggctcatcctgcgtgtcccccgaccctgtcccgtccaagcacaggggtctcccagctcccaccaccggggcaattgcattcttggcctggctaggccgtccgtcctcgattctcccctcccctccctttcttcttccctcccagcttggccagttcagcatcagcatcccgcaccccctcggtaatcccgtactccctctagcggcgggccactgcagcgtggccaccgcccccacccccatcccccatccccgcacccccctccaccccctagcccgcggagcacgctgggatttggcgcccccctcctcggtgcaacctatataaggctcacagtctgcgctcctggtacacgcgcttcaacttcggttggtgtgtgtcgaagaaacctgactgcgccctgaggagaacagcggagaaggtccaccgagcctggcgaaaggtccgctgagcgggctgtcgtccggagccactccgggctgcggagcacccagtggagaccgcgcctggctcaggtgtgggaccccatccttcctgtcttcgcagaggagtcctcgcgtggtgagtatgcggtgaggacgttttttttttaaagatcacgttcattccccgtgcttatcgggagctgcgggagatggagtagcaccccagaatgtctccacgcaaaacttgtcacgccttcactggctgtaccccaaaacaaatggggaaaccaagccttaaaggcttgggtttccaggaccaagtccagatacgggctgtagacagagatgagctgcggacagtgatgagctgcagacggtcaggagctatagatcgatttgcaatttgctcttcaaatgcgctaccaagtgccatgctttacaaacagataagcgcttcaaatgcgctacaaactggcgcttcagatgcgctacaagcacgcttcacgcgggcgacaaactgatgggagctacaactggcgcttcattgcgctataaactgatgggcgctttatgtgccacaaac

SEQ ID NO: 49111 - DNA, 2087 bp, Homo sapiens
tagtaaggatgttcaaaattgctgagcagccacaaagaacacaaaatctactacatatttttcttaactactttttctcctatttttcacctccttgcttagttcctaaaacagttaatttctttctactttgtcttccagtcattaagtcattctacaaatacgtcatttatcttcagtccaaccattgagttctttttcaaaaatatccttgtgtcatgtttttgatttctaagaatgctctctttttctgatagttccattttttgtatgcaataacctttcaaatctatttggaagtattaattacaaattatttaaggaatatgtttcttttttctctgtatttttgtattcattttagtgtccctcactaaaatttgctcttggttttcctcaaaatgtctggcaaattttgtattcacatttataaatgaaagacttgcctcaccattgtgggtgtcatggggctccctggccattttcaagccttctttactatagagaactaccccttgaaagagagttgtaactttagagctccataagtgtgacagggaaaaacttacaggaatgcttcttgccaggaaaaaaaagggcagctgtttttgaaaggcccatagataaaaagcaaagagataatctacagactttcctcaaatggtgaaataagaaaagtgtgagtgtggcccaactcttagcatggagctgcaatgtccttgtcattttcttgatgtccattctaacggtcaaattttacctttttgccttactccagttcaggagttcatgctaaggcttcattttctgagtcaaaaattctactttatttaattcttctaacatgatttagcctgcaggctaaagaatagtcaagttgggactggcccaactgttgcacaattcttcagtgaattgactcactatttgacccatgaccagctcccattactaaccctgctgactcaatgctttgcatttcactatggtttctagcactaatcctgctaactactgtatgtttttaagaaatttctccaattttaagtataataatgacactgctttgtctccagtgctgctatagatttttttattcatgaatcacttctgtttttcaaggtgattttatgaataaaaggaaatactgtatcatcttgtttggtgacaacatttgtctttttctaccacacaatgggtgaataatccactgggtaaaatggtaattttcaggctagctgagactaaataaaataaacaatgatgcattgctgtgatcaaaaactcagctttttcattggtatatttggaatctgtgtttgtgcaaatgaatccttaggcataggcatttttaccatgatactttaaaaatgcaaattattatgtgatgtttgtacaattcatttcagtacttctgcttagaaattgttttcttagcccttttctgaatgagatatatgttcattaacattaaaacatacattaacataaacatatattttcatatgaagataaaaatattaatgtggttattccagaaggtagaatttagagcgatgttgatatttttgcttttagattgtgttttctaaattttctacaataaacatgtacgtaacttgaaggaggacttttaaaaataaatgtatttgcttttttttttcggtttgctagacaaatattataccatgcccacggctaccaagagaagtagtcacaaagagcagcaaatttaagaagcaaaaatttaaaaagcataaacagccttatgtatactgattgcataaagatttctgtgtgtataccattgtatagaatgcaagtttaaaactgcatgtattatttcttctgtgctgtttcctgccagctgttgaccttgaaaacaacatattattgagatgactcatgagaaccagtgtgaaataggacattttactgctagaagttctccttctcctcagactgtagtttggcagtactgtataaaggcagaacaaagttgtaaaagctgagattagaaattagtcgtgttagcacaccttaaccataattttgttaggatgtgcaacaaaagaatcaatgttaac

SEQ ID NO: 49112 - DNA, 1474 bp, Homo sapiens
aagggcggggttcgggggggagtgagctgaaaaactctccctagacaggaaaggtagaagacctcctcatccctttctctttggcagtgagatcttaaggtcaaggtgagtagtaggccaggcgcagtggcttaggtgaaggccacaccagacttgggcctacgtcttggccttccaggtcagcagagtggcctgggacttggatgccttggggtcacggagttaactgcagactcagactaagtggggccccagcagcggtcagccccagaaccaagttccggagccaacacccgaacaggaaggggccttgccccaggccggagaggcccctcgcccacggccgagggggtggggcggcctcgcctcgggccggtgcttttcgcccttccttggccgccagaggctccctctctctccctctcccgggattttgctgccgggctccctctctctgcggccctagagttaatcccatcagccgaggtgaggcacctgttaccccggccttcctcacccccgcggcctctcctccattacaccgcggccgccgaaacggcccggcgtggcgaccgcacgtgggccaaaccccttccccggccggcacccctggccccaggccggcccgagcgtgcgggcgcgtcgctgctcgggccgccgcccgcccgcaatggcgttggggagcgcagcgcgcctcccggggccgcccgccgcgggcagggagcgcctgggggccgacgcgcgagtggaagcggccgccgcagccgccctacgcgctgcgccgtgaggagcgggttgcggtgtacccagcgggccggcgccgagccgagccgccgcgtccaccgtggggcggggggcgcctgcgaggagggggtgggagccgcggcggcccgaccctccccgcccgcggcgctcccgctcgggtaagggggaggctgagcgcggggcgaggagttggggagggtggagaggaggaaaaaatcggcttgtacaaaggctgagttgcaggctgggggtgggggtgggttgtggtggaggagcaataggttgaagatcggaggcattatcagtgggatctattgtttcctggcacattgggaggaaaaacaaagggatttattttcattaccctgtaattttttttcttttctatttttttaaatgtggccagggagctcgtctctctccgtgtcacagtgggatccgcctggcagccgccgggagctgcagccaatgtgttaggacttcaggtgcttcttggcacaaagctagactgcgacctcctaccatagcgcttggcgtcacctgctctcccggtcctgccccagggccgagggattgcgtcccgaaccgggcttgggaatcggctgcctctcaagttggtgttatttatgtttgtcttttgtgagggcaggttttgaatcccccggcggccccatctcccccgcccccgcctccttgggttggaattggc

SEQ ID NO: 49113 - DNA, 704 bp, Homo sapiens
ccacgttaatggttgggaaatctggatggtatcggatttctccgttttaacaaagaaaggagaaaacagagcaatgccttaaaaattctgaggaaaagtaattttcatcttagaattctataccaaaattatcaatcatatgcatgagtagaataaagatatttttatacatacagtgtcttaaagatatgttttgtctgctgtttctcagaaagctactggagttgtgtaccatgaaattcagggaattaataaatgaagaaggaaaatgtggaatccaggaaatgggatccagcagagagatgtgaagggaattcccacaatgactgtgaagtttaggctaatagttggctcagtgcctagagagtttatagtccagattaaaacagtcagaagactccaggacagtgtctaaggaaaacaaacaagcatgaagctaatatattatctgaggcgatacactggcgggaaggaagttttatagtccttttggaatgcctagggctgaattagtgaatgtacaccaaaaagttattcaaaaaacaaagacagtttataactttatagttaacaaaaatttgtgtgagaaagaagagatacttatatacatgaagtagctcaggtataaacaacttttatgataataataacacagtcatccctcagtgtctgtgggggataggttccagattccccacggatac

SEQ ID NO: 49114 - DNA, 556 bp, Homo sapiens
acatcattttcacaagtttacttatttgtgtgttcaagttgatattttctttaccttgatttgcagtatttgttaatagacctaaggtgacctgttttttctttccttatcttgaaatgaaacaaaaatcttttagtaggttagtcagtaattattcactttttgattatgaatctcatttctagacttagatcaggagggatatttaggtgcctcgtgtccagcccagttgctattttctagcagtctgacatctagggcaattctctgtactaaggtcagatactcccaagtattgccacacagttctctaagttaaagagataaaaaaggtaatttccagtcttcactgctagcaaggcacttactgaagccacccatgtctatataggtctgcagctgaaagtatgcagtgtgccatgcatcagccaccttcctgcatttccccctaacagttgctttctgagcaaatatggaatactgaggaagttagagagcccagtttgaggccccattcctgggcaagacagtaggggttgtccactttttgcttggg

SEQ ID NO: 49115 - DNA, 4238 bp, Homo sapiens
aaaaaagaaagaaaaagaaacacccaaagcacacaaaagcatgatctcaaaccaattgtcttcaaataacaaagctggttggttggaaccagctggagagttgagcccggggactctccttgttggttgcctcccagctgctattctcctaccgttttatctttgctgacagggcctgcctcccacattggaggcttgataattactttcccagcatcctttgcaactagggcaccagcctgtcctccagctctgacaaataagatctaaggggaaatctgctgagagcttctggaaaaaattttcctgtccaatatcaaaagagagatgcataaggagaagccttgtggtaattgcaaagtcctgtcagagcctttctaaaaaaaagttacctttattcaatgctttatctggctctccctcccctcttctgccatctcctcaggttagattgccatggaatcaaacattattctatttttcttttttctttttttcttttttttttttttgctctattgatcaaacaaaaacaaacaaccaaaactcccaacaccttggcagtatgttggtgaagtcaaaagtcaaacaacatggtatttatcattaactaccactgactctcctgattcaaaattttatttttggacagaattgaacaggcacattaatcacacaaagagcaaaaaaataccggaagttcaaatgagacccttcttcctctcacatacataccgattcctttaactaaattacagttaggaagttctacgggttgtacctctcggagagcattaagtcgtgttctgtgggggagaaagaaataaaacacacacaaaactattcagaaattataataagttgcaaaggtaggcagtccacaaaagttctccttcactgtactttgcctgagtttcaactccagagtttttcctgcaatttttccaggcaaggccagggcaagacaagtggggaactctgggtacaatatttagtttttatttagcagaggtggataggtacacataagagatacataatatcctctctagggctctgtgtactttggcaggaacaggagcaatttcatcagtgtgtaaggactcctaggtggaaagtccgggtaaatggcaacatggttccagtttattccattgatgttttagagttgctgacagatgggcagcctcctactcatctgcccaatctgactccgcagcctggactgggcatctgctttgtgatgtagtgcttgaaaaatacaggtacgttgaaaggatttgtaacttcagaaaatcatacacaaggcctgcatgtaaaaaggcatttcacacacacaggtgcactcacacacatacacaggagcgacttattagatatgagtgcataaacaccatagaaaatgtctgagtaaaggacaaaggaaaaatgaacagatgtgagaaggaagtgccagccggctgcctgagcagagcgaagctactgatgctgcatttgaaagaaacagacgacgttagcacaaccaagagatttaaacaataaacttttttttttttttttagagaactagtgatacagtattgtcatagcaagtagtgacaattatccaaatatccctagaaatcttatttggcttcagataggctaagaaatttacttgtcctcctgatgacttgaactcacaggaggcggatgggctacaggcggaacagacacgctagataaaattcttaccgacgtggtacaaaatgataggaatttgggggtgattgatctttcatttattcattcagaaaaaaatgagtacattcctaccatcaggccactggctatcattttcgctgtctaaaaaaatctgacgtaagaggcaaggagtgcctcttaataatctgctttgtaaaagtgccacagtttgtcccaacgtataaccagagtaaagagccaccagtctaggtactagaaatacagagatgaatgaatagatgatgaaggcttggactgtgaggagactgtggtttcctgattgatagatgtgaacttagaaagcaggcttcaaaggaaagttggaatctgtcccataacctaagaaagggaaaggtattttcaaaatgaaaatctgacattataattgcaaatattgacaataaggaaataaaaggggaagtgataaagcagtggcttacaaacttttcagacagagactcacagtaggaaaagtattttatatggtgcgaacacccagcacatgcacacacatacacatacacatctgaatcaagcttcacaaaacaatactcatcctaatctgtgtcatacattcataacttttctgttcaattctgttttatttatttttaaatgttggtaattatttactaaattgactttgttacccaccatttgaaaaaactctggtctagggaaagtgtagtgaatatttgtagcatgccctcaaggaaccaaagggcaggtacaagatgttaagggtgatggtcataaccgaggacaacacaaagactggcatggaaggagagattcaaggacataaaatcactgaatgggccaagacttgtgaaaaacaccaaggatagtcaaattcacttttcttagactcaaaaccaatgggaagaatactcatgctgcctgactcacaagggtcactaaacatatgggttcacaaaagatggagaaaggcagaactggtcagctcctattctaattcaggcttctctctcatagaagatgatctctagcctggaaaacatagaataatcacagttaaagggagcccagggtgggcaagggggcattaagtcagcacttgttgatttgggttccaatttgtggcccaaacatgtcatatctcaacaggataatcattactactatagttcaggtaccgtatatgcccgcgtttaatcctcaaacacctccgtgaggtgttattttccctaagttatagttgaccaagattaagtggctttctaaggccacagagttataaagtggctgagcagggattggaattcaagtatgaacacaaagctcacatttagctctctgaccaggcaaaatctacagagaacactgcttaaaagctggaagatgcacctgaaaattgacccacctgtgttattatcatccaactcatattttttctacctcattttcaatttattaggaaatatcttgtcaaaggcttaagtccaaatgttctgggcctaagagataagggtcaatgtctgagatatatctctgattcactagactctgaactctgcgcagaaaccatacagcctttgctgtgaacttgtctgagtctgctttgtgtcactctaaaggaacatctgaggctaagcaactgataaagaaaaaaggtttatttggcttatgattctggatggttagaaagttcaggattgggtatctgcatctggtgaggggctctggctgcttccactcattgcagaagatgaagagaagccagtactcacagagatcatgggatgagagagaatgtaagagaggggagaggtaccaggctcttttcaatcaaccagctctctcgaaatgaatagagtgagaattcactcactcccaaggaggtcattaatctattcatgagggatccatcttcatgacccaaacacctcccattgggccccacctccaacattagagatcaaatacgaggtttggagaggacgaacatccaaaccaaggcagaagtattcggtgaaaatacatgctggctgctcgcagaaaaaagcagagatctttgcctaggcattaagaaatccgtatcgattctcaaactcttcttggggccaaattcactctaatcagtctattttctgctactacacacgcctcattcattcaaattgcttttcatggcctactatgtgccaagctccaataagggctctcacacatacttcctcatttaatctttttagccacctttgagaaaaagatgaatatttaccctgttttgtaggtaaggaaatggaggcactgagaggctgagtaaattgcatgtggttgcttatttaagagggtagagttgggatttgaaatcaagtgtcatgatactaaggactcttccctgtatttctttcatacctctttttatttgctcacacttttcccttcacctagaatgctctttagcccattacccactggaaagacccctactcatgatgctttgtagcttctccagtcttctgcattgg

SEQ ID NO: 49116 - DNA, 2832 bp, Homo sapiens
cctaattttcgggtggagaaactggctggaacttttctggaataaagtggtaaaataacttgaaagttgcagaaatgatatctaacccaggtcatcaggaatccacaactactctcttcccacaactgtgtgttgcctacagtaagcatggaatggcagaaatgcatcgagaggcccaacgttagctttgtggtttccttctgagaagggaaactcagtggactcacgtattgcaattagcaatgtagggacaaggaagttgccatacagatgctgcaacattccatagcccaagttggggtaggggaggggagctgtttctaccatcatccaaggcattccctggacttgtgcggcacatacagccgactacaaaggtgggagactcgtgggtgggagactcgtggtctaggggaactctctcagttcttttctctgtactgctcccacctgggaaactcagaaatctcttgaggcatcccttgtgtgcttccttaagttccctccagcccaggcatatatagcttcctgtgagccgcacacacatacactccaagtctgaagaaaaaaggatgcatctatcctggggatttggcttgctcctgatgcaggcctcatgatatcatctcttgccttctctccctggggcagattcatgatctctaatcccccagggagtttgttccatgacgctggttctgattcaatagtgtggggtagggcttgagattctgcctgtacagggagcccctaggtgatgctcaggcatctggtccccagacccagttgagtagctaggttttaggggtttccaacagtgggtaaaatttcccttccttcctctgtctgggtcactccaggaggctcagcaacccatcctttatctatatatttttatctatacctataatctcctttggcagccaccagcactgtgattaataaaaactcacaaactgtaatttttacatgatttaaaagccaagaataccaactgcttcttactttttttctgcactctgtaacttaaaaaaattagaaaaacatccacaataaatagtaaaaacccattctgaatgtaagcttctaattagtccataagctcatataatttttttatatttaatttttattaggttttactttaaagtaaataaggcattgttgactaagccttagagactaggatgatctgtagactttgaactcctgttaaaagttatgaaacttttgatacattcttaaaatatccccaccccccttgtatagcacttaaccctttattaaatactttaaagggaagcagggaactaacatttattgaatagctactctgtcgcaggcagtgtgtattactatttccagtttactgaagcagctaaggttagagatgtaaagtgatttgcccaaatcgcatactcatggggcagagctaaaccccaggacatcagatgctggctccagggttccctcttccccgcctgcccccactgaagcgaaccatcacagcacacgttagctccacctgctcgggtccacacgcagttttgctgtggccctcagtagcctcaatttgagaatcttcaagcctggaaggtttgccatggccaggcagtcaaggcgcagaagcgacaggggctcctttctctaatacacaaaatatcaggagaacccccagccaggttagtttgtttctttccaggttgagaagtgaatctgtagccagggcacacaaatcttcatgaaaaattaattcgtgtatgctgacaacctgggcactcacacccctggcaattgcctccttatcccatgtctcaggccatgagcaagagtttgttttcaagtgacacatgacggctggacaaacatttatgaaacccccgcagagtgtgcatctagcacctgcttgtaaatgttctgttaacagcctggacccaactttctgggggctcgtggagctggcagggagtgaggaggacgaaggctgcagccctcaccacaacccaacttactggtaagaagactggtggttcctgaagagtgccagtcccatccccaagagggtgagcgcaatcagcttcgccatggtcggggatagacaaagggatcgatgggcgcagacaccgacgggctaggaggctctgcctgcctgcagccgcagccctgctggggcagcgccgattggcccgccccgcccctccccgccgggtcggcagctagctgggccgaccaggtgcacagaaggcgtggcttgcggtcagcccccaccgcaggagctcagcactttcagccaaaagtcccattttgctccttccaactgtaaagagagaagacagagaataggtgcctagtccagtcggggaggggaaatcaaacaagctgaagtaaattgccatgggaaaggacagtcaagctttggtgagcactcactttgtgccatcccggtccttgcgtctcagagagattcagtagcttgatcatggtgacagccaaaaaggtgcggaagggagggctgtagtaggaacccctaagatctaactgttctcaccaggctactactctgtgtcaccttccaacatctggatttcaagcatttttctctcaacaccactctgactttagagttcactcaagtacatcccccacacagctcattcatttcctcatgcagctggcatttattgagtacctactatgtgccaggcgctgttctagatgctacagaacaggacaaaacgtcttcctcaagcttacgttcattccaatggggggagtcaattgagaaatcagcaaaacatgtcactgtggcatatataatgctctaggtgatgc

SEQ ID NO: 49117 - DNA, 790 bp, Homo sapiens
actttccatttgcattttacccacagacaatcttcagattcatggcagaagccaattctttttttctttagagaaaattgatagcagtccacagaatgctccatctatacttcatttgattttacttcttgatagaatcaattacattctatggtttatgtgattcaccagttagctgtcagaaaccacagaactcctctggtatgcaaagcctggagcttgatgaacacaagtatgtgatacctattcattcaccatttcccaaagtcatccctaaaggactgagctttttctgatacatctgttagacagaatatgaaactgaatatgttaaaaattttcattacattctctgcttctgcttaagaacattcctcttggtttccctcagttggatgacttgcccttggctgtgctaatatggtcatttacatttctagtgaatcactcttctagaaaatctcattgcacaataaaaatgaactttggcaaaaagtaaatgatttgttttcttgctgtagacaaatttctgctgtattgtgacaatgaaacatgaacacatcaataatacttagtgtgcacctaggtcttacttctgtgatgtgtagtgaggacactaaatcaggaccttcaagctcttttccagcatccttttggtgaagtgttgttaaatatcggctcatacattagaataatgtatggagtttttataaaataccagttcctgaaccccaactggggggttggacctcactcttctagtgtgcatacctgccctgcagagatagaa

SEQ ID NO: 49118 - DNA, 1994 bp, Homo sapiens
ctattattttatgattctccatgtggttgcactgggagcaaatgtaacaataaaactctcaaactggaagtattactaataggcaccaggcacctcaacagattctagacgtgatcctctaagaagaccagcttcaactaagagaaatacataaacactcaaagacaactgaaagcaagcagaggctttcgatccactcatgaatgtgtattatcacttaaaggttcttctttctagcccagtattgacttttcctgagacatttctaggctggctatcaccattgtatcttccacttcaaaaggtcaaatgcctacaaaatgccagttaccgcctgcaggtttcagctggtttgccctgctgtctggccagctctttaaatctaggataggttccataacccagtacttctgcatggttagccagacctgggcaatgtctcagtcagccgtaaacatccaactggtagcctgatcctctctcccaagtccggcgtttccaatggacgtccttttttcccaagcagaatgttgagggcgagctgggaaaggggtcatcacgttcagaaagtaaaagggggtcatgaccttcagaaagcaaagtgggggatcataaccttcaaaaaataaatgggactaattcggctcggcagtctttggaaacgcaagtagctcactttccccataagcgagtctcaaggggcggtttgctgggtgagatggaggagtgaggttccaaagctgctctttcctacccgctaggaagggggcgccaggcagcccctgacctcacttggaagaggagagaaagagagtcgaagacgccctgtcaagatgccactcacctaaacgccaggaacatctccccgactaaggacaggccgacccccagcaggaccagcgccacgagcttccccatggtctcggggtgcccagcggcgactgcgcggcgccgagagctctcgggggcgcggcgggcggttcctgcctcgcgtacggattggggcccgctcggccccgcccgcacacgcctcctacttacctgagcggcccgggtgccgcagcagggcgctgacgagtcccgccgagccccgccgcccgggttcaaggccgccttcacgcccacgattccttgttttttgggcagaggtcaaggctcaacggagagggagcccgggaccgagttgtggtgggagtttgctcctaacacccgcgaaatcctacctcaattcctcagatggcctgagggagaaaccggagggcccgggaatggcggggagctccagttcagagccggaactccggacttctgcaaggccagacgtgaggcgacactgaattgctcccgagacgcgggaagggcgaaggcaatcgaagcgaagagctttaactcatcttctccaggatttggggcacgggaacctgtctcctgaccttcgtgccttacctcggagtgtgctgcccagacggacttgtgaatagctgcgtctgtccccatagttaacgggagaaggaaacaccaggagaaaagaaggaaaagacaggaaacgggaagaggagcagaggcgaggaaggggaaggtcatttccttggcagggtaggccctctttcttctaggtcttgagttcctgccaggcaagaaatgctctttcccctctcctgatgaacaccaggttggagggggaggaactgaagatgcgggaagacttggggagttcgggcaaagtagcacattcaagcatgatctatttttatttacggacagaaagaaatattagttctgttaggttccaccgagtaaactatttgttgagagagcaagatttgccaatcctgggggtattaaggaaagaaaaggtggtccctgacctatgggatacatgattctagtatgaatacgtaattacaggatgaataatgaagcccaccgcttatgcagtactgactgtgtgctttgcctgtgctgacacctatgttaacgcatttaattatcaa

SEQ ID NO: 49119 - DNA, 595 bp, Homo sapiens
tgaagaaaaaagaaaaaaagaaagaaaatattttttaaaagatagattaaaaaaataaataaagaagtttttacacttttgacacactgactgaccagcacacaagagttacataataaatgatttaaaggatggtggtttaaaaaaaaaaaaaagggaaaaaggctgctctttcagaagtagaaacagaccacatagcttcttgtgggaattgtcataaaaggtgcgaggcagcaagcagaacattcacatgggtactctgggggttcctgcccacgcttaggtctctgatgcactcaagcctcatgattcatccatggctgtgtaccttgacaccaggaactggcctgggaatatttgtatactgttattttcccctttattgctcaactagggaggggtggaaaaggagggtgtggaatcccagttacagttcagaagaagaaagacaactttgatggcatttatccctctgggacatccttatactaaaaattgaagtgggcaacctggggagagaaataacttgattgccaaagtaccatctctaaatattgaataatcaaacagtaggcatcagattaaagcaaaaatc

SEQ ID NO: 49120 - DNA, 1970 bp, Homo sapiens
tattttaattctctcttcccctgtatcaaactccataagggtcgtactctactatagaagcctaagagagaacattacacatagcaggtgctcagtctttctggaactcttttgcatgaggcctataaaattttggttgaggcagggcagaacagctcacacctgtaatcccagcactgtggggaggcctaggctggaggattgcttgagtgcaagagttagggaacagcctgggcaatacagcaagaccccatctctacaaaaaataaaataaacaaaaaacaaacgttgagttggtaatttataaacgatgatgtctacctaccagagattttcattaaaactaaaatgcgagatggaatagtgtctgcgctgtctggcattctggcttcaggcttccctggtgaataaataggaagtaagaacagtagctgaatatttcaagtgtctttgatctacagctgaagagtttctcaaactatgcagaaatgggtggagaacaactttattaaagacgggtctggtttgggcaacaaggagaaacagcaccaatgacctgaaataaatcttcatagttaaggtttcaatgcatgagtagtcattttgttttcaatttaaaccactagtttggcccttgggtaattgcaaagcattctcttgtcagcctaagcagaagagaactttgttagcagcaagggcttataaactttcaagaaagtgtcgcgattcactccaaactttgctagttttttcactagaagcggagagtcggggtgatgggggttcaactagctgggggagggacagcattcaaaaattctccacccccggccgcagggccaggtcccgcaggaatccctcccccagcctgcgccctccccgcaccacgcggccaccccgagcctggggaccgccgaggaggggcgcgcgggagtcccacctacctgagtgccagaagcctctcgcccaggagcgccagcgcgatccccagcaagcccacagccaccagccgccccatggcgcgggagccgggcgcgctgcctcgctccggcctggccagcagctccgtgggcggtgccatcttcccggctcgatggtgccggccgcgctccgccccgtcctccgcctaggccgagtccctgcgtcggggccgcggaggctccgccctgggcctggccctggtctttgtcctcacaaacctatttccccagataccttcgggacggcccggacacgccttacattaggctcatgatgtgaaactttgaattccttcacttcctttttcaaacaacccacccgaaaccctctagcagcccgcatacctttctcgtttccctagtcttcaaacacatttctcactcgctattccagtgagaaacttacatagaaagcagcttttggggatgggggtcggtggccaagggagggaaagtaacgggatgcgtcgtgtaaatatttcacgttggaatcactactttttataacaggacgtagttgcgaataaataaacatcctgtgcctcgtaatactttttttttttttttttaacagggtctcgctgtgttgcctaggctggagtacattggcacaatcatagctcactgcagtctggacctcccggactcaagggaccctccagcctcagcctcctgagtagctgggaccgcaggcacgtaccgttacacctagctaagtgtgtgtaagttgtgtgtgtgtctgtgtgtgtgtgtgtggagaccgagtcttgctgtgttgcccaggttggtctcaaactcctggactcaagccatcctcctgcctcagcctcccaaagtgctagaattacaggaatgagccaccatgcccagcctctattaatacttccagactacagacttaaggacttagacacgtctttttcatccaaactcaaagggaagaagtgtagtttttttcttttccgtttttactctaacaaccgtaacatg

SEQ ID NO: 49121 - DNA, 2368 bp, Homo sapiens
taaacttcacgtctaggccagttggcttgcctgtccccatgagacccaagcctatttatttggagagctataggctttgctgcctctcttccaggagccattgaaccctggggaagaggacagagaggaagaaaacactgggagaaaagaggggagcaggaagagaaagatacaaaaactccccaacctccatgtgaggctgactttggatgggctgaactctatggaaaaagtaaagacatgttacatcctcttctaggaaatgcatgcacgttttccattgtccaaagcagcattgtttgtagttctccatgaatgaaccgtacgttctactccttttagaagccttaatgaaacaggcttaatgaaggggtctgctgaagtaacaactacaggtataatttattgagcacttcttattccacacactgcctcatttaacaaccatttgaattaggtactattattatccccaattcataaatgatgaaattgaggccagagattaagtctctgacccagggttatacacctggaaatggtagggtcaggacctagtataaaaaaatttatactgagaccacatacccaccttgatatgtcttttgttaattgtcaaataaaatatgatttctatttctttgctattcatggtcagagcagagatgaatgagctggtagtgagagttgtagaaaattgcatcatataaacttgcatgagggagagtttaaaactaggttgctttttatacttttcctctgcctgctttcagtaattcacttaatattgatgatattctgtgtatccaagcagttactgggaattcaaagataacggaggcagaccttccctgccttggtggcggtcagagtctaggcagttggacaaacatgcaatgttgtaacaggggctcagaactttgatctctattctgtgtatgatgtaaaaccactaatgactttttaggaagggaggcacatttgtgttttcaaaggtcactatgatggctctggggatattgagaaggtggactggagtctattcaagagaagatacagatgtgtacaaggcagaggtatggggatggtggagaggagcagatttaatgaattttgaaggttgaatggatataaatggctaataaaatgggggtgggcagagactcttctgcaggctgaggtgggaggatcacttgagcccaggagttccagtccagtttcagcaacataatgagactctttttttttttttttaatgcgggtgtaatctgttatgggattagagtttttttaaaaagagaaaaaacatggaaggaaatgagtgaatgggagcatattaactgggatgggggatgaacagtttggggtggcagggataggacaaaatagtgagtacggcctgggacatagcacatttgatgcgctcaaggcccagtaaacatttgcagctaagtttctgctgctcaggaatgagatcttgtctggagatggagacttgggaatcattaaccgagagtgtagcaatctgagtaaatgacttacaggaaggtttgaggctgtagcctgaagtggtgtaagtagaattcctaacagctttatcagtatgcaggtggctaggagatggggaaaggcagagaaatagaatggagaattagaaattgatttgagctttagggatcaccttaaaccaaggaaagcagatgctgacataaaggtgtccttttctctttcccctgaatctgtatatgtgaccttgaaattcatactggctccaggcagtcattctgtgtctatggagaatgaaaccttatttgctatccctccacagagcctggaaaccaactggaagaagcggatggggataggaggttggaaagaaatctcctattagttttgcttgacataagacagcctgtctcctgctttctacacccccagcagcaggagtgactagcaagccctggagtgtgcttctggcaagatcgctctcttcttcagcgcttactgcctcacttccaatatttgtggtatcccttgatctagatttcttcagtccccaaaagaagttgcggttcccccagcaaccctcatcttccagactctcttccctatgtggttgggtacttttctccatctcccaattcacccccaactccccaaactccttccttatgtcccctggaaatcatagtcaatcattagcaaaatcccttatattcacaatatctctaaatagtctcttcaatactttcatgttatctactgacccccaatgccaggacattttcccacctgttccaaaaggttctagctcctggttcacagtcattctcttttataacacaccatcaaaattcctggtgatttt

SEQ ID NO: 49122 - DNA, 1169 bp, Homo sapiens
atgctgaccaggctggtctcaaactcctgtgatccacctgtctcggccttccaaagtgctgggattacaggcatgagccactgtgcccagccagatatgacagggtttctaagacatttatgtgcacaggccaaagatccagcttttttttttttctttttattgcattttaactgcaacgattttcccgtggtacagactcactctctgaaacaaactgtcccaagctgttttgttaagggttcattgctcctggcagtttggcctaaaggaggcactgtaggagaattttctccctgctgtgaatcacagctatggaattacacacagctttcatttctaaaggccgtcttgaagaaaattaaaccagaaagatcaagaaaggtaaataggtattctatggcacctttctttaatctcctggttacagtttcaaagaattttgctcttgccttcattggaaagagatctgggtatcaggaaatgattttagaaccataggtttctgtcctgtggttacataatctggaaggaaaaaaacaacattgcagttagtttctctctgtgtagcactgaaatagacaatttcattagtaattccattcattcaatttcccttctttctttcttcctccctgtttttctttctgtctctttcatattctctccatttctctcttcccttattgtttcttgttctcattcctgggtgtggttttgtttttgtttttgttttgcttcttcgtggctaggatctcagtgtgagcatgtacttatgtagagtaaatgttgatatattcttagggtctgtcaacaactggcaagaatagcatttgttgtctttctagcaatagattgcaggtgagagatcaggaccaagctaggattaaaaactaccaaagagacaggagaaaagcctccaaaatgagatatgcatgtttctgcccatcccaggcaatgccagagaagcctaatcatgccatctgagtcacaggtgtcccatgcacttttgcacatagtcagacatctccaccggtatggtcacagagttgctcccttctggaaaatcataaaagaattagttattgagataatatagctgaataggtagccatacagagtaatgcatagaatcagacatgccagagttggaactcctccctgtcact

SEQ ID NO: 49123 - DNA, 608 bp, Homo sapiens
tttttacacctacggcagacaataataaccaaccaaaatattctctccttttgagcccagactcagccgcagagttcttctcagtacagtgtaaggactgttacttccaattgcttagagttgataggcaaggtgaaatacatttgtcatccttggatttcattctcaatcctctcacaggctcttggtctcgaattgtataaataaaaagctggatggagttagaaggcagggctgccggcacaggatttcacttttggttttctttggtcaggagaagcatagaattttgccatttattcaacaaatatttattgagctggactctgtacctgctgtggattcaaaggtgaataatggcaaagtcttggccttcattgggaaactgatgagtctgcacattcagatacctggggtgctttcaaaaataccactccaatttcccacgtccccttttaaaagctttaataggcgaattaggttaagtacctcacttatactatgttgtaaatgcctgtctgccagtctctaccaccaggctgtaacctccttaaaagaaggaactgtaatctcttcagttttttaaaagattaaggtaaaatttacca

SEQ ID NO: 49124 - DNA, 1823 bp, Homo sapiens
tgagatggagtctcgccctgtcgcccaggctgcagtgcagtggtgcgatctccactcactgcaagctccgcctcccgggttcaccccattctcctgcctcagcctccctagtagctgggactacaggtgcccgccatcacgcccggctaatttttttgtatttttagtagagacagggtttcaccgtgttcgccaggatggtctcgatctcctgacttcgtgatccgcccgccttgggctcccaaagtgctgggattataggcgtgagccaccgcgcccggccgagactccatttttaaaatggatttacgttgttcacaagaacaggtctgtaatgatgaaatcttacagtctgtttttaagatactctaaaatattttggttgctgtttgttattagactctgacaggtggacctaggttgcctgcccagagggtctaggagctcacaatttctctaaagaccccttttctgtttactggaaaccctaggagcttccttaggggcttgtcaggccaagctgactaatccttccttctgctcaaatttcactcttctgaaaagggagtttgacgagcagggagtgagtcactagctccaagatggcagcaaggagcactggtgttaatctgtgttatcttagttcccacagggtgagtaatcatgcctggccaaatctcactgggcaaaacaggtgcaagtttccaaaggaaggctttgtgaccataataggaggttagctgaaatccaacctgtatttactccttgcaacagaatactttatgaaccatggtttacaggaacatccaggttccctaaaaatttatctcttccatgatgatggaaacacagcaacgtacacagactggacctggggactatcttagcttctgaagacttgcacagcaggtctaaaagtccaaggctgcctcctgacactccagagaggaactatgtgacacagagagactaagccaggccctgcccacagggttgcacacacaaacatgttttccaagccctttatacactcagcagggaacacgccgttctctctgggaggttgccagaaacttataagagagtctgatcagtgccaagaatagacaagcaaggcttctctcctgtctcggaaggggacactgtgtggtgctgagttattaccgcccctctgtgctcctctagccttcaaaagcaaacctgaaactgtttccctgcacttcttaatctcttgatcagtcgaaaaattattgctggagctcgctatacctctttgggcacctgtaatcttgttgtccaaacccaaatgcaaatatgttccctctgcttgcatttgttttgcatctcagagactcaggccgtggatctttgaggtagaacccaaggaaaatagtcaacaactttgtccatttgcccaggaagagtctgagttgttgctgttcctcattagtcctctgctttagcttcagcaaggacggcaaaggttacttgaaattcagccagtgcaggcaatgttgagaaaaaacttgactcttctcttccatgtacaggatgtctttccaaccccttccccaaagttttcttaaatccttggtgtcttcaacttggccccagctctaaaattaaatatttaccatgttttttcctctataataatactgggaagaatcaaccatgcgtttttaaataaaagtctcgcttttgtcacgcaggctggagtgcaatggtgtgatcttggctcactgcaacctccaactaccaggttcaagcaattctcctgcctcagcctcccgaatagctgggactacaagcgcatgccacca

SEQ ID NO: 49125 - DNA, 1262 bp, Homo sapiens
ttttcttgagcttcctaaagtggtaaacagtctctgttttcttcttatatgttcttgtagctaattgttttaatcatctttttgttgttacttcagcctcagtgatgggttactatttaaggattctctaaaagccttctaatataccctcaatgtggttctggcagactctgtctacctgacagccatttccacattctcctttgtttacagagccacagtttggttgtgttgtagtgtttttattcctagtctaagaaaatcatgatgatcttatgttcctttgccatatacttaatttttcatttttgtttatagctgagggtgatcacatgactgagatctgaccaaaatggggtttaagtagaggcttatgagaaagtctttgttccataataaaacagacagggatgaaaaagatagcttattggctcctgtgatcctttctttcagcctacacacagacaggatgcttggtgctatgacagccatcttgaagccatgaaatcataaaaacaaggacaaaaagtcaacttactgagaatggtagagaggaagaatagaaagacccaattcctagtgacagcattaagtcactacttatgtcctgaactctgtatccagagttcagattttgtaaaaacaaagcaaaaaagaaaacagaaacaaccctatctatttatgttattattaatttactttgttatttgctgctgaaagcgttcctaactggtataaataagaaggactaaagaacttaccctcgtcagagatttactctgtaagtgagcatggttgttgaatatgtgaccagtctaagtagtgaggcaacacagagtggaagaatatctggattttgttattggctcctgtacttctcagctgtgtacaaagcaaaccttgctttacaggaactttggctctctatttacaaggtcagtgtcaactcctagtgcctttttttaatttttctggcaaaagggaaatgggctaagttctaggaattttcctttatgtgagtatatgaggttttctaaaactttctagggagtcaaatgttttccttgctattggttgcttctgataaattaggtttaatcacagtatattcctagtagtaggtttttgatttttgaaatggtgatttttctttctcttttggggatgaaaaagaaaaatgaaagcttaatgatattttctttcaaagcaaccgtcttctttttcaagataaacaaaatattatgctaaattgaaaccaattt

SEQ ID NO: 49126 - DNA, 2000 bp, Homo sapiens
gtctcacaggcaattcttgtcgcaaaaatgcaaaagaagttctttcacatgcattttctgaacctataataaatgaaatcaatttagttttgagaaaaagtgtgtctaaatgatatatctaaatagcattaactatcaaatattgaacacacatatattataaaattatatttcactctcagttgggttactgttaatcgataattcaggggcgattgtctccttaattgactaattcccttcgtcctttcgtctttccttctttcttttaaaaagtgacagatataggagaattattgtcttctctttttgaagaggattcacttccaagaagtaagaatatcccacagttcttagaatttataaaagactgcaggattcggtcacaccacaatgtcaacaacacaacatcctttaatgagtggggacatggaattggagttgggggataagaggctggagggggagctgtgatatttccagagtagtgatatcacatttaaacccttgaaatcttccttataagattactgcaacaaatgtgtaaatattttcagcaacaatgcaaatatatggaaaactataatgataaagagacaaagaaatctgtcaggaatgcagagagatgtaccctgtggaaggatgccaggtggctaaggaataaaatctgttaatttgaggctatttaatactattcagaaacttctccaagcagtactatgctgtgaaggagaggataaagtttccagtccattgttaaacggtgaccgaaagcaaaaagtattttgactggaagagcgggtcagaaagaagagtgtgcagatgaagtcaaaccatccagcgtcggcaggcttgcaggtggccttgacctggaggcacccctgtcagaaagtaaccaaatctaggaaaaggaaaggtgtgctggcgtcgaggctccagggctcagcagcaaagtgaaccccagttgttttagcttgagcctagccctccctctaccaaggctgaaagttaaggcagttccccaaccctaggacccagcttgggccctgtgtcccctctcaccaaagtccagtagctgcttcatggacagcggggacgggctgtagcgcgagaaatgctccacctctcggggcaccaggccggcgccgttgagcgagccagcgctgcgcagcacgaagcgggccgccttcatcttgacgcccacccggcctggcggggactgtggctggcttgaggggcgaaggctgctcggagcagagcctggttccgagggggcgcggcgcgtccgggcgaggactgcaggtgcgctggctggcttgtgcgccccggcctgggctggggtttgagggtgccgcggagtgaagagtctgggcagagtcggagatgcagtggttcgagattcaagttcaagtcttcccaccagccgccgccgcccgaggttttatttgtctccccgcactctccccccgagtcccaaacaggaggagtcactggaacttggaaacgcgtcctgaactccaggtcgcgccaatcagatcagagaaagaactatgggctccgcccctccagccgcggtcatcacagaatggcctggcacggtgaccacggagtgccctggcaccggtgcccgcggctgtgacggaaaaagggtgggaagaacagggaagaggaagcagaaacaggtatctggggcaacgtgggcttaagattagcctcttgggacggggctccgagtcgcgtgggctggggtcccgcccaggctcgcccttgtttacaactcggaggctgtctcaatgtcaagtactcctggccacaaactgtttccaagagtttggactccgcgtgctcattggtccttgctcagagcagggcttttacagtagccaacaagctgcgttcaaaagtatgggcttctctgccactggacagagagaaaggaataaacaacctaaagacctgcgcccccacccccaccgcccccttttcttcagaagagaccg

SEQ ID NO: 49127 - DNA, 2095 bp, Homo sapiens
ggtaggaaaaatgggttctctaaatctcagtttaaacagaaatccttgtcacactcttctggggattgagaagcgtaagatttttttttttttttttaattgcctttctgaaactttagaagaatacctatttgccctgttggccaaaaccaggcaactgtgtgaaacagttgaatgctaaaacaaactaaacagatgctggaaactcaaccgtttgtttcttgaacaaaattgattttacctgatgtcctcttgagctcagttagactttgccagagagaaaacgagactgtctgcaactttaacaataatcacacagacacatacttctttccccctttagtttcccattttgaaaataactcgagggcctgacaaatgctgagtttgggcaacatggctgtgttcttgattgaggaaagcaggcctgcctgaccgtgtttcaacagtcagtgcagaatctcaaaaggaagtacaaataggaagggttaagggtcctctttttttgttctttattccacccgttgcacactagggttctctcacttcttctttcaaataggcttctcaaaatgcactgtgtattggagcaaagggagtgagggattgtttatttttatttttaaataagaaatgaaacctataaattaatgccctagggaaaaaagaaagttactttctgctatgcacaatttttaccaacattgtgttggaaggaagaagcagctggcctgcggaagctaagcagatgctggggctctctcgagcaggctaagttggtgaaaggtcagtcccacacccacagcctgggcgggactgcctggctgcagagtcaacaaggggaagtttagtaggtgaagggtcactgctgccgagcagcaataactttccatgcctcagctcccaggcatctagtttctgttcatggaaatagagctcactaggggaaaggtcggggagaccaaggcgtctctatcatagccctgatctgacactgtgttcttgcatgaggctcagctactcactgtgttcttgcgtgagtctcctggctgttaggaattctgctgctcaagtggaaaaaacagattgcaaagtacttcatagatcaccctgtactgagtatggcaaactgatcaacagcctacttactgctacatttatattatttaaaataactgccaggtgagattcttttcaaaagtgtatttcaataaagaaacctgtaggttttcttatcaattgctctagagcaatgattcctaatcttcaggtagtttaatttgcaacattgctgtgaaatctttaaaacatggtgtttgaaatgactccaggtcagcagagaacttctccatgttctagacaagtgctttttagattgtgggttgtaactaattagtggatcatgaaatcagtttaatgagtcacgaacagcattaaaatgaaatagaatcaagggaaaaaagcatctttgtggtaagggcagttttttttttttttttttttttggtgtcaaatttttgtttcaggtctatctgaatgatgatgtaagaagaccactgttctagattttaagaacaaaagctttgctgccttgaacccccaaataattgctcaaattcaaactggttgttagcttttttaaaagctcagctgattccgcaggatgttgtggctgtgaactgggaagcctgccatgctattattttgaaaagtgctgtgcaaacagtgttcctctcagatggtttccagagttagttccttacaagcatttcctcttgaaacatcgggaatctaaataaaggtaaataaattccatttaccaacccccaaaggtaaattaattcaagcaagaaagactttggttgctcacaaggctggatgaaaacgtgtttggtgtaaacttcattcaaagaaaactgagctagctaagaaggagctgtgatagcctctcttaactttgggattatggggtggtaaacaggctgtcatgaaaatgtctagaatcagctagatggtaggatttgtgctctgagaggatggggcattcccactggagcagctgagcaacagcatagaggaccattaagttattata

SEQ ID NO: 49128 - DNA, 500 bp, Homo sapiens
ggaagtggtctctttctttaaaattgagctctgagcttttaacttggatacaactgtctcctgaagctccatatgaaaaccaggagagagctccaagcctggcaatcctgaagaaagtatagttgcctaactcatgttaatgatttaccctaaaacctccacctccaccccaggcattctattcttcactcaaaggttaacattctccagttcagcccttgcattagaggtagtttctcctgctgtgttttggactggggcatctctcagtccagtttcagagtcaatatggctatttcctttctgctgagggccagattagcattttctagtgccaataaagaattttttaaaaatgcatttcctgacattttaaggtatttgggaagacaggagagatggatgaatatgctcagtctattgtcttgattcaatttcttcattactttttttaagggtttaaggactggttttaaactattataacttaagctttatgt

SEQ ID NO: 49129 - DNA, 588 bp, Homo sapiens
tagcaagaaatgagcaaatgccaaatacctgtttatcacaccatttctaagcaatttctctttacagcctttaaaatttatcgagagttttggtgcaaaacagaaaaatggttaagtcagataccaatgccgcaaaggcaactgcaagtggaacagggttggggtatcctgctaaggaaaccccagaatgcaagtttgctcctctttgctcacctgcctctgggcctcagccaagttaaagggcagagttccctcttccagaggagcaatccgttcaatgtctgctaaggtcatacgtctgtaggggaaaaacaaacacaagcaacaaatataccaatttattacaatttacattataaaatttaaaaacatcccttttttcatttctcatatttcagtatagccttcagtttggcttctttttctcctgattgctgccctcctcctaacctccttttattaagctaattccaaaaaaaaaaaaaaaaaagccaacttacccccttggctcatataaatctgctaactgaaacaagatgtcaacttccatgggtgtaacctgaccaaatttctgagctgccagaacaa

SEQ ID NO: 49130 - DNA, 514 bp, Homo sapiens
aatattatactaaagtcatatgtggtattggtgtatgtaaaaattagggctaatttaaaactcttccagttctgtacttagggatggaactagcctgagttaaggtcatgtggcattcaggaaagaaccctatccttctagtgccagaagtcaaagttgtgattcttatgaaactagtcaccttttcccctctgggcctgtttcctcatccatgaaagaaagccataaactatactcagccattgttcatttgaagtaggaactacattcccttggagagcttgtttaaaacacattcccaagccccacacccaaaaattatgaatcagtagatttgagacagagccagggagtccacagttaaccaacattctacactattacaatgagaacccatggtctacctcattgataagactccctcctcctctataatctgacagatctatcaattctcaagattcatacactatttaagtcatcatagtgactgtgagtcaacaacaacaacaaa

SEQ ID NO: 49131 - DNA, 906 bp, Homo sapiens
atcataatttcagatgaacctaaattcagcctataagcaatcacagcttttcctctatcatccacattacaaaggggctccaaattgtcaatgttaattttaaaggacacatataaaaagaaaatgaatcatcaaatggcactactacccgaatttattttcttaccactcctagtataggagaagggtagattctaaaatcctggcagcaagggcagggggactcatagaagttcaggggcagcatcaaagctgtccacagtcaacttagaataacaaaagagagagggtggccaagaataaatgagttcttcttggttatggggaatgagattccagatactactacgatgatgaagtggaattttttttctttttcttgcacctgtttcctaatgcaaaataagaaagaaacagccacacaaaatggtgcaacttggacttaggtaccatgctcctacctccactgctccaaaaatattcatctgtttgcaaaagtaaatagaacctcaatcacgagttcagtctgggggctgggaagtagttagcaggaaaaaaattatttggttttaattgtatattccattttggtttcagcactctgttttgaatgaatgtttctatgaggcaaattataagaaacaaattgacagcaaggataaataaatctttaagcaaaatattttcaagatatactgctatcaggagaaattaaattgcatctctgacacctccatgacaattcacattctgaatgattaagacattctacaatttcaaataaaattttaagaaattaaaactaaattgtataaacggtagtgactgggaaaagtagcctaataccttatgaaatgttacaaataagaattaaaataaaaagtgatttctaaagctgggcacaat

SEQ ID NO: 49132 - DNA, 1818 bp, Homo sapiens
ggtgtctggtaaaagctttctccttcatagatggtgccttcttgctccatcctcacatggcagaaggggcaaacagattccctcaagcctccttcacaaaggtactaatcctatctgtgagagcagagccctcatgacctaatcacctccccaaagttctacctcttcacactatcaccatgcaggttaggtttcaacatgaattttggagggacatcaatgttcagacaaaaccttatttgctgttaagacaccagaagttttacgcactattgcttttagaaacctcagctcaaatatcaacatggtgaaaaaggtagatcatgcttttactactgtgcaaatagttttgacctcctggacttctgaaaagttctcagggacttccaggagtccactggctacactttgaggtcaggtgttctggatgaactctccatgctcttacaagaggccaacctcctagacaatgctccagaatgtctttcctttctctcctacattgtcaatcttatctactctcaagtgagtctttcccattggcattcacctagaaaagaccctccttcaacctcccttttccctccagttatggccttatttctcacctttccttttcaataaaactctccaaaagaaggcttggattggtaagcaagaggagctgggtaagaggaggaggagcgctatctgtacatatgaatgagaagcaaaatcagcacccaatcagcaatcaaccctttctgaaattaaaaagaaaaagaaaacccaggcacctgacattcctagagattttctaatacatcagcaacataatacaaacctttttaaaaattctttttaatttactgcttgtagacagtgtctagccaccacattgcacaacccctcccctgccccatgatttcagacatcaaatattaacacaaagtgagtaatgcaaaaagaaagggggttaatcagacaccttgagagaaaggaaaaaataacactgattcaatgagagctgttaatgaggctttttgttttggtagattaatttgggagtctgatgactaagaagaaaatctaagcttctcaggtgactgctattgattattatcaaggtttctttttaatcgaagagatgctttcgccaaattctatagtttatgaattttagatgtttatctgaaatctatgtctaccctaatagtatagaaaactttcctcattagcaaattgaaagacctccccttattgattctgtattataacttgacagatgatgagcacttcaggctgtgaactgctgatgtttaaatatattaccctaatattctttaagtattgccaattgtaaacctcattaactcccagcatgtggccaaggcctggatttcatcacgacagcctcacaaaatgaaaacaggtatataaaaatgattttatcatcaacattattatatcctccttcaccttgtgaaatctttaaaaggccatatattctttcctcagaaaaagaatagcaaacataggaaaggcagagaacatgctttatttatataggccacatatttctaaactttagatttctttttcatcttttcttctttgatgcctttattcttcatgcatcaaaacaggaactgtcccaggactcaatctctttactctgaacagaaaggaattatctgaggccgggcatagtggctcacgtctgtaattccagcactttgggagggctgaggcaggtggatcacttgaggtcaggaattccagacaagcctgaccaacatggggagaccccgtctttactaaaaatacaaaaattagccg

SEQ ID NO: 49133 - DNA, 970 bp, Homo sapiens
tttaacaagccctccaggtgaccctgatgcagttaaagtttaagaaccacagctttagataatgtccaattttaatgtacggattataagatgtaggttctcagtcctcgctgcatattcaagtcccctgaggtgcttttaggttttacaaaacccaaaccataccaaaggtcaatcaaatgaaaatttctagaatggatatctttagagctccctcaagaaattaccatgtgtgggtggactgagaacaactgcgttaggacccgaggcccaacctcagctgctacgtcaccaactgtacagcacagcccttcctcagcaatacttccccagtcaccctcccaaacctgaaacatctgaaagccaagacaagcacagacttacactgaaaattctactatcataaagtaaatatttgccttagataagaactacaaactcaaagaggtagctcatcaaaagcaagcttctgggtgtgtgtgtgggtgggtgggtgtaaataagcatgcagtgacaagcaggaaacggagagagaaggagaaacagtcctgcatagtcttttgaacctgaggaaatagtgcagtagatggccctgaatcccaaagaaaagtattcttgggtgtaacctaaccacttagaagcaggggcccaccctccttctttatcttcctatactaaagacactagaaggctgaaactacaattcccagactcccttgctgctatgcggcctatgtgccatcaattagatgaaattgagtgagatttggcaaatgtttgggagttggggggcaccttctgctgtttctgccaagcacgcaccattgctggaagtgtctagttttcctgtggcaacctcctgccctcccatgtcagtggccacatggtcctgaaacactctccacttggcaggcagcattgtgactgcacaggaggtcactgctgtcttggtggcctgctctgcttgaga

SEQ ID NO: 49134 - DNA, 1023 bp, Homo sapiens
tgggcaacaagagcgaaactccatctccaaaaaaaaaaaaaaaaaaaatctgactccactgttaaccagcagcatgacctcttgttttctcatctgctaaaagtaagagaatagagaataacaattgaatgaaaacagcacaacttgagacaatctagcagcgccttgcttcccagttactcttcatattcagagcagcctagctgattgaggcagcagcagatacctgacccctgtggggaggtgatcttggctttctgaactaatcagatttcctctgaaggctgaaccagcagattcaggctgaattagcagcaggtctctctagctgatgatgtggcactagtgaagggtcacgaactcctggggttgagcaacaaaaattaaactggctccctacctttcatcttataccaaaagaactacagctggatcagagttaatctttaaaaggagagagagagaatttcaaaaagtactagaaaaacgcacaggtggtttcttatgtaatgttaagtagggaagctgatttcaaacatgacaaactcagaagccatataatccagaagccataaagaaaaaaatgataaatatttgacataacaatttaaaaagtgaatataaatcagttaaacaacaactgagaagaaaaacaacaacaaaatttgcaatagataggacaaaggggcaatgttcttcatttacaagcgctcttagaacaaatcaatgtgaaaaggcaaataaaccaatagaaaattgggcaaaggtcaagaccaggctcttctcaagttgctgttggacaccacaaatggattaactgaaatcttcatgaaccaccataaaaaaagaatctaggactgagctttcacttctggaactgagctgggaggcaatgaaaagatgttggcatcctcaaactcagaatcaacatcagcctgcaataaaatgagtgtgtgaattctcagaagtgaatgaaactccttgccagtgagcacaacaaagtcaaagaagagacaggatatc

SEQ ID NO: 49135 - DNA, 2188 bp, Homo sapiens
gatgaaactcagagtaattacagaaaagagaaatgccacttagaccacagaaactaacaacatgaagaagcctacggatttggggagcctggagagacttaagtcatagaacagcatttaaatatatttgtctgcttacaatttccattgcaaatgtgattagtttgcttgaataaataggaatatgatgtgttggccatgttttcctcttgagggttatcacagagttttgattaaggacaaatgtttgaaatgttaggtatatttaagttcactgcacttaaaatgagctaagaagttgtataggcttgattagagggctgccttcgtgaacttaaattaaaagcaataaattccaaatgattcaagtgattgggactaaatatggtattctgccagagaagttgaaatgcagtccaaagagactgaaatggtgtccaggtttcaagaaatggtgaaagaggaaaggtcaagtgttggagttgcctttcctctgggttagtgaatgattcacattacacagaacccctttcaagtacaacttcacaggagtgacaggctcccaggacaatctgtttcatcgttcccaaaaagaagcctctcaaatgctccgaggcgggtatctaagtgttgtcagatggagagagggagggggaagatgggaatgatgggaaagcggggagggggagagtccctggactttttattcacaaaggcgcagaccaagtctcctaggcagtttccaaaacggaagtcaaagtaacttccccacccgcgggagggcggagcccttgaaacgtaataggatcaggcttcagcccgggctctggcccctggaagaagccggagtcaacaaccagcggggtcaggagcaggagcgcgctgggaaggtagagaggacccccagcgcttgccggcccagggtgcaccaggccccagtcgcgcccgctcctcctcgtcggccctggctcagccccgtcaggcaccaacttccctccccggccaagtgggagtgtccggcccacaaagtttccgctgcgaggtcgggcctcggtctctgcaccgaccgcctgtgctgcccgggaggagtggccccctccctccagcagccgcaaggtggaacggctgcccggcaccccattttgctccgcctgtggcaccaacccagacacgtgagcgcccgagcctctcgcacccccaggctgatccggcaggcgcgctccccccggcctcgggcccgcggttaccttggcggccgccatgattcgccccggttgcgggcgactgcgggacccactgactggctggctggcgtttgggacccgggcggctcacttctagtcccggcggcggcggcggtgggggcggcgatacggccaggcagcgtgcgttcctggcctgcctccccacgccctcccgccggcgcgggtcatgtggatgctgcccgcccattggctgggcccagccttggccgccggggtgcgcgtgatccagcggcctctgccctgcagccggggagggctcagatcctggggcagtggctggacagggacacgtgaccccgctgcgctgtccagcagcggcggcctctgcggcgtgggcagaggtaacttggccgtgtgcaagcccgtcacctgagggcaggtggccccaccagggaagctgctggcttctgctgataccaggggctactgggccctcggaccgatgggaggggcaagtaacgacagatggtgcacggcctggggaagttgagaactccactaggacacatactttgctggatattttttcccctgtgcgttccctttgaaggagctccactttacactggatccaaaaagactttgatccaaaagcattgacttagaaggcgagattgcaaatattgctggcacgcctacttttagatcaaaatcggtgaactcttaagaacccaacaagtgaatgtagtgcagaacgtatattcatgaaactactccatttcagccctacctgttaaaacggtagaagtcaaaaggcccgggtcaaaagacttcccccaaataggccctactaaaataaataaacaagcattttaatgaaaatttgcttatatgacctccaggccttactcctcttcatcaggatttcattcttctgtccttgtaatcaaaatttataagacagtggtgatcagggaaaagga

SEQ ID NO: 49136 - DNA, 1138 bp, Homo sapiens
aacaagccaaggagaaaggctaatcaatcctagcagactgtcccattcttgccctagaacattgtctaattatggaaatatggtcttcccaccagaatatggattcctgaatgagagaaaaactttcttccctgttgatgtatccctattacttatcacagaaattctcaacataaaagatttttttttttttttgagatggagtctcgctctgtcgcccaggctggagtgcaatggcgtgatcttggcttactgcaacttccaccttccgggtttcagcgattctcctgcctcagccttcagagtagctgggattacaggtgcctgccaccaggcctggctaattttttttgtatttttagtagagacggggttttactatgttggccaggctggtctcgaactcctgaccttgtgatccacccgcctcggcctccgaaagtgctgggattacacgcccggccaccacgcccggccaacataaaagattttttaaatatcaatttaaaaaatgccatgctaaatttattagatgctgttgtgagtgcttttatatatgttaatacagatacagcaatatatagtagagaatgcccaggtggagagtcaagaaaactgtgtccccattcagtctgttggtaaccaaatatgacattggctaaatcagtttcctcatctgctggataggaagatacctaaggtctctcccagctccaaaattccatgaactttgacccttgcagtgataaatgcagtttctgatgaaacatttgttgagaagaggaattgagtcaatcattagcttaatctacactcgcctttaaaaaataagtttcagttctctgtgctgtaggataatgtttgcaatttatgaaatcattaacggttgtttacagtttagagtataacaatactctttgatgtttcctaattatcatgcaagttttcaaatgagttctgaaccacttttctgcctaattaaacctcattgaaaattttttgaattttaaagaaacatttgatttgcaaaaataagtcatatattcagtaacttttggtatttcacaaaggacccataaaacattttaacacacgataaggtactgtgaataagatatgccttgaactaaataggaga

SEQ ID NO: 49137 - DNA, 652 bp, Homo sapiens
tttaaaatagtgaaaaaaactaaaataaagaaaaagaaaaaaactaaggagaaaatatgacttacggaaaaaacacatttcaaggatagattttggggaattggacagtccataagagctagcccttcatgagacaaccattctgtgatagtgatttcttggatttaagatattaggaagtttggacttcagagattttgatcttttgggatttcaacatttgggagtatgctgtttggaactttgtcttttgggacaccagaactggaaagcaaacttcccctagatggctgctgtccaagttccacatattctcaccagcaaggccattgccctgatgggaaactcctattgctacaggactggttaagtatttccgttctgccctagcttccccataaatgcaaacgcagtacaagcacaagctctctgtcccagggcactatccatgctgcagcctgctttgtctgtttcaagcacaactctctgtagagactaagggcattctggagagccttttgcacaagtgctctccaaccaaccatgcataatccatatcccaaattgatagtgtcatttgtcccaccttctggcccaataaagggtaaatcttagttaggctactctaattgtagtaatcccattccttttg

SEQ ID NO: 49138 - DNA, 1605 bp, Homo sapiens
acttatctcttagcagagagcagggctcagaggggaactgaaagtaagaacaaaactgaaaggaagttgataaagaaagacttggaacaggaattcctgcctaggcccagtcctggatgcctacagaatggctcaaggatgctagggcttacttcttattacaccttgaatgcctagcgcagggcctggcgctgaatgaatgaataaaggaatgaatgtgtgggtgtcaaggtgagagggtgtttaataagtgttgatggtgggggcagcctcataaaaatgacagtagatggatgggggttgcatgggtgtataggggataaatttttagaaatttttttaaagagcaactctcaaggcctggaatttgttttgtgaacagtcccacaaagcagttgcctctcacagatttactgcatttagaaaagtccaggtcctctttcatgcttttctccctgcaccctagccccagagtgttagccatattttcttcatggccattgcatggaacaccatcaatgaactcagcctttgtccagtagacggtgctgttgtactctggccctgctgctgatggcatccttcttcctcgttagtgtttcatcacaggattttataatgaaaaggttctcagacatttggggaaaggcttttttccccccaaactagatgcaaaaatatcttttcacacggggctcacccctcatgtcttttcaaagaagcacaggaaaaaaaaaagaaaatattcatgtttttcctgttctgggaaacaaaagaaaacaaaacaacaacccaaatctctcagggatgaggtcctgacacctttggctgaattaagctgttgggagacaaggaagaggtaatagtggtcaggtaatctcaacactcaaccgccatcctgttttggtggagggccccaagtaacacacttggtgggaggcctgggctgagcaggatgggtcttcctcccaggagcctgggagaacacaaggccaattgtgaggcaaggtgcatgggctgctgcaggagggcttgggcagcagctgtccccagatgcccactgccaataagtctacagagcagcactggctgtggcctcaaagggaccgaggaagctgccaccctggcctggggtcaaactgtgtgtggtgacagggaaaggaatgtggactttggcagagtaaagagcggaaatatgggagcccaagagaaaagccacctgggcttgttgaagctttaccaccagccagggagggcagtgtttcttgtccctcaagatgtggtttaggaagccccaatctgttaggtgctttgagaagtctccctctctatgaggtaccatctcactaaataaaaggagctattcagtgcaggggaaaactcactgttgggtgcattccacggagagtaaaggcacatcaaagaaaaaagtcctttaacacacagatttctccttgacttggattgttgtaaaactagtgtgcaactaagaattacagaaaatcttcaaagggagaaattacttagtgaaaaattttcattatagccatgaatggtgataagcaggttggattagggatgtgaccatccgggtctttcactttt

SEQ ID NO: 49139 - DNA, 1442 bp, Homo sapiens
tttacagtaaatgttcaaaaacacaagctactattatttgggttatgtcaaaatagcctaatacattctccattcctttattttctgatgaaagagtaaattccagaatagaaaaatttctctagccaacgatttcatgctcaaattcactgatacgctgcagtaattcattcaacacatgtttgagttccttctacatgtaaggcattgtgcttggcactggccatcttgttctgaggtaggggccaaatgaatgtggacaagttatgcaacttcaccataagaggcattctataataggtgattaattctgtttcagtctgagaaatggcttggatctcacagtttctctaggggtctctccctttatcaggccaatctaagacccagcagtgctgattcccttaaataatgattggcaaggtcttctaacacccaagcattgatcaaatgctgaataaaataaccctggatggtcagcaacagaatacactggtcattatttctctactagaagcataagcttatctttagacatgcaggctctccaaaatggctatgatcagctcggttgttaaaaacatgcctatttagtgagttgttaaactctttgatccccattataacctccaaggacctatcaatctatatgctgttctgttttatagttattattattcttgagcaatgagcatttggcatctgagagctctggaactctgtctttttgaatataatagcacagacttgaaagtaaaaacctgcttgctattctgaaagcctcttcttgctggttgcccaagtcaccactacaacttttttctcagcaggcaaaaagccctgattaccttttgtaggagaaaaaggattagtctaggaaaactcaccacttttgttttcatctcggagactgcatatcgtgaattgcgtaagtcactgagacgaataaatcattgagagaagctaatcaatgtccctggaagtttatatttcatcttctcttagatatctggtgtgctgaaataacacagggtttcctacaccttagcctcatttattttcagcatcagaaggacccttaatgacagggcctttatgaagcattagaaaattccagggccaatagatattctgaacagaaagtgctgacttgaaaattccctaaactgaggattgctgccgttacagctgcatgagctctgacattagttgttggtaaagtgcatggggtcagggttcaccatgaccttttcttcagctagaagagtaagggatgactgaccacagatacaacccagatactgtggtactgcccaagtatccagttcacagagatcctgcagtgctcacagctgctcacttcctattgggttggccatggaacccatgggtataaatcctttctgttttcatttccctgctgcaggtagtagttcttaaaa

SEQ ID NO: 49140 - DNA, 770 bp, Homo sapiens
tcctagtttgctttttgtgttctctatcacccttcgcatatttctccccttgccttagtgtattttagaggaatatattatattgggaatatcttatatgaaactcaagctggtgtaggtatgaaaaagagggtagtgtagaaatggggtgagtctctacaatcagaaaatcaatgaaataaaagcagataggaaaaagaacaagattaggaacaagagaatgagagctgcttagaaatggaagagtggagattcagggggaatcaatattctctgtaagtttttgaaaaataataaaatgtatttatgtattgctcatatgatacaaatttagtacaatttattaagaaatagggaagatgaggaaagataagagaaatagagggaaagaagagaagcaatgatatcataacaatgtaataaaacacttctggtggcagggcagggcaggaagcagtttggggtcaacgagaacagtgcaattacaaaatactccactcatgtatacatggcctaagtgatgaagccaagaataaaacccagatttcccaattcctggccctgggccttatgtattaaatcatgttgcctctgctgtcagataatcatcttgcatctggaacataaatacagccaattcaaatatgcatcttgatcttatcatgtggttagcaatccacactgttattactgtcaataggactgcatcccattaataccatgttcactttttggctacagagctagtggcataaggtggataaatacaa

SEQ ID NO: 49141 - DNA, 1208 bp, Homo sapiens
caaggcagtggcaccaaactgtgtagtagtcctatttgtcatcactgtgtactcacaggaaaaaaaaatccagtgtaacttaataatgttctggtgaagcagtaaaataatattaattgtattaaatcccgacccctgagtgcaacaaaatgagaggtatacgtaaagcactttgctgcttactcaagtacaatatacatctatgcagatatctgagttgagagctgaactagctgggttttcttttcatggaacaccattttacttgaaagaatgactgacaaactaaggttatttatacttaggtgtttggcagacattttgtcaaaaatgaacaaagtgaacttgtcacttcagggaaaacaactgagagtatttgttgccaacaaaaaaaagttcagctttgaaacaaaatttagaattttggaaaatttgtaactgccactgtgagcttgacagcttccccgatactttaaggcttttctgataagactggtgtgatagtaatgaatgtgatctgttgatactgccttatgaaatgtgtcaacatttggaaaatctatttaactcagtgaagcaacattttccaaatgaccaatgcatgatgttacaaaatcagacatgggtaaaaggtccattcgaagtgcaaaacagaatagttgattttaaggtaatggtatgacgaacaggaaaatttcattggtaatagtttcagattctgcattgcaattatcttttaagaaactgctgcttgtggagttttggtgtagtatcacagaataataacaattatctacaaaggttactaaatactctttctcaatgtgagaggctggatcttcttcacatacttcaatcaaaacaacgtatcgcaatagatggaatgcagaagcaaatgtgagaatccacttaccttgtattaagccagacattgaagagatttacaaaaataaaatattgctcttctcactaaatgtttgtttttgaaaatattgttactttttgttaaaatatgttaacatgtatacttactgctttttaagaaaaaattctttttaacatttctgttttaatttctaatataatagataccaataaatataacccatataaatgagagttctttggagttattaataatttgtaagagagcaaaggagtcctaagaccaaaaacttgaggccttctgttctatttcatgccatggt

SEQ ID NO: 49142 - DNA, 3524 bp, Homo sapiens
atacaatctttgaaaaatatttatataatcctccacatctttcacatgaagaaaatgatgatcattttcagtacctacctcttatgtgttgacaaaaaccagcagagttctcacaagtatttctggatttatgtttaggtttgactaattaattgagcaggagaaagaaggattagtcactatatagttatacaattcatcagcaatttcagggctccattagccaacactggaacattccaccggcacgatcttcatgaggatattgaacaggttttattctgtgatttgttttggaatgaaattctactcacccttctttgtgaatgaatgctgttcaacacaatttaaatatttaaaaacagcattgagggtgtgagctgttgtttaaggataaactgtcatgcttcagcctaaagcacattttctcagtggtcattattctatacctagttgattagaagccaaggagtttgtcatcactggtagccacctacccatcatgatggaaaaagcatcatcctttcggttgtagctggcatgaggacatatatgtatcacatggggaacctgcaaattctctaatgcagattgcagctgagaatgcagaaatgtgagcttagactacaagaacagtggaagtcttttctgaacacctgtttgttattgagacagcaattactgtatagttgagagggaaaccagggaagacaccccaaacgactgcagcttgaatttttaagctgagcctatataagcatatgcattttagaattgatgcttcttatatctccagtgttgatgtttccttcattgatggtctagaggacatttaggaatctctgtcagcaaaacagatcctttaaaatttcttaggctaaagatagtctcttaagtatgaatagggggttgtaagctttgattatgctttgctttatctgcgaaaaatcctgggaatgaatagagtattgtggtcagtttagtcccatgccattcatggtccaaaggcaaaaatgtagtgttgtcacatttgaaaagtggcatatgttttcctggtaattacatcttatatgtttactattcaaaaaatgcaggtgtgggtttttgaacagtgtccaatgacaatgtgcctgactggcagcagttcctaagtgagtcatgtttcactgtctgtcgttttttataactgttttcaccactaatttggttctctgatgcagtgtgcaattagttctattatgaaagcagctgtcttcagttttacaatggcactttcccctttggcttgcacagagcttgttgtggttctgctgatgtgatgataggagttgtaaagtggtacctagatgagccgcactgggcccggatcttccctgtacacaggattcttgcttactcactgctactctactgctgtttctcccagctcagttaaaaagagggtcacaaattaagttgccccttgtaagacgtgtactgtaaagattggtgaccaggccatttgtaccactggaatcctgttgtttataaaaattatatttgaaaatgatgtattaggtcaaagttgagatggggaggtacactgggcaaaaaataaaaaaaggattgttgtgtttggttcactttcaaacatgaggtatgatatttaagattccaaatgaagcctgaatgcagcaaatgccagtatatgaacaataaaaaaattgaacataatgtttgtagttagttataatatgctttggattttcctgctctctgaaagaacatcctattttcacaggagtttccatgattttcgattcttaatcccaagtctcttctgacatccagaattctccaggagacctagagcaatgaccattctgagcccatctttcctaagaggagccaatagtttgagctttcccttacaagcataattccctattaatatctttagaacattgctactcaaagtatggtccccagacttggagtaacacatcatctgcaagcctgttagaaaacagaatctatggccccaccccaggcctactgaatcagaatctgtattttaacaaaatccccaggaaatctatatgtatactaaattctgagaaaccctactttagaactgtattatttgctcccaaagccacagctatgtctgagaacctgactgctacttattagtgattgttaatgaaaatcactgaattttactgaatttagagaacttgtgatcaaccgaactatctggttcttttagtttttttaattgtcctcttctccctttttaaaatataaactctttgagcacaggtactttccccgttttgcccattaaagtatctgtagcgagtagaagagtgcctaccgcatatttagcaatcaacaaatatttgttgagctgaacaagtgaacaaatgactcattataaataaaatatgtgctcagcaacagaagcagatcaaattccataatcccatggggtttactcagaaccttagcacatcagtgcctggggcaagaggtgaggcagaaattgagacagggagcgcatgagttcagagctcgtactgtattgatagtcacagaggacacctgggctgtctagggaagaagtggcagctctgaaattttttcccctgatatttggcaagtggcagggttatgagtcttgctggcaagaggtaatccactccagttgaatcaaaatcttccttgagaatactatcccacatatgctgttggaaaagcagtaaaaggggtccaggaacatgagggttggtagagtgaccaaatctttctagtttgcctgggactgtccgaattttaggactggtagtctcacatctcaagaagcccctcagtccccggcaaactgaggtggtttccctacttgagtgtttgccatagcaccatgtctgctgagagcccctgccaaaaaggcggaggacttggggcctttgacagacatttagatttttagggcactttcgtgatccaatcaagaatgtccaataacagaaacttaccttgaggcagatctcttatgttcatccagtggcttaaatcccactaatttcataaaagcgttctttaattttgtctttagattaatatgagcagggacagactttttccacacaagaggatggctcacttaaaagcaccatcttacaaatcttagttttgtactctaaaggtgctaatatttgaattgtcttggaggtacactgctctaggacctgagccataccttgtcagacatgcttttacacattagagccacatgggttattgccttaagtatttccagatataatttgactgccatttccaaatgttcttatttagttctttttttccctaaaaacaaataaaaagatggacagggtggggtgggattgtggcattataaaaccaggtccagattgttacattgtaaagtgctttagtttgatgagaatgcttttacctatgcacaatagcatttcggctatgtaactaaatggtattacttaatggtttaatttataaat

SEQ ID NO: 49143 - DNA, 949 bp, Homo sapiens
aatgaacaagtattttttgcctttctctctctctctctctctttctttctacaaaggtattggtgactgaaagccttttcttgcagaaactgaagggacagaggactagtaaaaaccaaaccaaaacaacaaacagcaaaacaaaacccagagtaataataaatagttccctgccaacatatttacctaaatgtctggggtcactccaacactcctctgtgtccatctgcttatcggctacttgcctcattcccaaggatacctaacaaatatttgctgatgagactggtatcaggttgtattacgtccccacttgcttcaacacacagcatgataatgtctcatctttataagtattgtaagtattaagttatctttctgacaatgcttcctttctcaagccctcttttaaaaatgacatgaatttagctcttacaagactttaaaagagaacaagaggactagcagattcccttcctgcccttctgacccacacgcatcctggggtcagcgccctggcctgtctttatgtagtcactagaaaataggtgccagattctcttcttttgacttaagccctggctctgcatgtatttattttcacctgttggagaatgcagttcccctaaagtattgagccaaatatacagatccattctgaaatcatcataaaaggatttatttccttaagaacatgttagcttatctaaacatctgctactcaaaagtgattacttgggaatttccaggtcacacaggaacacgcgagtctgttgctactggattaatttagacaaaaaccagcaaccaaaccttttggggtgggacagagagtgctttaaaaattagtctggaactttaaaaatgtgaatttacatacttttaaatgccatttctgatttgcctttattttaatcagtctatatatttggtctttgtgctgaagtct

SEQ ID NO: 49144 - DNA, 769 bp, Homo sapiens
tcaacctccccatgtgaaatggggataataattgcacttttcttatagaattgttatgtggattaaataagttaacataaaaattacatataattcatgaattcattagttttaataacccttctaaactcttgcttttccatgttgcaatcctaatttaaaagacaattaacctagtgaggaaggtcatcagttccttcagtcatcctagttgctcttcagcctttggccctacattggcattcgtgaggtacagaggccaaaactaaatccaacgaactatggtgtcttgaatttttttccccaaaataaatatttcatgtgaaggccaacaatgaaaaacaataggaaaatcatataaaagcatagattttcagatcatagtctattgacacaaaagtaactctatttttggcactgggtgttagatagcaatatttggggagctggtcaggagttaccctctgacctcactctgtctgagttgaattttaaacaaaagctctccagatataggccaaggtacatttagattgggactgcttccaactttgggtaaactattcatctgtttccagaatctgctttcaagtccttttaccagttgaattgatttgcatctatttttatgcaggatgggataggggattttttttttctcttgaaatagagttcctactgatacttggggtttctttgattgccgtacagtagtcccccattatccgtgctttcactttttgcagttttagttacctatggtcaaccc

SEQ ID NO: 49145 - DNA, 1586 bp, Homo sapiens
cactcaataaatgttagcaatttgctattatctacaatgaaaaaaccaggtctttagttttgaagctaaaaaaaaaaatgtgtaaggtttaggttcttttaaaaaaatattttatttttgtagggacagggtctcgctatgttgcccaggctggtcttgaactcctgaccttatgtgatcctcctgcctcttcctcccaaactgctgcgattacaggcgtgagccaccacacccggcaagttttagggtcttataaagcattaagttaggtcacagttaagtgatcaaaatggtgaggaacaggaatgaggcaataatgtgtattaagcaccccgtatcttaccctcctatcctacttaatgaggcttcatttgtaacatcctaaaagttaagcagcattggcgtaactactgacaattcaattctggaaaggtttaaagacaaagaaagactgctaaaacaaaaagaaaaggaggttatgtagacttgaactaagtttaagtggtgagtaacccaggtgaacagtaaatggaccaaccatcacagacgcggggctatgggtccagactcacggtggctcctcccagtgaggaagccgaagccattgggcctcaccagtgagtcccagcgcaacaccccaaacccgaatctggggcgccactgaggggtgagcgttagcgcctcgagtgccggccctgggagtccaaacttcccgccggtgcccccagctgggcccgagcacccaagctacctccacacggaggcctgagtcaccgttcgcgcgacacagaaaccggggcccagcggttaccttcggcagggaactcttcaaactcgtcgtcttcctctaacagacctaagtctaccggctgctttttctctgacatctcgactgtccgcgcccaacacctcccagataagcagaaaagttggaaccctcactcttcctcaaggaaacgccaccgtcactaccgcctccgacgctgacgctaccatagagacttggggaaagaatacgggagcagcgcgaggaatgctgggatactggaggtcggcccagcgcttcctgcggggttagcgctttttccgagttgtagaggtgatttttttttttttttttttttggtctctaccttgttattcggactctctgtattgccaaagttgagatccgtgtagttttcctgactataagagactcataatgtgtaaaacaaacaaacaaaaaaacccttagtttgcaaccgaggaaggaactctagagagactacagtgtgactgcaaacattcatcagcccttcacatacgttattacctccagtccttaagccagttccctaaaggtggtattaaatgtctccacatcacagaaaattcaggttcggtaggaagcagccgaagtcactcaggtagttctagacaaccgaaatgcagatttttttgcctggctccaatctccagacttttccattaggcagtgtttataaggtcttagaattactttgtggtaaaatagctttttaaatagaatttgtgtggtgtgtatgtgtgtgtagtaactctggtttacaggttattatacagta

SEQ ID NO: 49146 - DNA, 489 bp, Homo sapiens
tggcacatttgaaacatttgaaaaacaaaataactagctttaggagctaataatctgttcactttattaaattcattaatgattaatccacattggccatgtgcttgctcttagaaaattgtgtaaagaagaacttcatcagaaatatattgttttaatacactttctctgctatttatacatatgtgtgtgtgtgtatatatatatatatgttttcttagttgtataaaatcccttaaagtagtataaaatgttctgcatttaaagtttcttctctgctaatacctcactcatcctgtgctattatttgccctggtatcatgttgtaccttgaccatgagttggtactttatccatgttcttataccagttggaacttatttttactattttttgaaacaagctcataagtctttgaatttcaatttttctttttcttggaagaaatttttagatcataaaaagcccaatgtgtaacttatggattac

SEQ ID NO: 49147 - DNA, 1333 bp, Homo sapiens
cttcagtttttaatatggtatcctgtatattataaactctccagaactatttgtcaaatgaatgtgctgagtaaatagttcagtcctttaaacactgcctttggatagattatagaatgaagttgtcccctgatcttacagcatcttacagacctattcctgatccaagaagcccttggaatcttttctccattctctgcctcatctgtgctactcacattgtcctagatagtagaacttacgaaagacacaaaattattgattgcagaagcttgagaggtacaggatctaaaagtacaattacgcaaggttgaggagcagcatattcaacacccactagacagactattaagctatttggtggacgtaaacatggaatggttcatatcagcttctaatatgatctcagttgccaaaaatgcctttttcctggtcatttttctattattcaagaatgtatgattaaaaaagaacttacaagatttaaactgggttagattaagtggtaagactgcccatgctataatgttagaactatcaacatttaccaagaataaggtggagaaggaatgagccagaggcaaacaggttatttaaaggtcttcggatgttgccagccttggactaccaaaaaaagttgtaattctgatgctgaggaatgccgtcataatggagaagtaggacaaaaactgtttgagttaatcaatgagtccagaatgtgctgcaccactttaggccttaagtcattggagggtagagatcttttgggatctaattggatgcccagcaggctgatgctgtgtcttagaaactggacttttaactggttgggtaaatacttctccagcctgtcttgtactgcttgttctgccggaggctagcaaaaaaccatgtgaatatgtacaatgtattaggccaggtcctgaaagtaaattaagataacatcaaagggatcctttataaattgatggagggaggccagcctattgcatcattcctaatgtcattctaaccacaataactgtaccgtgtccaaaggtagctttgctttttcactctcacactggattccagctagtttgtgtgcctcccagaggttgtttggtgtagatgcttaatgtacatcattcatcttacaaactggggagcattagatggtgatagtgttgagaactgttagtctttttgtaacctcattttcctacttttatattacgtaagaagaattaaaacccaaggaggggagagagaagagcaaatgagctttcattgaaagtctgcctcaatgaacttcaggagttgttttgtatctggctttttttcctctcagata

SEQ ID NO: 49148 - DNA, 456 bp, Homo sapiens
atatagaaattttatacatatagtcttaaatgatttgtaaaatgatctaaaggaatatacctatcagtgcttactgctgaggtgggaagtgagatggggaatgaagagggacagaaaaacctagacttttgtttgtttttgtttttgttttgttttttagacagtctcactgtgtcactcaggctggaatgcagtggtgcaatcatgactcactgccaccttgacctcctgggttcaagctatcttctcatttcagcctcttatgtagctgagaccacaggtgcatgtcatcatgcctggctaattttttaaattttcattgtagagatctcatctctacaatggtcttgtctcgaactcctgggctcaagtgatcctcctgcctcagcctcccaaactgctgggattacaggcatgagccacctctcctggcaagacctagattttttactcaat

SEQ ID NO: 49149 - DNA, 651 bp, Homo sapiens
gcagtgttattattctgcagcaaaacatttctgatgcacaacattattttaaaataaatctctcaagatgatcatagttgctgaagtcccctgaaatttatggcatttaagaatagatgtgtgtttcttcggtgtgggagttcttcaagggaatttttaactgctgatgcaaacgttagtaagcaatgcacttgtttggttaagacttttagccttgacctcaggctttaaacccttgtcctttattaatcacgtgtttcctgaatcaaagagaatacttttggagggggaaaattgttctgggactgaaggagtgttatataccaaacagacatgcccagatgacaaataacccctgaatgatagccagggttcatccagctggtcggccccatattatgtgattgatggtgttgatgttctaaataggcctaagatgtgccaagtataagagccataacaaagtccttcagatttacactgtagatagaaggaggaagcgagaaggcatgttcccagcacatggcaattctaagaatggtgtcatgattacaagtaaccttgcagggtttgtctggtttatttcgaagttaaacaaaaactatttgttggtcaggaatgaatagggtcacataaggtctgtctcaacct

SEQ ID NO: 49150 - DNA, 656 bp, Homo sapiens
tccctcatgggttttcttcttttttcatagaagcttggcaggctggttaagaaaggataacgggagaaaatgacccctcggctcaggtatcctttggcctatgactatgggcccaatagtagattgtgagactaggtctttttcattgagtctgtcttactgagaggaaaaactgctttgtgtgatgactttatggcaaatgctagcaacagctctgccctgcatactgaaagagagacatttctgaccgcagctcatgaaccacacttatttactctggcacatgcccactatttgttcataggctttctgtctctactaaatgcgttccaattttggaggctaaatcattgccagtagtttccaggacattccgctaggctaagcaaaattgccctaagcggtagtcagaaaccactggagtagtattgtaaatacagactatttgcagaaaatgaaagataccgaacatcttatctttttttgtgctgcagaaatccatgagttgtattttgcagaaagccatgcaaggcactagcaagaaacaagaggagggtacgaggactttcatccccactagagctcagaaattgtgctcaaaaccactttgaaagttgggcacagcctaaaacagttataagggcatactatggccg

SEQ ID NO: 49151 - DNA, 1445 bp, Homo sapiens
ctctgggctcacttgggttgtttgcaaggaagagcccatgcccagagtataaattgggagaacagcgctgtgcaaagagcgtgggttggtgagctagtggatggcgagattaatctcactctgatccctaaagcagggtgcagtaatactctaaatgcctcaaatgggttgggaaccatggaaggaatcccggaggagcccgatcttaacgaagcttttctcaggcctttggtaggaggacagaaacgaagttgaatgaaaaagacagtggagtgggactgagaaatgacaacggcccaccacagacctctctctttcaaggcctgtgtcgtcaggacgcaggccagaagaagccacgacgaggcgcaggcgcgactccacgagggccacgcccctcctagagaaggaccgacccgttttccgcccgcagcggagcttgggtttccgggaggacctgattgtgcaagggaccaaaccggatagaggtcgcgcgccctctttcgtctgccttccggttcactaatacgcaagttcgcagaagtgcgggaacgcgccgtccctctgcgcaggcgcagtcggcggtcggcgtggggcgctatgccggggcggcacgtttctcgagtccgggcattgtacaagcgcgtcttgcagctgcaccgtgttctgcccccggacctcaaatccctgggcgaccagtacgtgaaagacgaatttaggagacataagaccgttggttctgacgaggcacagcgtttcttgcaagaatgggaggcaagtgacgctcccttctctttgcccaagacctttggggttcctcggtgtccaggtttctagttccagtcccccatgcggggttaaacagagcagcaacctgttctgtttgaaatagcgtaatgctgttcaggtaacactttccaaagtttctcccacgggtttctcactagagcagatcctgttacttcagcgtccccaattcagttcaacttttgagctcctgcagatgccaggtgctcaaagggtgagggtaggaggtcacaaaaatgagcaagtcgtcgttaagtgctcaaaaacctcaggagctttttgtccttttaagtgcctttgcacctagtaagcgcccattaataaattaatggttctcttattagttttcaaatttaaaggcttatttccgtaatttattatttaatctcagcgcttttggttgggtttaaataattttctcacttggctgatacagaaatcaggtaacatgaaaaagattacaaaaggttggagattacaaactgtgaaggagaaaaatgctggtggcagttaagtcaggcgaaagttgtttcctccggtctcaagtcattgttacttcgccctgcaccattgcgctaaatattaaacagacacatgcattagcaataagtcgtttgactttttttttttttttttgagta

SEQ ID NO: 49152 - DNA, 1548 bp, Homo sapiens
catctcggcctcctaaagtgctgggattacaggcgtgagttacagcgcccagcctggacagtctttaaaagaactctgacttgctggtaacgaaacacagctccggacatcctttgagaaagtcgccgtccccacctcagaaaacacacacacacacacacgtgtcccggaacttacacacacacacacgtgtcccgtaactaacttacacacacacacacacacgtgtcccggaactaattttcctcatttgggtgaaaacttttacagggtcctccaggcttgcatcatttgaaggctagcgtctgccactctgcttccacgcttctagttggggactacccacttaacaaagccaagttcaattttaatttcccagaactgacgcaacgcaaagcgcaaagagactgaacctggggtgtggagtgatacagacctgacggggctttattccatagacagacatcgacccaggacctgaagcggtccctgcctgctgtcaggtccccgccgcagcccccggcccgggctcagcacctggcacaacgcaggctaggtcagtgccgctcgaggtgggcagaaccacagggccgccgcccctggggggcaccgacgccgcccgctcacgcgccgccccctccgcatacctctccttcccgcggccagaagcgcgggttgtagatgaagaaactcagcagcgccggcaggaactgcttctcctgggccgccgagggcccgctcccagccccggccgccgctgcagccatcccggccgggtccccacctcgggagcctcccacagccagcccagagaaagcagccacctgctagaacaccgcacttccgcctccctcgccaccaccccggaagcgctcgccgccgaccaggaagaagaacccgcctcgcagcgtcctcttctggcaccccagggtggccttgttgtctgtttcccggccgagtttgtgttttgctggctcgcggagttttctcctggctacgggcgagggttgcgcgtttcaggaaaaactgagtggggcactgtttgtttgtttgtttgttttttgataggatctcagtttgtcatccagtctggagtgtagcggcgggatctcagctcactgcagcctcaacctctgggactcaagccatccccctgcctcagcctcccaagtagctaggattacagggcgcgccatcaaggccagttttattttttgtagaggtggggtctgtgttgcccaggctgctctcgaactcctggcttcacatggtctcccatttcgacctcccaaagtgctccgattataggcgtgagacaccaccgcccaacctgttgttgttttggtggtattgtttttaatttaatttagagacaggatctcgctttgtcacccgggttggagtgcagtggtgccatcatagctcactgcagcctcaactcccaggctcaagcgatcttcccacctcagcctgagtagctgagaccacatgcatgcaccaccatgcccagataattaaaatatatatatatatatatatatatataga

SEQ ID NO: 49153 - DNA, 1007 bp, Homo sapiens
gtgattgtgcccctgctttctatcctgggcaaaagaatgagactctcagaaaaaaaaaagaaaaagaaatgatgacttcaagacccaaggaaaattgcccgttaaaattttttaaaataatcttttaaataaaaaatttaaaagagaaacacccatgtatcgtgtacattgaacggtgcctggcacctgctcagctttgaatcatttctcccgtgatgttgccatcaaatctccagggaaggggaagcaggcaccatcacggccaccagggggcgccgctgccacagctctgagtctcggctgggccgggctggcatctccaccgcccatcacctcccaccattgtccccctccgttttcaggccgggcctccactttctcatgtcacccactctgctattactccatgctcccatccttcctacgtccttactttcacccaggatgagaaagtgccccaccgtgtccaggccacatcaccttgtcccatgacctatgtcccttccctccccaagggaagcttcagcccataccttgcgccatttacccggcccaagggctctccctgcgcaggtaatgaccttgtcccttttccctctggatggtttctctgaaggtcaggtgaggtcatgtgtggggaagtccctcagagacaaacactggggtctggtgcaacagctcacccctgtaatcccaacactttaggaggccaaggcaggaggatcgttggaggccaggaggagttcaagaccactctgggaaaaatggcaagatcccatctctacaaataacttaaaaatgagccaggtgttgagcatgaacagctactcaggagactgaggtgggagggtcgtttgaggccaggagtttgaggctgcagtgagctatgactgtgccactgcactccagcctgggtgacagaataagacccttgtctcaaaaataaataaataaataaataggcaaataaaaatcagccaggtggggtgatgcaagcctataattgc

SEQ ID NO: 49154 - DNA, 2135 bp, Homo sapiens
tctcagctcactgcaaactccgcctcccgggttgaagcgattctcctgcctcagcctcccgagtagctgggattacaggcatgtaccaccatgcccagctaattgtttgtatttttagtagaggcaatgtttcactgtgttagccaggatggtcttgatcccctgacctcgtgatctgcccaccttggcctcccaaagtgctgggattacaggcgtgagccaccatgcccagcgaaaagccccatttctaacaaagtttggcaattaaataagtagccacaactccttctgctattaaataataaagccattgagtgttacacagaaagaaccacaaattccggccaagcctgttggtggctgttggaaccgccctaataaacaatttcaggtacaagcaggtgtggcagagggaggtgcaggaagttccctggggcctcccagcctaggccccccagcagtgggagtgggggcctgctggtgaggcctggcttcctgctgggctctgaacccaaaaagaagccaaaggcagacccagagagcaactgcaaacagtgatgagatggttgatttgggtgaccttggacccgggattctggactgctgggttacaggggagtcacttcctcacttctcaccttatagggtcacatggagcgtttgctccccagcgatttggggaaggtagaagcgactccttagagtatcttgaagtaggggcttacaatcagacagacagagaaaaagctccccctattcctctttcccgctgcccctcactgagatacgtggatgagacagggtggcattgcatggggtggtggagagtcccaggcgggtcttgctggaggagctccccaaggactccctttgctggaaggctccagtccccgttctggtccaatgccaaggaagggacagaggatgacgctgcatgagctgattaatccctgggaagacaacgggccctgccctacctgcccatgtgccagtctggcaccaactcgcccagcctgttccagctggcctggtagaaactgacgcagcaggtgactccctcggttttatgggcttggggcaaaagtcgtgtggccagcagagtggctgaggcaggtagagttttccacagcggcctgggctctccttgtcctagaagtctaacaagtcatcttcttgtttaccctggtgcctccctggaacataacctgacacatcacgggcacttcctgtgtgtgttgaaataattgtcaaagaattggtaaggagcagatgtgagcagaacatgtgccctgcgcaagagaagcccgtggtccccagaaacttacaattcttttcttttttaaattttttctttttgtttttaagatagggtcttgctgtgtcacccaggctggagtgcagtggtgtgatcgtggctcactgcagcctctaccactggggctcaagggatcctcccacctcagcctcctgagtagctgggaccacaggcatgtgccaccatgcccagctaatttttaatattactgttttaaaatacatgtaattgtattgagtctatcttctctaaggacaaaggtttactcagcaactattaacttcagggtagagcttgttctccacctctgctcttcaccctactccccagccccgatctcaccagaaagcaaaccttaacagggtctctcacctgaggggtatccaggagcaatttggtccacacctcatcttcgcaaaaagcttttaacgtatactttgttgttgttgagacaggatcttgctctgttgcctaggctggagtgcagtggttcaatcatggctcactacagccttgatctcttaggctcaagtgatcacaatcctcctgcctcagcctcctgagtagctgggactacaggtgtgcgcagccatgccggctaattttttttttttttttttttttctgtagagatggggccttgctatgttgcccagggcagtcttgaactcttggtctcaagtgatcttcccacctcagcctcccaaagtgctgggattacaggcatgaggcaccgaggcatgagacgggcctcaatgtacacttttgacgttattcggttttgactctgatacttagcaaggatgccggagccaggcta

SEQ ID NO: 49155 - DNA, 2425 bp, Homo sapiens
agccaagccatggacttttaaattcaatgtttctcgttccaggtatttgtctccttagatatttattggcttgcctcaatcatccaacaaatattccctgggcatcatctgtgtgtccagtgctgtgttaacatcatcgacagctggcatttaggatggacatttggggagtttggagaattggggaggttacactgttgccaggtggcaaagtctcatctgataagattgaaatcagctcctctcatgcacacactgaaccatagcgcctctccagaaaagcttagcattttcccaacccccatgcctctgaccactatattacttgtgtctggagagtgctttctctatcctctctgcaggactgtgttctcacctcacctcttggtggggagaaggccacccctgggagctgctctgccctggtacctgggaccagggccatgcaccattgctttagagaacacctgctccgacccaggtcctgcaccagggatttcccaccagctgaatcagacacagttgctgtcctcagggagcttacagtcacgggtcaataggatactgcagctaggatagcagtccacacagggccagggcggggcactaaggagatgacagtcatttctcctagagagtcatagatgaagtcatatgtcaggtgagtctcgacagatgaaaggaagagtgtctgccaggtggacaagaggcaacagcttgagctcaggaggtgagtcagtgggtgatgccgagagaggcattctcttgatcaattcaagtgaaaagcccaaagctgtttgatggctgagaggatgtgtaggtcaacttaaggagaagagcctaaaacagctctgacaagtaaaaaaaaaaaaaaggcagaagacaagacaggcctatttttgcatgttataaaacaccgagaaaaaaatatcaggatgattgtcatggtcttctttacattttcctgtatttttcaatttaaaataattgttggtgttacctgctgcccacgcactcctccgtctgcagggggcgcaccggccgccaccgctcactccttcaggatgatgggcggggcctcctgggccggtgtggactgacgagtggctggccgccctgtccatcacgacatcccgcccccgcgctacgtcacatgacgcagcccatcatggcggcgggagcgcggcttcccaggcccgccgctccgcagggctgctggcgttgctgctgttgagaggcggcggcggcggcgcaggcgggcgggaaggatggtgtttctgcgactggagcggcaggtgcggaccgggagccggaccgaggtttggcagaagcaacgtgtgctcgggagcaaccggcgcgggtgccactgaggcagcggagggaggcaggatcgactgacgggcgaacggacggacggacggaaggcgactcgagggccggccccggagccgcgccgtgggcgagatgccggggccgccggcgttgcggcggaggctgctgctgctgctgctggtcctcctgatcgccggcagtgctggggccgcgccacttccgcaaacaggtgcaggtgagcgggcccgcggcggggacggggctgcggggtcttcggcgtggaggggagggggcggcagggccgggccggcctcggcgccgaggaatcggagggcctgccgggggcgggaagcccagggaggcgagtgattagggagatttctgccgcaggggcgtgggatttgggggggcgggagcgaggcgacgtcgttggggctggggagggcggcgggcgaggtagcagccaccgacccctcccgggataggctgcggtgccggccctggacctgttgccttaagatcctcagcttatatcgcttcctggcagttcagcttccctttccagatgtcacctgcctcttgtgcttttttttcgcatctcataagaaccgtttcttagccctaatcatacttaaatgcaaatgacttggcgagctgtgcggagtttgttttcgctccttgcaacttattctgaagttgtaaattgattttagacgctgtgctttttattcggaatgtatctccggggatgagaaggaaacaactataaatatttctattttaggaagccagtgattagagtagcaggcgttgaataactattgacaaactggcttaagggtgatggaagtttctattttagctaacgtcagtgtatgattttcttttctccccccccgcccattttctcaacatcgtttttatttggggtttattttcctaaataaaacttcaacccaagaaaacatcccaagttgggtcatttttctaaaaaggaaaaaaaaatctaggctaacttggcgttattgactgccgccattacctttgaaatggggaaagattgaaatttcatacattcatagaatgttagagt

SEQ ID NO: 49156 - DNA, 832 bp, Homo sapiens
attgccaaactaagattacagttcagttcttttccccagatcatagttatcagatcattcttctcttagaaaacatggatgcgccttttctaagattctcaggattcacatcataaacggggactagaaataaagaaagatcttgtatatgtgaacgaatttctctaagctcacactttcttattaatattaggatagtggtgagacaaggaaacccagttctattgttctgcagcatattaggtcacagagtacagaggaagcttttagcagctccagataaaggacctcacggaagcccgtgaagccagtgggactcagctactgattaaacagcagcttgtgaaaccgagcctctcgttttagattaaacaaacagacttgtattttgaaaaagatttctaaagtaaaggaaatgctttctaaagtatgaattactgtgtttaacagcctctgggaaaattattttcaacaggctttctatgcaaattattttaggatttatagctataaatcttgaaatttgattttggttgggattgctgcaattacttttacttggtgatattttggggttaactaaatatgctcatttgaacagtaataggaagtccgtctgcagttttgtagctgattagcactgaagttatcaaatccttacagttttgctgataatcagtgtgctgagtgttcctgcaaattctcttaaaaatttagagtccttgggccctctctggcccctgtgtattgtgtcacttagataacagctgtagatataattttaaaaagacactgtcatataaataagggacgtccagggttctgaaacagt

SEQ ID NO: 49157 - DNA, 4455 bp, Homo sapiens
gtttttctcacgattagactgggggtgtgggtttctgggaggaagaccacagagttaaagtgccattctcatcacatcacatcaagggtgtgtgcacacaacatcacacagcatgacttgtcacttgatcacctggctgagtagtgtttgtcagctttcaccctgtaaagttactctgtcctcccctccccatggtgtacgagtgcagggtcaacacttaatgagtggcaagctgtgctccacctctttgcaaggaagtgtctgtagacattctttggagttctgttgaagagactcgcgtattctcttcttttctttttttcttcctcttccccttccctttccttgacaggtcttgctctgtagtccaaactggagtgcagtagcacagtcatgactcactgcagccttgaactcccgggcccatgcgatcctctgtttatttctttattcaagcatttacttatgtcagtgtggatgcatggatatttattttatacttcgagttgattccacagtgttgtttatttgttcttacattgtaccagctttggccatcgagagctctttcagttagctcctgggtgccccgctgacatatcctcattttttttttaagcatttccttattttctggcatttcaagaagctacaggttcatcttgtatattccctgccccagtcctagaatcagccttttcttcaaggagctctggttcctctgattggagagtgatatgagaaaccaagatctgggccaggcgcagtggctcatgcctgtaatcccagcactttgggaggccgaggtgggcggatcacttgaggtcaggagttcaagactagcctgaccaacgtggtaaaacctcgtctctactaacaatacaaaaattagccaggtgtggtggtgtgcgcctgtaatcccagctactcgggaggttgaggcaggagaatcacttgaacccaggagatggaagttgcaatgagccgagatcggaccactgcactccagcctgggtgacagagtgagattgtctcaaaaaaaaccaaacaaacaaaaaaaacaagatctgggtgctgggtttgctcattgcttctgggcatttttaatagatttttgatcctctgcttcctgtacctaatctttggggttgtggggaggggaggagagagcaactttgggacctcttagagacagatgagctggaaggactctgtccatgttttctccctgtcacttaaactattaaataccaccataaacattctaaataccatgtttgtggtactaactgcattataatgatattggcagaatcttatttttctttttagagtaataaatatatgaaaaatagattcgatttacctcctccaagagcagcttaatctctgagaatatgaacgaaacctctttggcttaagaatttagttagagaggattattttggggggtctttcagtgttggaattgctgaaaaggtttataggcaactccttgaattggtaaaagttcagatgaaatttctactggcgagtctcttgaagagcatggggctgtagacttgctttgatctgtttactgagctttgctttgctttttttttctttttattatagaaaatttcaaacatacagaaaaatagagtgaagtggtatagtggaccctcgtgttcccgtcacccagcatccacagtattttcattcatgattcatcttgtttcacctttacccttccctctgccctagcctttgttgtattgatgtaaatctcagtgacggatcagtgcagctgaaaatgcttcaggaagaagtaagtgtgtttttataaaacaggatggcttgcgtgcagatcacctaggtatttgtagaaatgcagattttggccgggcgcagtggctcatgcctgtaatcccaacactttgggaaaccgaggcaggcagatcatgaggtcaggagatcgagaccgtcctggctaacatggtgaaaccgcgtctctactaaaaatacaaaaaattagccaggtgtggtggcgggtgcctgtagtcccagctactcaggaggctgaggcaagataatcgcttgaacctgggaggcggaggttgcagtgaaccaagatagtgccactgcactcccgcctgggtgacagagtgagaatccatctcaaaaaaaaaaaaaaaaaaagaaatgcagatttctgggtcccaaactaaccagctgaatcaaaatgctgaaggctgggctggaatcctgcatttataatagttttctggttatttctcccctcatcccctcactgccacaacacacatatttcatcttctactacgtacaaaataataccagttatttactggaaatctgttgacttgtgtaactagtgagaatcaaggaaaggaggaaaacattccatttgattaaaaacttgagattttaaaatgaatgccaacacctgaaatctgaagagctcactcatcctgagcaccacgtgtaaatatctccctgtgagtacatatgccatcaccacaaaggaattcaagcactccggggcagaacacagctaaagcttgaaataagtatttttttatttttttaaaaacttcactccttctctagatgtctgtatgaataatagcttctttacattttacgaatatcatgtataaatatcagggaaaacagcaggtagtccgacaatcagatgctggtaccgtgagctgagaatcttggtgccagtcctggaccaccaggcctcagctcactgcagctagagtcagggtggcaggtgactcgtagggaaattttgagagcaggtataaaaccgtgacattcttaattcccttggtgataaatgggtgtgctgtaacgtgagaacccctgattcgtaatctatacggtaacttgcagggtgttttgttttgctaggataatatgttgttagcatcttgcttttaaaaagtttatttttctaagctaactcatttaggtgtagcctaggatttgtagcctatttcatattttttgataggtacttttttttaaaagctgtttgttgttatattttgatatatttgctgtggatgattgatctgtacaaaattttcttatgatgagctaaaaaaagtaaactgtctctgaagctgctacattataatgattgtataatcatcagtcgggtttgatgaagaacaccataggctcttgtattagtacagactattttttgacaacatgtatgccttgggtgggagaaaagaatttagttacatctatgatagcggtttttgagagaggagctgctcttatttaaaagtgaaaccactataattttaaaaggcttatttttttttcccccttcaggctcatattctcagtccatccccaaactttgttttccctgtttttgctagactgaggaagggacttgagtttgacatggtataattgcaacctttaattataggaagtaaatccccaagacatcttggacttagaagataaaggaggagaagtttgcaatcattttgcacatttaaaatatctgttttaaccaactagtaattataaaattttgtagttgcagctttttactgcaaaactaaagtgttgtgatctattggtggcctctcagattagccactaaatttaagtttaaagtatttttctcatcgcagattcttctcagaaccctcaataaattaaacttgtgcccctttcaagaggaaaaaatatcctgtccccattctttcctggcaatttgcccctgtagaagggttccctatctaggcagcagcggttgcttccccggatccagcctgtcagttactgagcagagccccacttgactcttacctcagactgttattaaaatgcaacaccctgacactgattgctggtaaggcactgaaaaataaccaacttaccaaaatagccccctgggaacactctcccagaggcctgccacagcagtacaattcgggaatctgtcatctaacttagttttctgtattgaaaagaaaattcactttaataaagagctgatcaccaacattaaccgtataggcacccggtagacttagaaaatgttgggaccgtaaatcctagtctgtagaattttagagttgaaatgccagttttacagatgcagtcagtctcacaccgccagttaggggcaggtccgattcaagagtgagggtcctaaggtccaggccacccgttcaccctggtgaaccgcattgtgctttaaagaacctctgtagtgcgatgcgcatgcacacacggagacccaactccagccacttctctggatattgatttctgtatattctctgaaagtactggggtgaaatgttaaactacgaatcataagattgcctcttgaagtactaaagaaaatgccatattgaaaattaggaaaccaagcctggcgtggtggctcactcctgtaatcccagcact

SEQ ID NO: 49158 - DNA, 4557 bp, Homo sapiens
gaacaaaccctgccaccacagccctcagaaggagcccatcctgctgccaccttgatcttggacttggagcttccaaaactagagaataaattttggttatttgagtcacccagtttgtgatacttgattatgacagccctagcacgttaatggccatatcaagagtaggcaagaatatggattataaattatgatatctgctttcttccatttaaacttttaaattcatttaataaatgaaagcttcaagcatgcaagacatagatactgtaatgaattcccacacagcttccacccagcctgaattagctgcagcccatctttcttcatgctgcccccgtccactttctccacgccctcgtgctgtttggaagcaaattccagacatcattaagtaggtcactatctccaaaagataaggactacatttaaaaacaagcacatgaccattatcactccaaggagaaatgaattacattttcttaatatggtcagttagtgttcagatttccaatagcctgaaatgtcatagtttttaaaataggttgaatcatgattcaaataacatccatatgttggaattggtgggtaggtcgtttaagtcttttaatgtttgccactctccctctcttcatctctttcttttttacattttcctaggcttttctccccaagtgtttttcacagcctgtgttttgctgattacattcttgtggtggtatttcacatgtctcgctattcataatgtttcctatacattgacatttggatctaggtggttgattagattcaggtttgatattgtttttgtttgcttgttttgggcagtactgttgcataggtggtgatgtgtttttctgtcaggagataatgtctgtctttctgtgttatcagctattgatataaatttcatgtgtcataaaatgttattttggattaaaaatacgatttaaaaacgtgaattcttaattattcttagctttcaggccataccaaaacaaaaactgtgggcaggatttcacccagtggccacagtttcctgatccctattacccgaagagagcagctgcttagaccacaggggtaccaaagttcaatgttacaaaactgtgatacattgttttctaaggtagttgtgacaccagcagtgaataagcagctctacttcctgaaccgaggtctttacattagcagttcactttaaaagaaaccagggctctttggggaaatgattgataggaggtttgaaacagaaactataaaagatgagcctggaacaacccagggaacaagaactccacccaggcctgccgggaccctgtgggagggcttgggagcaaaccgctttagaggccctgcttgccaaagacaggacaatgggagtgtcaatcagaacaaccacaacggatggaagcctgtgggtgctttaaatccattagctcatgatgataccacaaaacagtgacagcagctctctgaactggtcactgccagaggatgctagtgaaccaacttttttttttttgagacggagtctcactctgtcgcccaggctggagtgcagtggcgcaattttggctcactgcaacctctgcctcctgggttcaagcaattcccctgcctcagcctcccgagtagctgggaccacaggcgcgcggcaccacgcctggctaattttttgtattttagtagagacgggatttcaccatgttggtcaggatggtctcaatctcctgaccttgcggtcccccgaccttggcctcccaaagtgctgagattacaggcgtgagccaccgcacccaaccaccaactcattttttaaaaactggcaaagagaaagattgaagtatctagtctgccttttccttatgacttgaaccactgggtaaccaaatagtaaatgtgaggaaatttctctttataaaagcatatccactagtgactgaacaaggaatgacaacattaggatatccagcattttgtaatccctaatggatctaaatattgatcatcatttctttttatctgtggcctttaattttttttttaattgaatcccaaaatggcttcacagacaactctttagttaattacatatgggtccagtttcatctgaggttctagagatcgtgaatcagataattgggctggagttataatggttgaattaataggtggtattcctggcttaccttgagtcattactgagaaattgcattctccaaattacctgtctctaaaacagataatatgtacctacctcttagagtttctcaagttttctgcttattgaatcaagttctaggtagctattaaaatgctttgaaaactattaaatgaaaactcacagaatgtgctgtagacatgccgggtgttttttaatcagtgtcttggggaaagcatacgtattccgccagacctcatgtggtgcttgctctcaatttgtgatgggaaaagctgcctaaatgtatggtgatgcctgttcttgatgttgtttggtagatgactggctcgacgtatgcccttctcagtgctgtaggctgcatgttaaagctgcctttctttatcaggttctaacagctgcagtcaggaactgtgtcagggactggtttctagtttgaccacggcggtatagggattttatttgtggttcctcaagtctagaatttacttcctctctgtggtttctgcaaacccatctcaccttccagcctatgtttgatttcctcattttatggaagtttttttttttcattgctaaatagagtttttttttatagcacagtgcttttggattcatcaaaagaaaaatactttaaagttttaaaaaggggtaactaaaaatgtctacttgaagctacctagtcaatttctgaggcagtagttttaatgggactgttagatactgaggttgagtaagtgtggttcacactgaggaaatctaagggagagtaggtgccctgcagaccctagcagaagtaagtgtagcagagagctagggcaaagcgtggcatagttcattggtcttaacctggttatactcttcatacctatctagtgactcacagaggacactttcatgaatcagataattaggctggcattcatacagtccttatccagttctgtaataaataagtagtttgtgatgcttaaaaaaacaaaacaaaaactctgggtgcaagagaggaaaaagtaagtcaagatcagctatgtggagtttgaggaagtataaactaccctaattaatgacagacttgggttcaaaggacagtgggctgtttttaagtgttaaaggttaaccacatagaggcagagcagtggggtttcaaggaaagcgagggagcttgcacccagcacacctaaactcagtctggcctgccactgtcccacctgggttcatgggcatatcagtttcttcatctgtgacgtggagctggtcgtattacctcagaggtattgtgacagccaaatgaaataatgctgtattttatcaaatgtcagatgaggttgatgataagtcacacccttagttttgtaccattaaaaagaagaaatgctgccagttaagctaacttgaagtgtgagatgcacctgaaattcagagatgcagtggacaaactgtgtgttattttttctttttattctcccttacaatccaaatgcgtctttaaaaacaatcaataaaaaacagtgtacgtgaaagcgctttgctttcctcaggagtcaaatttaatttttattatgtgcatcgggagtgaagcacagttcttcagaaataattccagcagtctggcgcagtggctcatgcctgtaatcccagcgctttgggaggctgaagtgggtggcgcacttgagcacaggagttcaagaccagcctggacaacatagtgagactcccatctctcaatagaaaaaaaaaaaaaagaagaagaaattccagtggggaagcacaggcttcttgtctggatgagtgaacagctcactgcaaggaggaagagaagaaaatcatccttcttggtcttcataagaattggctctcagtgcctcaagctcctcacttagtttaggttttccaaatggacacaagtgtgtctgtggttagggagttcttgttctcattgaaagttgacttcctccagattggtttcaagaggaagcaccgagttacctcctgtgttaaatgtatgggctttcctctgttttagactttgttgatttagaactcggagattctcaacaccccttggttaactgtattattcttaagcacagactgagcccgcatgtaacaatggtgtttcagcattgctttcacaaagggaccttttgttattgaaaaagaacttagttctgtttgcagttcattttagacttccctgatcttcactgaagcttattttagattcaagaatgtgttttgctcacctaggagtttgggttagtttttcctctcttcaagtaccctagcttcatttaagaaaaaaataacctcattaatttatctctctgccttccttttggtgcatttgaacacttaattagccatagatgagg

SEQ ID NO: 49159 - DNA, 625 bp, Homo sapiens
atttcattagcagaagcgggggtgttgcgctgtctatatcattctttcatcctttcaataaaattattgaagattatgtttttccccagaatcatcctattaaacatataaatgactttaatttttcagttctaaagctatttacttgttgactttttacacagtactgaaattaattaattgctcctagtgtcctgcagaaaagctatataaagccctccctggccattcatgtcagcattgaggagcgggcttgcgaggaacctatttacaggtgtttgaatgactcattctaccagggcgttgcaggtcacttgctctgctgatggagagcttggtgtagcgctctgctgccatctagtgtcctaagttttccttcgggagttttttggggggttttgggaagctgagaaatttttaaaacttggataaaggaatgtttattttaattcagaatacattgctattcttggtgagcttttttctttaaataatggaccaaaataatcatgtctattcactaagcaccattaaagtacaaataaatcagataatatgtctgttttggatagaatgaatcaaattttagtacttgcttaacataaacatttttactctaattaaa

SEQ ID NO: 49160 - DNA, 652 bp, Homo sapiens
gttggaatttagaatatttattggttgacttaaagtaggacttcctctgttggttgaaaatagaacaacctacatgtccaattaaagttcttagctccatttggaaactaatctagtaaggcacccacagtgaagttgtatttctacctattgtttaagaagagccttaacctggagtctgaggagcctgtgtctctgaagtcgtgcatgtgacttttggaaagccatgtaaacagcaggcgctgccagcttgctgctgtgccatcccacttgccttgctggcctggagcccaggacttcctgtcccctgcctgccagtctcctgagcagcctgtccgtgagatgccaccaggtcgctgtgatgagctgagccagggggttctcatgggcggcctgcctcctcgcagtgactcatggagctggagacctggagggggtagccttgcggagtacctgggtgaccattgtgtacaaaagaacctctataggatttgccaggttgtagcattacagttactttctgctgtgcaacactggggttagtgtgtagcgaacttccacagcctgcagagttcaatgacaaggtgagaggtagagaaatgcatttaaaatccagtgacaaggtgagagacagagaaatacatttaaaatc

SEQ ID NO: 49161 - DNA, 1205 bp, Homo sapiens
gaggcgggcgggggtggctgtcttgggggacgagggtggggggcagtagggggaggatggggagaggcgggcgggggaggttttctatcttgggggcggggcggaagctgggggcggggctgcgcggccacctggtccgggagccccaggcgccggcctcccgcccgcccgcccgcaggtgccgccactgctgcccagcgcccgccgggacacccggaccccggccccgccccggccccgccccgagggctcatttgcatgcgtccgcggcccctcccggggcggctaaagcgacgtgtccttgtcccccgtgggcagcctcggcgcgtgtggccgcggatccccaggtaacccgggagctgggaactcgggtggggccgcggggaggggacccaggggcaggacctggcggtggggttgtgggggttgtgggggctgtggggaaacccgggtgggggacttctggtctgtctggaggctccacggggcccatccacgtggtgggattgggggctgccgccaggccctggccattgccgacctctgacctccacggctgccccatgtccgcagcggttctggccccagtgctgtcccatgtccgcagcggttctggccccagtgctgtccctgcacgtgtcacgtccagcggggcaggacagtgagagcctggtggctggagtcactgcccgcccacgggatgaagtcagtgccgcctccggcagaggcgccccctaagctagggtgggggacgcattctaggcaaagtgtcaaaggtcaccgagctcaggaggcactctgggggcagtgaggggcatgagccagaggaagatctaggggtcaggatgagtcatcctgggggaagggggacgcagggacagggacagattccagaggtctgtttgaggtaaagcaagggcgtgggtgtgtgtggggtcagcccagggctaagcgtgtgaacagaaggacctccagtcgcagagcgccaacccctgcccctggtaccattgctgtcagcaaggaggaggctgccagggacggcaccccagcgggtcccctgcccatgtggggtgaccacagagtgtcctgtgttctggatttcagctccaagggcctcaccttcctgccgccacctcctaggacagccagtccagggccatgaagaccaagaaccggcccccacggcgccgggccccggtgcagga

SEQ ID NO: 49162 - DNA, 1476 bp, Homo sapiens
accgggcaggaggtgtcctgagtcagcctggcgttcagcccagtgctgtgcacttgggtgacaggtggggcccctgcactgccaccagtagcatatgtcggagctctgggccctgaccatctgccaaagctaatcttacgacaagcagatttgctcccatcaatacccagggagagggataggcaggccccttgctgcgtgattctcgaaaacaaccaggatcccgcgatccgcttctcctatggctccagtccaaaggctggaatgggggcgtcacctgcaccaggcaacttcgctagcctgtgggcgttccagggcaggggacgggggcggcaccttccaggtgtgcaggcgagatgacaagtgcggtccctccttcctccctccccgcgagcaaacagcctgggggtggtggggaaggcggcgtgcccagcccttcatcgccccattctttcccacggccctggccgccgctgcagctggggcgccactctgcactcacctgggcccgcgccgggcggggcgaagtcgcggtggtaggtcctcggcgtccgggaggagcggaccggccctcccggggaccgggcaagagggtgggccggaagcggcatcaggccccgtgcccattggccagcctcgccaggacgctgcgacctgggacgtgcgattggctgcggtgcgccgcgtcggtgctggcttcgaggtcgcgcgcccgcccacttccggggtcgcgccaggtcaggagtccagagtcggctgaagcgagttgccgcgttctctctggcggcgcgacaccggcccgtggaccgcccggccgccctccaggacccggtctgcaggagcggagagggcggtgtggacaccgcctgcaggcgaggagaaggggtggcggagagggtacctgggtgcgtggctgtgcggcgtcaggaggagcagggtgtgggcgcccggcctggggcgtggagaggacgcagggaacaggtgtcttcctggtatccatcgaactgaaacgtagcccttgagcacacactacacttaaagctttactctttcgaggaggagtcctggaagcatatgtgattttgtgactatagcatggtgtggtgtcagtaacaggccctggattgctcaaactctattgtcagtgacaaaacccagtgtaagctggcctaatatattaatagtaatatgcgagtcctcccggggtggcgggcactgacgtaagtgctttacttgggtcttctcatttcatcctcccagcaacccaaagagctggcggcgtcattcccattttacaaatgcgaacacgggctcagagatggagcgactcacgttgtaagcgatggaactgggatttgaaaacactgtatcccgcctggcagaaaactggcaaggttaggatggagaaaggagaaaaaagaaagatgtcggccaggtgcggcggttcatacctgtaatcccagcactttgggaggc

SEQ ID NO: 49163 - DNA, 7178 bp, Homo sapiens
agcctgggtgacagagcaagagagcccccccagcaccccctacaaattttttttttaaaaattaaaaaggcgcggttcgagaagagctgtagtcgtcccagagctacagtgcaggtgatatcaaaatgcaggtgagaaaactggagacagaatacagtaacggatacaggtgcccctgaaaaggtgcagaggcgctaaggacgcaagcaatcctgaacgttccaatcgttcgttttaaagttgtcctggccaacccgtgaagccttgtatgaggaaatgtttcaacgagggcgcctgacgcagtccccgaggccagaaaacacccaggtttagatacgggctctgacccgcacctgccacagccaaatccctcccccttctgagcccgatcccgtgttgtcctccaggggtaagcaaaacacctggcagggctgcctgaagattagggaaactgaggagacgcggcaggtgcccagtatttatagttttgtccccaaacgggggagttatttgtaagcactggctactacccccgtcaatcacctaattgtccaaaaaaaggcaaacggagggaatgcgccgcagctgagcaccgcgcaggccgcagctgaggtgcacacccgggtgtgccctttgtattgctggaagcgctggcgatcataggggcagagggctggcgttggggcggcctgggacccacccggccccgccccctctcaggccccgccctccccctcctccaccggtagggggacctcggccggcctgggagatcggggcgtagggggaggtgggggtgcatccgcgagccctaaaggtcatgaccctatggggcgtctctgggtcgtcgtgggggatgggcgggggggggggtctccccgccacgggaggtctagagagcagcggcggcggggcggggcggagtgcagaggcgccgccggcggggcggcttcgggagggcgcggcccctttaagacgccccgccggccccgcccccgagccccgcctcccgccgcccacgtgaccccggtcttgtgactgggcccgggagggcgggggaagcccgcggctcgcgcccgccccgccccgccccgcgtctgcctcagaggggcccgagccacccggtccgccgcgtccccgccgccgccgccgcgtcccccgccggggccgaccgagccgagccgggccggagcggcgggcgcggccgggccgccatggaccacaagccgctgctgcaggagcggccgcccgcctacaacctggaggccggccagggcgactacgcgtgcggcccgcacggctacggcgccatccccgccgcgcccccgccgccgccctacccctacctcgtcacaggtgggcccgtaaccaactttccccgccggcggcttccgaggtggcaagcccggtcgggggacgtgggtccggaggcgggtggggcccgcccgggggtccttcctggagctggaggtccccgggctggcttcgggacccggcgccgccgagggccagcctcccccccggggctctagtcctcgggcccgtcgtaacccggcggggccggatccctgccccagatgaactttgtgtcacgaggcgctcgctgttggcagattagcgccgaatcaggcccgcggtggccgtcccgagggtggaaaagaccgggggcttttttagcggggtggaggttgaggggacaggatgagtagtccccgtggcggtccgatttctcctccctgcaccctaatgacctgctttcccgcccacagggatacccacccaccatcccagggtctacaacatccacagccggaccgtcacccgctatcctgccaactctatcgtggtcgtaggaggctgtcctgtctgcaggtgagtgggtctgcagcctggggactggccctggaagctctgaggacccccgccctaacccccaggacctcacagctctgcttgtgggagtgggtccggcttgacttggatcttgaccagagccctttatgggagggacagacaggctgcccgaatgcggtgtgggagagtgcgggtccgctcacccttggctctgaacacattttgtgggggcaaaagggtggattccttttcctagatcttggggcattgcaccccaagtgattgggatgtagaaatggtaacaacgggactcgtggtcctttcgtctttgttctgggacttgcaaggaatcaggtgtctgctttttccttcactttccgcaagtttactctgcagttgatcgtcgaaggtggtggaaggtttcattttcccggaaggggcatttggaagtaagtgcaccagcaggacagacctcagtgggagaagcgacggccgtaagagctgctttatccaaagttggcttgaaacgctcttccacgagctggaccaggatggaaaccccgtgtttctttgaggcaggagttatttttttcatatcctcgcattggacctgcacacgctttttggtttttatagggccccgaggtgcagctagaggcttgttttgtggaggttttgaggattcacatttaaataaggattaattaaatataaacccttggcagctgggggtgttcagattgcttagaaagtaggggcagagttggccgggacagggttttcagctgtgtctcggaggaggaagttgaagccactgagatggaattaagaaaccctggtttggacttagacttgatttcaaaagtgtgtgtgtaaggcctagagtggagtcacggggaagtgagtgatttcagagccttagcaggcaacttcctgggaaggaagggcaacctagaggtggggacaagaggctgggacctcgggggcaggttgtggctgcttgcctgcacagggaccccgtgacaaaccctaactgggacgtcagtttgacacagttggtcaccacccagcagaaacattagcctttggagtgaaggtggagggagggcagggtggggcgctggctgccttcgggacatagttctctcccggagctgcaccgggttggggggctggcagagctgtgtgagtgtgaaggcacatggaggggactcagaacatggaggagcagagggtctgcctgcgtgtcattgtccatgccctgccatcccggtgtccagcctgccggaggagccgggttccggtcctggtcctgccaggaacagcggggcttgtttccccacctgggacgtgggggtgtctggtgaggtgtctctgaagctcttagctcttctctgcccaaacccctgaacttggagaggtgagagaccagcggcagcgagggatgggccagatatcccagggctggggggcgccgaggtggtggcgcagttgctgtcggtatgggggcactggccctgccacttccccttccctaggtgggaactgtgtccctgcggaggcccatggcttccgctaacctggaggtgctctccagttatgcagaacctggagcggggtcagactgtgctctgctgggaaggatcttgggctcggccctcagaggctgtaggggtgtggggtccttggttacttaatcactgctctctgcctctgggcagctgcaccaggcagggtggaggctgggtcctctctggacaaggttggggggtccttagtcctttaagttgggaccagagcactcttggatcctgcggcgaccccttgggttgcagccaggccctcccagcacacacgtccctgcgctctgcccgtggtgccttggatgctggagagtggctctggctccccgaggctttgcctctgcagctgcattgggcatgggatgggcccctgtgccctgtggcagccagagggcgagcagggggctgggtgctctgctgctggcgtgggtggggtgtgtggtccctgggccactcctctctgcgaggagagtggagacggttccctgaacacacaacacacacgtctggccgctgcctggcgtcttggcccgggagacaggataccactcacatgaccacacttcctcctgccccaggtccagcccgccgggctctgtccccctccctgcctggtggcatggcaggaatttgcccaagtcacacatctgttagtccttctgagtgaggcttggccagagaagcccgtgtcccttgtggctctgctgccctggccaggccttcgctgaagctgcctgactccatcttccctttctagccgtttatgaggaagcatttccgcagcctggcggcggatatgtccctgctcctcccaccctcctgcttcacccctgccctgccctgccctgccctgccttgccctgcccaaggcctgggcctccctgaagccaggttctcccttgcccagggaggccagtcattctttgctgggggtgtggttgtacctaggtgcaggatgaggtagctgcgctgggaggctctcctgggctggagcagagcctgcgtcctgcaagcggggaaggcaggagtggggaaggcccctggcctgcaccaggcccccatgagtactggctgggctgtcactgggtatttagttttgggggtgaccagagagagaggaaatcctggaaaggatttcacttttcctagggaaggtgaaaagaacagctgtggagggcggatgtcgctcagaggtccagggtgcggctcagtggccagcgtggaggctgccacggcccttggggggcagaggtgggctgtggagggcacggggtggtgactgtggagcccgggaggggctggaggggaaggagcctgtgacagccttgggcttccagacgatggaggtggaggggctgctccctcctaccacctgtgacctggaagccagagctcccctggttgaggaagtggctgagttagctgggatggctctgcccatatgtatggcctgtgggctgtccccgtcctgacagtcttggcctgaggtgtgggggcagcggatgggccggagcttgggcctgggctgcttgctgggcagggctgcagacctcggtgcccaagtgctccctcagtggcctcctgagtctctgaccttgggctcagcccccagctgtgggccaagtggcactgctggggtgggtgtggtggcaggcagagtctccgggcaccttctcaggcctttcttccacaggggaggcgagggctggccctggccattgggtttgctgggaatggccctgggaggtcctggtgaactgtccctaagccaggcagctcccctgtggggagtggacaccctgggacagccagagcctggctggagctgctttggggccacctcgccctgcgctgagcatggcttcaggccctcagccctctgaggaagccctgcgtctccccttttcctggcgaggcctggccttccagcggggtggtggtctggggttgttcctgggcgtggatggtgccttgaggccaccatgtgcgcagagggcagcttggtgccctagggccagccccctgtgacactgcctttgggggctacctgggagggagaactgggacctgcaggatgggtgctcgtgactggggagcccatctgggttcagatcccagccacgcctttcccggctgggagtccctggacacaccctcagcttcagcctcctgtaaagtgcctgtggggacacagggagggcgaggatggccttctccctgggcagctcagagccctgctgccagccccctctgtccttggtgaggcgggagccccgcggcctctactgtcccagggcccagctctgagtggatgacagtggcatgactggccactttcactgcaggactggagtcgccttaagggagtgctcttggaattagtcagttccctaatttcgccagtggccatggtccctccctggccgcgtggcttattgcacaagaatgggggaggggcggctagagagagccggtcaggaccagagcggttgagaaggttgaaacccacctcaccaactcaggtgggctcttccgggtttggaagggaggagaactcgaggctgtggggaccgcaggtgttccggggcaggggttccccttctgccctccagtgctggggacaggactgccctgcagcttggggagtcttgacctagaatctggattgtgtttctcagttcagaagatttggggttttaaaaagtaaatgatgccaacactccttttgaggtctagggcagtactgcagttaaaactttaatatttctgcagcaagacatgaatattcagataaagtaggataaattacgactataaatagccacacaccagttcaggtcacatgttgctgccaggtgagtttgctgtcaagtgacagcgagttctgccttcagcgcctcttggcgtttgaagttgtgggtacggctgtggaatcctggggggtagggaatgctgcccacccttaggctgaccccagagccagaggtgagggccgaactctcctggccagccctcgggccttcgaagcccgttcagagctctcaggcccaagtgctcgttctcccgggccggggttctcaggtctggatcacagccttctgttgctggcagaggcctgagcctcctgggacagctggatctgtccagctcccgggcggcactgcagggaaacaggctcgctctccccagagacccgggggccttggccctcctaccctctctttaagcggtgtggaggtgggcaggagggtgggggttgaatggaccagggatagggaggctgccttaggaggtgccggagtgggtccctggactgaggggctcaggccagggtggcacaaacggcccagccctgtgctctggctgaggatgggatgggtctggacagaaattccgtgggttggaaggagggtgtttccctgtgcctgggaggccgtggggtcagcacattaggtttggcccattgtgctgcttgcagccccggggctgggaatcaaggtgctgggaagagaggcgccggggcctgggtgggctgggctggcgctgctggaaatcctagcactcaggtgggccggcgccctggcccgtggcagtgggagtgcagcaagagtgagcagccttcctgcacttctcagctctgacagagtaggtgggttttgggtctggatggagaattaggaagcaggagggcgctgctgctcttggacttgggtcccaggcgcgagcagcagctgcaggtgg

SEQ ID NO: 49164 - DNA, 1014 bp, Homo sapiens
tcttatcaggaaagcgtactgatgtggaggccaagaagctgctggctgagatttcagaactgggtttctaacctgccgtgggccttggacagcggctgccattcttctgtgcctccctttctccatttcacgaggccccgctatccctctacctccccaggaggtcccagcacaggcactgctcaggaagcaccaccgtgaggtgcgaagggtgtgaaggtacgaaagacaggagggcaccacaggctggcggcaccactcccctcgcaggccagccagaagccaggcagcagtgtggaggctcatcctgcctctctggctggtgcccgaccccagctcttgagccccccaagtcaccgcaacgcccaggccttgtgtttttgccgaagctcgtgcctcagagcctggctccgacgctttcctcctagaagcctcccctgatgcgtcccaggaaccctggcctctccccttgtcctcaccccatgcatcgagcgctccctggactccacccctgcgtgggtctcattcctctttgtgtcctgagggcttggctctaggccgcccagtagaggccggctggatgaatgctgatgggacggtctcatctctgtccacaaaacccctcccccacagccataccctcactgccatgtgactgtgttgacagaagtctgctggcctcagaggtctgcggcccaggaaatctcagctgccatcagtgataaacatgacctccctgtgggcgtcacctccacccctgtgctggatgggccttctcatcgatttcagtgatcatgaagttaatcagcagtcagcactcaaacacgtgcagaatcaatgacaactgaaatgattagaatccgcataaggagggcattctcatgaggtatctggggcttttgaatgttcttggatgaaaccagaaatgaaaggctgctaaaatgaaagcctgaaagccttctagctttttttttttggtatatatatatatatatattttaagtggagacggga

SEQ ID NO: 49165 - DNA, 1233 bp, Homo sapiens
accaatgaaatagaaaacaaagacacaatggagagacttgaacaactggttcatgaataatcaagaaaaatatatattctggccaggcgcagtggctcacatctgtaatcccagcactttgggaggctgaggtggcctgatcacttgaggtcaagagttcaagaccagcctgggcaacatgacaaaaccccatctctactaaaaatacaaaacttagccgggcatggtggtgggcacctataaccccagctactcaggaggatgcatcacgagaatcgcttgaacccgggaagcagaggttgcagtgagccgagattgcaccactgcacttcagcctgggcaacagagtgagactctgcctccacaaaaaaaaaaaaaaaaagaaagaaagaaaagaaaaatgttatatattcttttattacttactttatgagaagaatgtcaatgaagaaaattgtcactgtttttaaattctgaaatatttgcgaatgtgtgaagtagaaagagagaggcatccttctagtctttgatacagaagccacaaggcacatcatctcatttcatctaatgacctggaaggcgtggctgtcacctccatggtgagtaaataacccactgccgaaggtgaagtgttgcccggggtcacacaagttaacagcaggaatgtggcaacgtcaccactcccgagcatctcttaggtgccaggtggcatgctatccagcagtctcaggggaaagtgagatgtggcctggccttactgtcctgggtcaaaggatctttcccggactcgcctgggcggggtgagctctgcaacccaggcagcacccatgtccctaccatccctggaggggtaaccacccccacagtccatgctctgcctagcttggctgcaaaaccccttgctggggacatgtgacccaatgtggttgcccatggaggttatctcttaggcccatgtagaaaaaggtgacagctacgtttacccttagggcctatcagccaccctgaggaaaaacactgcactctgcaacccctgaggaagaagtcacccaggaggctactgaggatgaaatgagacaacagaagtgcccggcacgcggtggacacatccggagacccgtgtttctgtatggaagcacgtggcgcaagggcagggaaatacttctaagacggcacaagagcggagcaatacttctaagaagagccacgcccacgctacgcctctgtgatttc

SEQ ID NO: 49166 - DNA, 1306 bp, Homo sapiens
ggcaggagaattgcttgaacctgggcagcagaggttgcagtgagccgagatcgtgccactgcactccagcctgggtgacagagcaagactctgtctcaataaaataaaataaaataaaataaaataaaataaaataaaataaaaaattaaaaaatacatagatcgctttctcgcagtactgacttattcactaacaaggcatcacttccagcatatggtctaccgtgtgcctatggctttatacggagactgtgaggacccagatcgcctctgcacccaacagcccagctcctcaactccactgtcaggcctctcatttgtccctgtcttttatgggtcagttaagagcttcccaaacaatcctaaaaaccctcaggccaaccccatcgagaaaccatgtgacttgcccgcaccttcccttggtgatgcccccactcctctgcttccccttcctacttcttaactggacatggatgcacttttctttaaatacgcacacactttaccatgattttcctccggttaagccagaaattttaccctttgtacaataaaacatattcaacaagttttttaaatgagagtgctgtgtggggccgttttaaaagcccacctttccctaacccccgacagtgaagtgttctataaacagaagcccagatcccctcggcagcgggcactgcccagggtgtaaccgccctctctgcctgcacaggagagcgattcataccagcagaaccggaaaaatcacagctgaaagcaaccagggaagaggcaagggccaagagagcaatgtaaaggagtcggattttctactaggtgagtcacaggaaacactctggccacagcccgaggccccaggaggcccggctcgcccatcaggaatgtaggtcaaactcccagcgggaagggtgagagcccaggcacccagggcaaaagctcaagttcctaggagaacagggaggctggccagaaaacaaggcctccactcgccctccggcaccagtcccagcccaccctacgactaagcatcaatttccacagaccgcggtgaagtagaaccacagcatgctggcccagatctctcctctgttctggactgggccatcccacgcgtttctcttggggttcacaggatgacaagtggggtttatgtataaagggacagatcgctcacccagttcagttgacacgggggacccagtggcaatctcaccgatcttggccactccatcgtagtaggcttttcctgccaggatcatagctagacacaaaaggtgacacacaaaatcgtcacttagacaag

SEQ ID NO: 49167 - DNA, 1254 bp, Homo sapiens
ttttttctggcacattaatctactttaggatttattgtagagttaaaaatttatagccaggtgctgtggctcacacctgtgatcccagtactttgggaggctgaggcaggaggatcacgaggtcaagagattaagaccgtcctggccaacatggtgaaatcccgtctccactaaaaatacaaaaattagccgggcatggtggcacatgcttgtaatcccagctattcgggaggctgaggcaggagaatcgcttgaactcgggaggcagaggttacagtgagctgagattgcgccactgcactccagcctggcgacaaagtgagactcagtctcaaaaaaaaaaaaaaaaagtacatatatatttatatatatataaaagttatggtttttaccatatacatatccaactttaggaaatgcaatattctatctactgcactattataagactcagaacaaccttaaagtgtaaatgtaaaaagaacaatagcaattagcatttatatacatacttagttaatctatccaattatgttgagacacagtccgtaatgtcatcagcccgttgcgctaagggcagcggagtggagatattctgggacatacccaaggtcaatgttgagtcagcgggaaggcacacagctctggctgggcacttcacttcctcagctctaaattatggtgctttctgattctttggtctcgtctagaactaagaaagaagtgactccacctaaaaacaaggtgtgtagccaggaaactgtcaagttgtaagatggaacatcttagtatgaagatgttaagttgtaaagtactgatcatctgaaaagcaaattagtgcgggaatggaatgcaggattacacaatatttaagcaaaatgtttggtttgcatccacacatgaaatcacaatttttcattaattgttgacttacattgaaaaccatgtaaccttctcggtcttgtaaaatatctttgctatgatgataaagttaaattaacttgaaaattataaaatttagccagaagagataaataatactttcataattttgcctcccttttgtgagcacattaagatattttctactacttattgttttaaggaaagaagcatattagttttttgtttttttttttttaagagtcagcgtctcactctgttgcccacactggagtgcagtggtgtgatcatagctcactgcagcctccacctcctggactcaagccatcctcccacctcagcctcctgagt

SEQ ID NO: 49168 - DNA, 798 bp, Homo sapiens
tacaggcacgagccaccacgcccagcctgccttgtgttctaacgtaactgtggactgcacacctggcagcctcaactatttccaaattctcaccaaggactttacacatttacctacatttctcaatggcttcagcaaaggcacaaccagatggcctgcagaaattctggaaataccttctgaagtatttactccccaggaggtgctaaagtgtcaagagccctttggggagaagccttgttagcaggaagctaagctgtaggcagctcactggctcaccttgtaaaactctgcagctcatgctagaaagaaaaaaaaaaaaagaggcagctcatgctagaaagaaaaaaaaactgcaggtcacagtgatttccttcacaaggacatctaaagcaatgactttgtggccttgtgactaagcaatcttcgagggagagtcagcagtgcacagctctggctttctggaggacaggggcacttgcagaagtcacggggaccactggagggcaagggagcaaaatcccagacctgctgcatttcctgctgctgaaatctccgaaagcacagcaaggcagaagagtaaatgagcagtatacttttccagcgactacacacaatggtgctcctcctcacccagagtccacagtctagccagctcacaccctttcctggggcaggttcatgctgagcgagagtgaggccacaggtttattttcaaaatatcaacagggagcaaccagtatggcaaaaaagataagaggctgggtgtggtggcttaagtttataatcctagcactt

SEQ ID NO: 49169 - DNA, 1198 bp, Homo sapiens
ttggctcttcacctagttattttagctgaagtacatgttatttttaaacccagggacaaaaaaagcaatgctgcctttgtattccagaatctataaagttttatagtagttgtggacacacttgtgaatagaaagggtcccacattttgggggagagctgtagttgaggcaaaggtcggtgctactgcaaggcttgtgaagacctgaattgttaaacagcctacaatgttaagagtcatcaggagtaatgaacaaatccattttaatttaagtttggcactaagaattaaagggcttaggataccaagtgaatcttaacaaagtgaacagaaaaattataaatgggccaagcagcactgttactaagaaaaaaaaatagcaatagcttagtctatatctctatcgattactgcctggcaaggatactctgccaaactggttttaaccagaatgagtttcatttccatccagggaagggcatgcatagttatggttgcacaatacattctaggctaatggtaatatcactcttctacttgtgctgagtcgcataaaaagaagcttggttctaccgcaaaaccttagcggtactggaaaattagtgattagctattctaaataaaatgttggagaacagttccgctggaaccagcacacactattcaccagatttctagctgccctgtttacctcggcatttctactgcctctgtaaagttacagatcataattatgaattaagaataattatgagaaatgaatgatgcaatcttatgacggttttaacttccttagcatatggactttttataactcattttcaaagaattaccagtatggaactatacataaattaactgtgtacatttataataaagtatacattaattcaattatgactagccagataagctgagtggactttaaacttttaaaaattagtttctcttttagtttctttttttttttttctgagacggagtctcgctctgtcacccaggctgtagtgcagtggcgcaatctcggctcactgcaagctccgcctcccgggttcacaccgttctcctgcctcagcctcccgagtagctgagactacagatgcccgccactgcacctggctagttttttgtatttttagagagacggggtttcaccagtgttagccaggatggtctcgatctcctgatctcgtgatcca

SEQ ID NO: 49170 - DNA, 679 bp, Homo sapiens
tcgctaaaaaaaaaaaaaaaaaaaagtctaccttagctgggtgtggtggcgggtgcctgtaatcccagctactaagggaggctgaggcaggagaatcgcttgaacctgggaggcggaggttgcagtaagctgagatcgcgccatttcactccagcctgggcgaacaagagtgaacctccgtttcaaaaaagaagtctacctaactggctagagttcagggaaaggcgcactctcacaccatgcagacaacagcatcatttggtgcatgctttctggagggcattttgcaatgtggagcaaacaggctttaaaatgtacctgccctttgacccagagctcccttctgggaatgtggcttaaggaaaacatcatggatctgcttacagatctgtgcaaagctttgactgcaaccatgcccatggctgagctgtaatagcaaagtactggcaatgatctatgtccaaccacaggggctgatcaataaattatgatgaaaaatggagtcctgtgcagtcatcaaaatgatagagcacagaaaactgacatggggatatgtacggaaaagtatcagaaaaagcgacagcaatagttagtgttatctctggtttgcaggattctgggcacacttatttacacttcttgttctttttgagacagattcttgctgccacccaggctg

SEQ ID NO: 49171 - DNA, 495 bp, Homo sapiens
actgtatggcctctcagaccagaatttcctaggtcttggtttgtcttctgacatgaaggatttcccacagggctccctgccaaggttacatacaccctacagagaaacggcagatcatcagcaggcctggaacaaacgattttgtttgtgtttactttaaaatttttttgcacatacccacaggaatggcaaaaattaaaaggatgggaaatagcagcagctggcaaggatgaagagcaactggaactctcatactctgctggtggaatggcaactggtgcgtcactgtggaaaatcaatcagcagtttctcctaaagcaaaatatttgaatgtctaatactcagccagtctgctcctgtgtctctatccaagagaaatgagggcctatggccatcagacgtgagccagaacattcataaagcacgactcataatatcttggaatagtctgaacataatcccagctgggcacagtggctcacgcctgcaatccca

SEQ ID NO: 49172 - DNA, 3287 bp, Homo sapiens
ggtcccaaaacactaacaaggaaatagtaattaaaacgaacaaacatttagtgagctttccagtttgctttcagacacctggcaatggaaaactatcaggtactggtctttgatctccatttacagtgccttacgtctacaaatacgtataaccaaaatgatgaaatccacactttttccctgccgtttccgttctttgggtaataagacatgcccaagtggttggcatttgtgacgctgcaattcgccttggtacggtccctctaaggagttattactaaaagtctacgtcaggaagaagcgggagaaaaaaagcagggtttaactcagaacacctgactgctggtctcaagttgcaatcgcagctcagactgggaagatacacagggctgttcttggaagaagggcggaaggcagtggtgttctgtatttttgcaccccagtggacatcagactctgcctcaaatttgcaatggcctgccttcctcaattacacagtttttccttcactgacagtcaacagagcagccactacttactttccaggtctgagtctggcagaaagaacgttttatttacacacttggtcagtaccccacacctcatgcagcaacgtcttccgggtcatttaaatagtagcaatctcaatacaaatgtaggaatttctcaaatttcgaatttctcaaatttctaaagatcgccctctatgaaggcaacacacgaatagaagagtttttggtcacagtgactgagcatcaaaaacgctgtgtcaactgtgtctactctccctacctgtaaggcataatttatatgtgacagtatacactttgtgtgttaagataaacggaacggatctcttggatttcaatacataacaaaaatgttcatgttcttctcttactttcattcaacaaaagttaatagactcctctgattttaggaattcagaccttgaaaacccagaaactaaaattttaggtttaaaaaagtctatcaaaatgactaaacttcctgattcaagcaccagggacagaaaaaagataaaacacaccaaccaaccaaccgaccaaccatttatttataaccttaaacatgcctatacatgaacttagagaacgttaaagtttcaagggttcgaagcgcctaggctgaattaaaacaaaagttgttttgtgttctattaatagcagatgattaacagatatcttatttcacctggaattcatttgtaagtatgtaaactaaacaggccactaatcctaagtctctgtctgtgtctggaaaaattctctcctaatacatgcaagttaagagaccggctatcaacgcattccttaaggttaggtcaatttcattaaaacctcggttgttctttgacttcaagaacctcaccaaataacccatatataaaagccaagttcaactgaaaggtgggagaggaagggtctaaggaggagggcgtttcccgggagaacgcccagagctcggctcacctggcgatcctaattacaggggagtttcacccccacattcttgggcgctttcttttcttagaggaaactcgagcttgtgtctttggtcccggagggcttaagcccggcagccaggacagcacgggtcactgattccaagaagttgggaggaggacgtgggccccaccgacgcacaacagacccctccccaacttaagtgcactagttgtaaaatgtgtagctggtcaggggatggggggtggtctccagagctctgagggtcagggaagaggagaagggacggggaggagaagggacaggggaggcggagaagggccaggagaggagggggagacacacggggaaggaggaagaaccaagaggagggggagggggagggggagggagggggatagactggggagaagaagggacaggggaggagggggagacacacgggggagaaggaagaaccaggaggaggggagggacagtgtcgaggggcaggggaggagggagagtgaacggggagcggaggggcagagggagaggtacagcggggcgggaaagagagacagggaagaagcacagggaggaggggagggaaggaggaggaaaagtaggggggaggggatggggagggactgggaggaaggagagggccaggggaggaagaagaggggctgtggagggccaggggaggagtgggagagaccgggagaggtggaaggacgcgggggaggggagctggagggagggaaagtaccttcccgcgtaaagtccccttctgaaccccgaggtggaaagccctgacctccctgagccccgggccctgggcttacccggtaggtgctctccgtgagccggttcacctcctcgggcccccgggacatggctgcggccgccgggcgagcaagcgcgggaggacgcggctgggcctcgtggccgccggactccgggcagcgggagggccggggcgcgactaaggggctctggagggtcggccgccgccgcagccgtcggcccgagagtgcccgcgcgcgtctccgctgcgaaaatgtcaaaacttgcggcagcgccgccctggccttcttcgaggagcagaggagaagcggccggacgccgccagaggaagctgggcgggccgggcggccccacctgaggcgggcggggcagacgggggcggggccgcagggccggaggggcgtggcgtacccacctgaggcggcctggtgagcggggcccggccggggtgggcggggaggaggcggggccaggcagctggaatgggcgtggccagagggaagcgggccccccgagtgggcggggtcaccccacctgtggcggacagggcagcgaggccacggtgcgccccctcgcggctctcccagagctccggcgacgtagggcccgagaccctggagtggggaccggtgtggagtgggctgctcgctttgctgttttgctagggcaagggcagcctgggggtgtttagactgtggtcctggagcccttgtttgcctcgcgtggtgctggccccggggaccccgaggcccacttcctccatgagggcttccttcaagccctgcgttttggggaccaagggaaggggccacattccccagttgtattgatttccctgattgatctcttcttgccccgccgctcactgaccccaaaagttagagggacccgtgggggcatcggccctcctaggtggagaaaacgggctgccacttgcagttttgaaagctcctgatatatcaaaaaattaataaatgccagggtctagttaccgaaatgttagtacttttt

SEQ ID NO: 49173 - DNA, 4053 bp, Homo sapiens
ggccatgctggtcttgaactccagcgatcctcccaccttggcctcccatagtgctgagaatacagacgtaagccactgtccctggccaagattctttttcttctagcaaaggctttcttctgaacacaaaaggagctgagattttggctgtttactcatggcaaaatgacagaaagtcatttagatctttttttttttttttgagacagagtctcgctctgttgcccaggctggagtgcagtggcacgatctcggctcactgcaagctccgcctcccgggttcacgccattctcctgcctcagcctctggagtagctgggactacaggcgcccgccaccacacccagctaatttttttgtgtgtatttttagtagagacggggtttcactgtgttagcccggatggtctcgatctcctgacctcgtgatccgcccgcctcagcctcccaaagtgctgggattacaggcgtgagccactgcgcccggccagaaagtcatttagatcttatttggttttgaaacatttggatattgacactaacaggtgaaatatgtgggcgtgtgcattttcccctcagctctgactgctgtttgcttgttgaatagactcctgagtctagaatcaatggattcttcctcctcataggcacagcagctaggacaaagaggtcatatttttgcctggagatgtttccaggccctgataagcctgacattggctacaacaggaaacccccttcccaattctgagcagctggaggctgtggcctcggttcctgaggactccttgaaacgggacagaaatgcaaagacagtgtcctcatcctggtgggaaaacagtaggtctggggaattcacttcatgtctcagtgataacatcccctgtgacttggagtaagtcacatcacggtcatgtccccagctccctctgtcctggtcaataggagttggagggagcagtgctccagatgaccttgtgggagtggtgagaggccacggttttccttgggggcatttccccaaagatgtggctgccacctaccaggtgtgacttcaggtgagtcggagtagcagccagggctgcctgagtggaggtcgagggaaagtcactgcctgcatcggctgtcccctccttccccttcaaggctgcctttgatctctgctgtcaacagaaattgcagctcatgctgaagttttctggcctggtctttcaccccccacattcagtctggttggtcaagtcacgtgtaatttccacaccccctcaaaggttgtgcaactaccatgcaaatgcatttcaagtttagctacctttttttttttttaaacagagtgaactttctttctttttttatttttgagacagagtctcactctgtcacacaggctggagtgcagtggcatgattttggctctctgcaacctccgcctcctgggttcaagcgattctcctgcctcagcctcctaagtagctgggattacaggcgcctgcctccacacccagctaatttttctgtatttttagtagagacggggtttcaccatattggccagtctggtctcgaactcttgacctcgggtgatccgcccaccttggcctcccaaagtgctgggattataggcatgcaccaccgctcccagccagcagagtaaactttcttgaatgaattttcttactatttaatttatttaattattttattttattttatgatacatgcagtcttactctgttgcccaggctggagtactatggcaccatcataactcccagcggctttgaactcctgggctcaagcgatcctcctgagtagctggaaccacagctgcatgccaccacccctgactttgatttatttctgctggcccatttctctgcctcacaatggtagagaaatgcctgagtcacagataggctaggtgaccagggaagcttggaagaaaccccacaggccacccaagctcccaggctaccatttggagatcgttgcttcggaggaatcccgggtcaggctgctggaatctggactcacacttccgaaacctcagtgttctgatcgatgctttacaagctggctttgcccacctctcccatggaacacccttcctccactggtcttttgaaattattgctgttggtctgattttgctgcctctgctaccagacggtaagcaaaccctgctgtcactttcttgctgtgtgtcctggtaagatgtttctccacattgagcctttccccctgcttattggcaaaatgggaatgagacactgtgagttttacccacatggtatagacagagcctgcagggtactgggtatgggtctggggatctgagatgtcccttcatcagcagcctttatatcagcagccacacctcctctgtagggtttcaccctagcttagctctctgaggaccaggtctcccctggagccacgtccttgtctgccagggtgggttgaggcatgactcactatgaccagagactcacccttgagtcacttggatcaggcagcccaggacggatgtgacgtcatcagcaaatacaagcagtcatagacacaggggcagctctgtttgtcttggagataaactccaccacccaggctgggctttgtggaaaaggtgaaggacaccaggatcataggtattaacttcctatgatgacatgtttgtggagggaccggagaatctcagggtgagaaaatcgctggggattgttctgtagcggaggaaggtgtgtccttggctactgtagggaaaggttgcccttactttgaggttgtgttcttatctcctccatgtctctaacttttataatccaaccagaggatcttctaataaatactctgcctcctattactgtatgtctcagctaaaagacatatcctactggccaggcgtggtggctcacacctgtaatcccacactctgggaggccgaggcgagtggatcacttgaggtcaggcattcgaaaccagcctggctaacatggtgaaactccatctctactaaaaacataaaaattagccaggtgtgggtggtacatgcctgtaatcccagctactcaggaggctgaggcaggagaatctcttgaacccaggaggcggaggttgcagtgagccaggatcgcaccactgtactccagcctgggcgacaagagtgaaactctgtctcataaaaaaaaaaaaaaaaatagacataccctacccggggaaggtaggggcggctttttagccccggagagctcattcaacccctagccctgtgcctgcctccctcgctggatagcaaactgaaaccagtctcccccatgtaaacccagggcccccatggggcctggattttgtcattttcttcggggtcatgtaactcttggttatacaacaagagaggtgatgggatttccttctagggtggtgaaaaggttttgaactagtcagaggtgaggattgtacaacattgtgaatgtactggatctccctgaattgtacattttattttactgatttacttatctatctgtttatttattttttgagacagagtctcactctgtcgcccaggttggagtgcagcggtgtgatcatagctcactgcaacctcaacctcctgggctcaagtgatcctcctgcctcagcctccagagtagctgggaccacaagtgtgcagcactgtgcccagctcattttaaaaatattttgcaaatctgaggtcttgctatgttgcccaggctggtcttaaactcctaggttcaagcgatcctctcacctcagcctctctagtacctaggaccacaggtgcacactactgtgcctggctaattttttgattctttgtagacatgaggtctcactgtgttgcccaagctggtctcaaatgccttgactcaagcaatccttctgccttggtctcccaatgtgctgggattacaggcgtgagccaccttacctggctgaattgtacattttattctctctctctctctctttctatatatatgtgtatatatatatgtatatatgtatatatgtgtatatatatatgtatata

SEQ ID NO: 49174 - DNA, 548 bp, Homo sapiens
aaaataaataaataaatagtgtgctaagtcaatttctccctctccacacctgtccagtcttattcttcctgagtgtgctatatcagagttgtggatggacgaaaggagaggatcgtgacaggcagcagccctggagttccactctcccctgcagggaaggctaaggggcctgccttgcgctacggtttcatagaactggagtccgtcaaaccttcctgagccctagcggtagcctgggagtcaggaggggcaggtgtgtggggagctgcgctgactgcccactgcgtccactagatggcgcgctggctgcacaggtaagcgcgtcgcaccttccctgagtgggtccagctttcgggaatcacctgccggtatagccagcacctgttagctgatccccgccccaggtctgctgcatagacgaggagactgaggcacgaacaggtgaaatgactcaactgttatcttttttttttttttctgagacagagtctcaccctgtttccgaggctagggtactgtaacgcaatcacaactcactacggcctcat

SEQ ID NO: 49175 - DNA, 694 bp, Homo sapiens
acttccgcgaggtgctccagcagcggctgggggagctggagaggcagcttctgcgcaaggtggcagagctggaggacgagaagtccctgctgcacaatgagacctcggctcaccggcagaagaccgagagcaccctgaacgcgctgctgcagagggtcaccgagctggagcgaggtgtgtgcctggcctgtttctctgtctggcagtggcctgattttcaccacttgtggtcagacatgcgattctggttgatggacagcagggattgtgacaccacatgggcctggttcccgagtgtgtgagcaaataataaaggcgactgaacaaggtcatctcaggaatgagctgccagccccactggcattatccagggaaaagtgaaagtgtccaggaccagcttcgataagcaaccacacgggcgtttcagtcctttgttaactagtcctggcagcggattctgtgtatctttctcttctctgctcacactgtggtgagtaagtttctcccacaggagacagagtgggagggatcaggggataattcagattgcgtcatcaacccccaaaccactgggtggcttgggtttgaagttgtaggtttgcccgtagtgggtgtttataagactggaattttcccagatgcactaagctgatgaagccacttccccatgactccgtttcatgcattgatagga

SEQ ID NO: 49176 - DNA, 1972 bp, Homo sapiens
cacctgggcggccacttccagaaagcccacccggactttcttttactaacagggtctcggtccatctccagccgtcaccttcccaaagaccctcctggcctcctctccattctgcgggccgagaagaaccccaggagagcagcggggaccgggagcgaggagtgggggtggcaaaccctaccctgcctgccaccttcagtccagtggtggacaatacctggaccccatagctgccaactcgggaagccgcgcccccccccaggtgcccaccgcccccagggtacccgggcattccccgaggcctggctcctgggaggagactcagggaaaaaggagctcctagaacctgggcgccggcccggccccgtcaaggctgtcggggatttaaagggccgggacccacccggacggcggacgcccctccccgtgcccgcgcaggccgcacccacttgggggcggcgcgccggggcctggtgctcggtcggcgggtgctgccgctttaagcgggggcgggactgcgcgcggccgagcggttgcgacgagggctcggctgggggtcgccggggtcgcgggccgggcctgcaggagccgggccgccgaggtcggggtaagttggcgggcgggcgtccgaacggccccgggaggtgcgcgcggccctcaggcgcggggaggcctctgcggcgcggcggctccgcggagggatggagctgggggctccgagcgccccgggatcccctaggccccagccagagcccacctggggctgcggggccgatggcgtttgcggccgagctgagaggaagctgtgggaggcgcagcgctcgcgggcgcgggaattggcgctcggcgctcgccgtagctcggcctgggacgcggtcacggagcgcccgggacggcgaccaaaggagggaaccggagggccgtttgtgagctgagaggtcgggtgggacgttgggggcctgtccctccggaggcgccccccggccaacctggcacctccgggcctctacgccggcactggactcgttaggcccggcgcggggagcgaaggtagcggcgaccacagcgccccctctggcccggcggcgccgcctcaggccgggcttggcggggtctgggggcggcggggcagtttgtccccaggagtaggagcaggcccggcgccagcccggcctgggccttcggcgtccggggtggtgaagttgcttttcctcagacacgcagaatgggggcgtttccccccggccagggccccccaggctccgcgggaccccgggaaatggaagagttgacgacttccgtgggaagggggaagtttggacaggactagggaggttcttaggcagggagaggccgtgaccccgagtcttgggtcccctgggatggggatgggcagggagaggccgtgacttccgagtcttgggtaccctgggatggggatgggcaaggagagaccgtaaccccgagtcttgggtcccctcggatggggatggatagggagagaccgtgatcccgagtcctgggtcccctcggatggggatgggcagggagagtccgtgacccccatgccttgggccgatggagatggggaagggggtgtcacctgaaacaggcagttgccaggtcccctagcagggcttgacaaactcccccgccttggtttccttcttggcttttcctacccggagccagagggctggggcttctggtgggcttgttgtgggacacctgtgggcatgctctctgcatggaagaagggtttttggtgtctaggagagagtggccggaaggagctctctagtgtcacctgtgtcagctgcaaagcagtgtatccggtaggcctgcaaaggaggtcctggtgtgtctgttgaaagaaaacgaagccatgaaaccacctgttagtgcagagcaggattatgcaaggaggaggggtgaaagcaacttatttcaccagcttctcgggatactttgt

SEQ ID NO: 49177 - DNA, 1760 bp, Homo sapiens
ctctccagctccccatggagaaggtaagctctgtgacaatgtcgtttcgttttaagccttgtgaagatactatgtttcagtctatgtgaaatgttaattagacctgtgtcttaggcaatctctgagtagaaccagttgtatcaggtgatcggcctggttggcacaggggctttcctaatgccaggagaccagtggaggggtgtcacctgagaacttggtactctggagcagccccctctcctggtgaccaagaggagatgccagcccatcccgccgtgaactccttccattctgatgcctggcaggcttactgagaacctgagttgagtccatgcctgtctgtcttcgcagccacacgcagtgcctcgctttctcccattctctatccaaacgcagctcgcactgtctcattcctggctctcatcccactgccaacagctcctgggtctctgttaggccctttagagatcctcgtttttactgtgtaaaaagcagacagtgcccccgcaccctgctggagtgtcctgcctgctgcctttgccctgtctgtgttgaacacccaccgtctctcctccctgccctgctgacttttctgctccctgtcctagttctgtgtcagcatcattccatcgtcacgttggcttttccctctgactctgtcaccagtccttccccacatggtggcagcatttgtttccatgtctttgcaggacatcatctagctgttgtgtattgggtatttttttaaggatattatcgtaatgtttgagcggatccacgtgagttgggcatttcagtaagctggctgcctgctggggtcctgagcctcttgcagatctgatcttcagccagcatcgtgtggcctggaactgctccaggccctccctttgctctggctaactcctccctgccctgttgcatcattgtgtagtactgggtgtgtttacctttgtagaagacgtgtgcccatgtagtggcttctgtgtccataagtaaacattggggagggagaagctggtacagataagcgtcactctggagttgttttctgtcatcatctcagtcagcctgtcccccgcaacttcctcaagcctatgcctcatccccagccctccccaactcctgccttatgaagcactgttccctctccagcctcagggtgggtgcagtctcagcttctaacccaaaccttcatccacatactttccaaatgaatgctactctcctaagagaattggatggctaaaattctgtcttttgcgtattttatttgactctgtatagacaaaaagctccccccacccccaaaaaattccctttagaagtagttttgccccaaagcagctgaagtctggaagaaatcaggttttgcagaggtaggatcgtaaaggtctgggcccccttacagaggctcaccatggtgcctgtcaaggcattctttctgagcaggacgccatcctgccggcactggctgcagcacacctggtatagctcatagctaaggagcccatgaggtaaagggaaagatgagcgtggctaagccaagtgccagtgagtttccattaaaccattctgcttttggcacacttggcagtccttgattctttttggcaggtaattggctcatatgttatattgattctgaaaaataaaattttagaaagtaccaccatttacaactgctactgatcagatcacatgcagttccgcaataccctcgaagagcacggacactcaagctggggttcatccggggagga

SEQ ID NO: 49178 - DNA, 1371 bp, Homo sapiens
agttgcagcaggacgaggcattctcattttcaaatgggctttttgctcaacaagtattttccactctaagaatgattaattattctcctgattaataatttcaacacaatctacagtcagaagggagcacagctttactgaccaagatgtgtttctaattaacacaaaagcctgtcatttctaacagggggtacaaaagagacacctcattcatttgcaggtaatatatttccagtctcattataggtactgagtcatacattaaacatagtcttggaaaatcagacaggaagtttattctcagatgaaacaaatcatgaataaaaaggaactaaatattaccaaaaatcatattaggtagtaatgctattctaaaaggaaataaaaagcaaaagaaaaaaagaaacttaactctgttatggggtggggggggggtctctctaacctgggctcagatgtatggccttgtagaaggaattcgtatagaaaagctgcatctcccccaggaatggtccccgagggactgaggcaatggggacagtaaagtagaagagagaaagggtaacagagtctttatatttccttgacttatgatggaaaattttaagcatataaaaaagttagtgatcataaggaattgctgtgtaaccaacttcaacaatgatcatggtcaaccttgtttcaaaggtcaacaatgactcacgtttcaaatgtacccctgtctactccccccaccccagcttatctgaaggaaatcccagacatcaatatcatctcattcatcactatttttagtttaaaacaagagcaacacatctggaaggtattggcttttcaagtcaactgctggaaagacagctggggggtgtccatttcaggaggcttaccttggtatcctggggtcgtgccacgtgctaactccagtctgtgtatgcaaaaagtaaacttggccctggactgttgttctttgttctacacaagaaattagagatccaaatgagacaagttcaattccagggagagtttgtaaccaaccctcgatgccctcacgtctggtattatctaaatctagataacactcccctcttatcccagttcttctctctgaggtggccgaataatcccctcttctccatctcgccccatgctctcctttccagagcactacagacaccctcatctagcctacatgttaccttggtttgctttggtgttcgtttgcctaagattttcacttgatttctaaactgggagatttggagcaattgctgaaaattcatgattagctagatttaggaccattgtcttccagttgtctttacactgccacaattatcaaatggcatagccacgcaaacatccgcacttatg

SEQ ID NO: 49179 - DNA, 508 bp, Homo sapiens
tcggcctcccaaagtgctgggattacaggtgtgagccaccatgcccaggcttagatctagtattttttaaaaaatacatttatgtaccaatacagtgaggttctggggatacagcaattaacaaaagacacatttccagaacactgagtttatttttcagtgtggaccaatgcatgttttcttcagttccaaccctgaagcacccctctaccttagccagatcatgcctcttacatgccataatttcctaatcacatcccgtagttttcctaatgttgggaatatggccaaagcaaattacataatgttcacgaagcatttgaatacatggaaaggaagtgttttgctaacatgaggtacattcagttagtaaaacaagcttcttttacctggcaaaagatagggttacaaaaatagtacttgaggtcgggcgcagtggctcacgcctgtaatcccagcactttgggaggccgaggcgggtggatcacatgaggccaggagttccaga

SEQ ID NO: 49180 - DNA, 2279 bp, Homo sapiens
ttgccagcctctactccagatgtacagtagtagtgagtgcatatatacataaaatcagtggactgacttcttggggacccacaaaagtaagaaaaatatattcccaaaaacactacccttacttttgactactgatttatttatgcggatctgaaacacacacacacaatttggtaaaattcatgcaatgcatacccatgaaacttgaaccagatgtaagaaataatcactccacaagaacaccatgaagcattcctctgaaattgctacgttgtagtctaccaacaaatatgtgcagaataacaagtagaaaaatgataggaaacttacatgtctctctcagggtctgggcattcacaagactgctctgccttagctcagaataatctctacacaacagttaagaggggaaaagggaaggtgtggacagctagaaagatggtggacgggagtatctgaaaccaaggagcctctaattcaccacctccctcacaaacaaaatgttccttgcccagaccctctttccagatggttcctagctaaagctttattctcgttctagccccctctggcttctaccctagtcttataatttttttttaaacgtcttttcatcccaagattagtcagttggattactctgccctaatgtctccagctctgggcagcaagtctaaccttccccacatggctttcctcttgccctaactactttctgccctcacctggatgcattaggtgcaattacttttgcaccagcctaatatcaatcccaacttcatcatctgggacctgaagccagacataatctttattcactgcaccagaccaaaagatatggattttgaagtcatcaaatcctgggttcaaagtccggtttggctatttcccagatgggtgatggatgggccaaattactcaacctctctggtccttaatgttctcatctgtgccatacagataatacttcctacttttcagggttattgcgagcaatgatataggtatcaaataaagatagctgctattatttttaacttgtcttaataattactactaacaccactatcacctatcgaggactcaaaggtctggcaatacaatgaaagctttactcatttaacctttccatattgatattcacaaacttccagtgtgtgtcatatttatacccattttataaatatggaaactgagacagactccaattctagtctttcgagtatggctgattctcattattcctggattctgtatttgtgaattcacctacttgctaaaatgtatttgtaaccccaaaaatcaatactcgtggcacctccctggtcattcacagatgtttgcagagcaacaacgacaacaaaaaaattgagtcatcgaacgtgcatgttcccagctgaggtcaaaccaggcaacaacgcgccttctcgtttcagcctcgtactgtcaacaaatggtcttttcatggtctatttagtgccatgtttttcacatgtctgtgctttgtgttggtgactgtgctgtttagaatggtccccaagcaaagtggtgaagtgctatccagtgtgccttgcaaagaaaatgcatggattagggaaattttgttcaggcacgagtggcagtgctgttcgttgtgagttcaatgttaatgaatccacgatatatagtgagtaaggtatctttaaacagaagcacacataaaacaaggttacatattaatcagtcgaagacaatgttgcaacttgaggatcacaggaccctaaccccctattcctctgggaacgatggttcaggattcgctaatttggtgttcgcagcaattttatagaacacacctactgagaataatgggaatcaacagtatagttctcttccgctgtcagagctggtactcgccacaccccaggaactatacacagactaacaccagtggtcttcactcccatagcctatatcacaccacccatgagacattgatggggtaggagggcgcagagggaggaaatgtagcattgcaataatctcacgctgctccaaaaacggaggagagaatgcaagccacacacaaaaacacacactgttcctctctccttcccacttccagaattataagaaggtttcgtgttctctgaaattgttatattctggaaatgtttcccaaaaatgaattacaaactggttaatcacattaaaagctgccttcagcctggcgtttttgatcattgtcaaatttattttccttccttttcaaagccactctcctactttgctttcagctc

SEQ ID NO: 49181 - DNA, 4682 bp, Homo sapiens
gccaggctggtcttgaactgctgacctcaggtgatccacccacctcagcctcctaaagtgctgggattacaggcgtgagccaccgcaggcggactgtttttttgtatattttagtatccattttagcaacatccagccacactgagatgcctgcttgggtggtccagataatctcttaaggtagcaattatggtttttgctagtagttaccaagttgcaatgattttgagagaccagctataatcttacttttcccacaagacacttattatttttagtgtattgttgtgcagaatgtatggtttttcagggacataaattttccatcacagcagaaacaccagtgagtatttatcaagtgcctacttcctatgcacaggcaatggactaggtactcgaagttaaatttaaggacctaaaagaatatgttttcttaaagatctcaacttagccacgggggcctgggggagatgagaattgcgcacttagcattagtttgctagggctgccataacaaagtaccatctgctcagtggcttaaacaacagaaatgtatcgtctcacagttctgaagtctagaagcctgagatcagtgcctgagcctggagaaaacccagatgtccagctgcttttttggccctagggtcacatttgctgaaaggagtccttttagagtctggaggatgagggctggagtcctttaacttccaagaatggggtcctggggcattacctatcagtgtgggctaaccttcaaaggggcagcaccttgagggtacaagttcagacagcagcccagcttcacctcagctgagtgaccaagaaaatctcaaaccttggtctactgtgaacaactttcacctacaaatgaccaggacgcctaaatcatggggtaaaccaccaaccaggctccaggtggccacctggtaaaatacagacaggtaacaaatagcactgcaaaggttttgaaaacaagtgacattgaaaccacaacccgcaaaaggctagttagaacagaacacatgccctgagctcaactaggtcaatgcctgctaaacaaatgcgtcaatattctccacagtatttacacaagacacagagtctcagaacataataaccaaaatgtcaaggataaaatccaaaattactcagcatataaagaaccagcgaaattgcaactcacatgggaggaaaagatatgccatgcaaacactaatcataagaaagcctgaatggctatattaatattcaacttcagagaaagaaaagtgtgggagataaagaaagacagtacataataataaaagggtcaattcaccaagaagatataacaatcctatatgtgtttgtacctaacaatagagcatcaaaatacataaagcaaaaactgacagaattgaaagaggcaaatctaaaattacagctggagacgtaaaaactctaatcagcaattgacagagctagtagacagagtcagcaaggatatatatagaagaactgaacaccattaactaacgggatcaaactgacatttatagaatactccattcaaccacaacagtgtacatattcttttcaagtacaaaatggaacatttataatagaaatcgtagcaaactgaaagggactagagtcatacgatgtatgttcctgaccataatggaattaaactagaaagcaatgtgaaaaaataacaggaaaatcttcaaacacttggatagtagacatcacacttctaaataatccatgggtgacagggaaggtctcaaaggaaattagagaatattttgaactgaaagaaaaaaaaaaaagtttgtgagattcagctaaacttagaatgaaatttataagattaaatgtttttattagaaaagaaaaaagttgcaaatcaggcatctaagcttctaccttaagaaattttaaaaggaaagcagaatgaaccattgcaatcataaactctaacttgagcttcactgagtaccaaaaagaggggagagagagggaatgaggcaaaaacaacagtgaaagaggtcacggctccgaattttcaacagtgattgcagtggcttgaatgtgcaccccaaggagtaaatgttggaaacttcatcttcaatgcaactgtgctgggaggtggacctcatgggagatatttaggtcatgaaggctctactcgcatgaatggattgatgacattaaaaaagggctcgaggctgtgagttcaatctcttgctctctctctcacacatgttctcttgcccttccatctttcactatggaatgacgccacaagaaggcccttgccagatgctagcaccctgatattggactacccagcctcgagaactgtaagaaataaacttcttttatttataagttacccagcctgtggtattgtgttatagcaacacaaaacaaagacagtaatgaatggcttcgaagacagtaatgcacttcaaaaagcccaaacaggataaatgaaaagaaatacacacctggttacttcacagtgaaactgcagaaagtgaaatacaaagataaaaatattgaatgcagccacagaaaaaggaaagattactttccaagtacgagtgaccaacttctgaaatgccacagtgaagatttgaagacagaaatatcttcaagaaaataactgctaacctagaattctctacccagcaaaaatagcttttaagaatcaagagaaaaatgaagatctttttcaacagacaaaacccaagttagccaccagcaaaattttcactgtcaacatcaagaactgcttttattgaaaacacataaaacggagaaaaaaatcccaattagtaaattattataaagtaattctacaataaagctaaatttgctataagaataaacaaaatcatctacacccttctccttatttcaggagttaaatctgatcctcacattttaaatctaacagataattacctaattttctggtaaggtaaagaaactgagatggaagcaggggagacgataagattttaaccccaaaatgagcattttcctatgggcattacaaaaggtaactgagttagaaggacctctgtttatgaacatgttaactggctgggagggaaaaaaaatgactctaatcaaagagagagaagtatgcatataataacaaaagacagaatggtctcacagtgtaaagagaacttttttcaatttgacaagatcatgcctatgatatcgaacagtgcattttctcattttcatcactaattgactcatatttcttccccattgcaacaaaccttagctccgtattcacaagccctctgcttggagcttcattgacaaagaacagcagcatacaaaatagcaccacagtgcactgagaaatgtcaccaaacactaagctatggggcaactaaaactggacagatttatatttgttctatgtctggtcaagggaaactgcagaatttagctgaataatacactatttccattcagacacatgttagtgactttcggccctctgatcatcttccctcctcattaaattataagatcctttaaggaggttactctgcatcattcactgaaaacaacatttaataagcgctttgtgccaggccctggaatggaaatgattgagatccctcctttcatctttggcagcagcaaagacaaggaaataaataatgtgaatagcgttatgaagacactgtgatgggaagacaagaaggagtaactagggagtagatcattctatagaaagaacatgtgtaaagacatgtttgagaggcagaatgcattcagggaaatgtgtttctatggaaggtttggttcaggaacaagaggagactagagcccgatgagaaaaggtcttctatgcaatgttaaggaatttggactttgccctggaggcaatgaggagccaaacactactactttttttttttttttttttggaaagctataaactctggcacgggagtagaaaatgagaaggaatggagagaggcaggaggcaggaagttgacctctttggtggctgtttcaatagtcgagggaggttttacattgctttgctgtcactccacagtatctaacacagggtctaacacataaaagagaacagtaacactgaactgaattgattctaagaagaaaatacctaatttcttacagagtggtttatctgctttctaaggtccgtgcagtaattcctttcccaggatagggggggaaatgccattatcatgtacacgctggcaagaccactgctgtggtttggtctgtccccaccaaaactcatgttaaaatttgatccccactgtggcagcggtgggaggtggggcctatgggcctactgggaggtgtctgggtcatgggggtggagctctcatgaatagattaatgccttcccacgggagtgagttctcactctcacggaatggattcattcccaagagggtgggttgttcagaagagtctggcttccttggtttctctctctggccatgtggtttctttgcacacatcatttccacttctgttttccaacatgagttaaaacagtctaaggccctccccagatgcaaatgctcagtcctgaactttccaacccccagaatcatgtgctaaataaacctctttactttataaactatccagtttcaggtattctgatacagcaactctaaacg

SEQ ID NO: 49182 - DNA, 1999 bp, Homo sapiens
aactaaggttccacgtactggcattgcatgtgtaccattaccgctaaaccgcaatcctattgtaaggatgatcacactcacaaatcctctcaaaccattcataacatctactgaaagggaaagggaaagggaaaaggtgtttcagaaacaacactcatcacctgatccttccctatcaaatgtcatccaaaaattcctcaaagcattcttgcttcgataatctaaattcctaaatccaaaaataatttggtaggaggagaaaccaagtcctccctttcaaggctcaggcttggcaaataggattgattaatatacatacaccagacataaacatttcaattaaaacctattccttctaaaacattcatcatatttctaacacaaaatcagttgctttcgcttttaacaagataactgaaaccaatctgatgtcaattacagactgagctgtaaatcagaaccaagttaaaagctttacaagtattacaatctcaaaaatgttacttttatcttaccacataaataaaaatgtatctacattgtatctacaaagtgagaagcgtttcctatcagccctggcataaagaaatgtatttccccagaagcaaagatcccagaggaaactacctcctacgttacaaaaccagggtctgggtttgggtccaaatcattatttgatatctttatacaaaaaaacaaaaccttctcttaagacaaaagttgggccatgcaacaactatgggctctcaaagtaaattttagtttaaaaaaattacctattgtttgcatggattttaccgatgactttatggctgcgcatctgccataaagtgttcaaaacgctcattctctctttgaaaggacctgaccaaaccaggactttggagttctcacccgactgagccactgaacagaaaaatccaggggaaaatccctgacggggattagaatgaactttttagtttccttccagagctggaaatattcgagtttggaaagtcccggagcagagccgcatttgcaacacggccatcctgctttagggatgaattgaaactggaaagagagtagtaccaatgagagtgagaaagggaagacgaggatgcagcctggtccagaacctctggagcccggggggaaacaggttggcatcacatccgcgccaccaagtcgcaggcccgcggcagagcgttgcgctcacccttgaaggtggcactacagagccacccaggaaacacggacttttcattgaagacaaaatgaatcaaggagcctgcgtgtgggcagcttccaaagcctccagtgagtgtgggagtagggatcagagcctcacggcgctctgggttgctgagtgtgggggtgatggtgaaacaaaatgcagaaaaggtaaaaattgaagaagcagagttaaaagtagctagcggtctggcctaagagacaggaagtggcccagactgagactgaagagggctggaccagggggaagtgaagagagcaggactgggagcagctacaagataggattgaggaatttcaggctgaaggaaagaaagggtggaggcctcgccagacagcagcgagggggcggggctaggcaggaatgagggcggggcttgaaagtgaggggcggggctaggggaagaagggaggaggacggtgtgggggggtgagggagaaacgaaagaggatgggggagtgagaagagggtgggtgggggcaggaggggagaagcaagggggcaagtggaaggggaggtagcaaaatagcttggaagtggtgggaaagaccaggaggatgaggggagggagcaggtgggagggaaaacaggaaagcaagagagatgatgggaaagtggtgagaagtgagggatgggaccaggggaacagaggcaaggccaggagggaaaagcgagggggcaggtgggcggagaggatgggaagcgaggagaaggagggagggggtaaaaacggcggaggagaaaaaaaggagagaagcaagg

SEQ ID NO: 49183 - DNA, 1931 bp, Homo sapiens
cgggaccaggaagaagtgagggccgatgctaggaaagaagtgaggaggcgggaccaggaagaagtgagggcccaggctaggaaagaagtgaggaggcgggaccagagagaagcgagggagctggacgcagggagaagcgagggggcggggacagaaagttaggaggcgggagcagagaggagcgagggggtggggccagagagatgggcggggtcaggtttggggaggaaaggtggggaagagaaaggaccacagggatggaggtgaaaggcaagggggcggggcctggggggagaagcgaggggtcaggtgctagggagaggaagggaagcgagaggcaaggggccgagccggggagaggtgaggggaaagggcctggaaggagatgcaaggggcggggccaggaaaagagaagcgaggggcggggccagggaaggagatgcaaggggcgtggccatgaatggaaatgagaggggcggggccaggacggagatgcgagggggcaggtgcgggggaacgggagggaacgcgagaccgagggggcgcgagcggccagggggcggggccgggcaacggcgagggggcggggccaggagggagaagcgaggggcgcacgccgaagggggtgacgaggtcctgggacaacggccggcgtgggggagggccgcttccaagggcgccctgcggggaattccggggcgggcgagggggcgccggggcgcgggtgggcctcccgccggccgtacctgtcagacggatcttgatgctggagccgttcctgcgtgtcccggggttcgacatctcccgccaacgatcgggcagccgcggatccagcgccaccgccccccagcccggcccggcccggccccgccgccgccgcctcaaggttacggctccgggctgggcgccggggtccgagccgggacacaaactccgcggcccaggcgtccgggcggcaggcggatggtcgagccgggagatcggcgcttgctgcggcgctctgaccctcgctgcttccagccgagcccagtcccgagccgccgccgcctccgccgccgcctccgccgcctccaccacctcagagccggacgcccgccgccctcgccgcttccgccgctgccgccgcctctccgagccgcgcgcgcgcccgccgccgtgccggcccggccctgcgcgcccccgcgcctgcgtgcgtgcgcgcccccgccacgtacgctggggcggggcggggtgcgctgctacgtcgcccgcacgcctgcctcgggcgcgcggggcccggatcccgcgggttggggtcttcacccttcctgtggtcggtgggtgggagggtctggccccgagcccgggaagggagagcagagctggccccgggacccagcgcgcggtcgccctctgtcttgacccctgtctctgcgaggctctgggctcctgagtgactgaagagtggtttgcatgaaaccgtgggctgtgtccacaccaagctccttgcacacaggcgtgcaataccagtttttttcagttaagagctttcgatcgtgcaagttcaagggagggacttctcaaagagacaaagcccttaggtgtgttctgtgcaacgggtgtgctccactgacccataacaaagttgccagaatcgcagaagtgccatatacggacaaggaaaacgagatgagagggagggataaagttgagaggcggatgtttgttattatccattctgcatacaattttaccaaacaagaaagtggcattgtggtttgtgttcccatgtcttctgctaaatttccccttctcccggggttgcaggttagaaccaaaagctcatggctgggtacggtggctgtagcctgtaatcccagcactttgggaggccgaggcgggcggatcacttgagcccaggactttgaggccagcctgggcaacatagggag

SEQ ID NO: 49184 - DNA, 583 bp, Homo sapiens
tgatctacctgccttggcctcccaaagtgctgggattacaggcatgagccaccatgcccagctgagaattgcattctttgaggtacattacaatttctgggcaaatgcaaaaggtcaaagttgttccagttcagtgttcacaccgtaaaccaacctatagccattcacaccttccttcctctttgttgcctcaccagtcgtcccaactccccgagtctaagcaggtgggcacccagccagaaggtgactaacaccatctctttgcacccagaccatataccaaaggcaaattgctcctttttttaaaccttgctaggcaagtcagtattagtatcttcaaactacaaaggctgctttgtcatgcaaagagaaggaaaaaaagaggttgacagtattttgagccaacaaggttagatcactcggacaacagtgactaagctcaacagggcttccagctcttttaattaaaaaaattttttctcaaagacctatctttgtaaaccatctcacctttccacctcccttcaactacaatctacgaatagggggaaaaatgctttaagatgttgaaaaagaatctgta

SEQ ID NO: 49185 - DNA, 1290 bp, Homo sapiens
gggatcacttgttggaatggccaggtttctgtggggtcacccagcagatatccaccaatgacaggccccgctcacagcctgaggacctttctattacaagcagagatccaaggacatcagacatctgatggaagcctttgccataggcacaccaaactaacaacaaacacccccccaagaatcaatgcataaacaaagctaggtcgatagcacagataggatcttgcgctaatgaagaaggaggcttgaaaagggaagcctgtgaaaacaaagtgtctcgaattaagtgactgcagaaatgaaaagcctggaagaagagataaagtagaataccccagaaagtaaaaaataaagatggaaaatagagaatgggacaagaaaatgagaggatccgtttcagtgggaaaaaaaaatggtggtggcaggggagataattctatttttttctttttctttttagagatggggtcttgctatgttgcccaggctggtctcaaactcctggactcaaggggtcctcccacctcagcctcccaaagtgctggaattataggcgtgagccactgttccaagctgttttttaaaaattaaaaggacaattctagactgcaaggctgatacttggatgtacagaaaataggtttctattcaggacagcacatttaagaatactggagacacaacctacaaatttcagtcagtagagttgagacaggggaagagagtcatgcacaaaataattggcaatcagagtagaagactttgaacccaacactgaaaactagaagataatgatcgatgcttgcaacattctgaaggtcatagtttccagtctagaacacttgtctgcagctggattgtcaaccaggagtcaaaacaaagtccatgttttcaaaggccaggtgcggtggctcacacctgcaatcccactgaggtcaggagttcaagactagcctgttcaacatggtgaaaccccgtctctactaataaaaaaaatacaaaaattagctgggcgtgttcgcgggcgcccgtgatcccagctactcgggaggctgaggcaggagaatcgcttgaacccgggaggtggaggttgcagtgagccaagatcgtgccactgcactccagtctgggtaacagagcaagactctgtctcaaaaataaaaataaaaaataaagtacatgtttttggatgagcagtgtctgaaatttaacctcccatgcaccttctctcagaagatacatattaaaagccagtgggtctcagtggctcacgcctgtaatcccaacact

SEQ ID NO: 49186 - DNA, 799 bp, Homo sapiens
aaaaagcagaaaaaaaagaaagagctcttcttggcaactgtgacaccaaacctggttttctatggccaaattagctgtttctacttagtctttttggcaggctctgcctgaatttagaaccttagagcccacaggactgggtctcaggctctcctcacactctaggtcaggggttgaaaactttttcggtaaagggccagatcttaaacatttttagcctgtggcttctgtggcaacaacaactgtccttgtagaccagacagtatgtaaatgagtgtggctgcatgccagtaaaactttttttttttttttggggggagacagggtctcactccatcacccaggctggagtgcagtggtgcaatcacagctcactgcagcctcaaactcaagcgatcctctcgccttgccttcccaagtagctgggactacagacacgtgccaccatgcccagcttgataaaactatttacaaagcaagcggccagccaggtcatgtttgtgacccctggccccagctgaccttgcctggctgggtgacatatacacatatgtcacctagcaaggtacatctgtcaatccgactctgctgcaatggtgtctccaactcgcctcaacttcatgcctgcaacacaagctccaatttctttttttcctgcacttttcccctttctctaggaagacaatcatctgaacaatctaacctgaaacctaggggcatcctggcttcttgctgtctccctttcacgtctagaatggctatgtcccagacccacctgcttcaccatctccctctgcta

SEQ ID NO: 49187 - DNA, 2177 bp, Homo sapiens
atttttatgtttttagtagagacagggtttcaccatgttggccaggatggtcttgaactcctgacctcaagtgatccatccgcctcagcctcctaatatgctgggattataggcatgagccatcaggcctggctaattttcgtatttttcgtagagacgcggtttcaccatgttggccaggctggtctcgaactcctcagctcaagtgatcctcctgcctcagcctcccaatgtgttgggattacaggcatgagccaccatgcccggcatctgcttttgtcatcacattgctcttcttataagaatcatcgaatgccaggcccacccagataatccagtatcacctctctatctcaaaatccttaatttaatcacatatgctacatccctttcctcatagagtaatattcacaggtttggggactagaagatgcagacacttggggtgccacgatacagcctaccacaaagagtgaaacaggcttagttcataacccagttattctcagtggaactgaagacacccttccacacaaaaacttgtacacagatgttaataacagcattcatcataacaaccaaaaagtggaaacaacccaaagtcccccaattaataaataaacaaggccagacacggtggctcacacctgtaatcccagcactttaggaggccaaggcaggcaaattgcttgaggtcaggagttcgagaccagcctgaacaacatggtgaaaccccatctctactaaaatataaaattagcaggtgatgcatgcctgtaatcctagctactcgggaggctgaggcaggagaatggcttgatcccgggagacaaaagttgcagtgagccgagattgtgccattgcattccagcctgggtgacagagtgagactccatcttataaacaaataaatggataaacaaaatgtggtctctccatataacagattatcattctgcccaaaaggaatgaagtattgatatatgctacaacatggatgaactttgaaaacataaaagctcaacacaaaagctcacatgtttatatgattgcatttctagggaatgtctagaacaggtcattccagagaggcagaaagtagactagtgtttgcagagacggtgggggatgaggaatggggagtgactcctgaatgactggagtttctatttgaggtgatgaataggttctggaattagctagtggcaatggttgcacaactttgtgactatgctagaaaccactgattaggcacttaaagagtgaattttgatgtgaattataccttcatttctttaaaaaatatgctaatatgccaagcacagtggctcatgcctgtaaacccagcacttcgggaggctgaggcagacagatcacaaggtcaggaggttgagaccattcgggctaacatggtaaaaaaccgtctctactaaaaatacaaaaaattagttgggtgtggtggtgggcacctgtagtcctagctactcgggaggctgaggcagaagaattgcttgaacccaggaggcggaagttgcggtgagccaagatcgtgccactgcactccagcctgggcgacagagtgagactctgtctcaaaaaaaaaaagctaatatgggaccaaaagaaaaacaactttttggggttgtttgttggagtgagatggagtctcactctgtcacccatgggttgaagtgcagtggcacgatcttgacttagtgccacctctgcctcccaggttcaagcaactctcctgctcagcctcctgagtagctgggattacaggcacccactaccacacccggctaatttttgtattcttagtagagatggggtttcaccatgttggccaggctggtctcgaactcctgacctcaggtgatccacccacctcggcctcccaaagtgctaggactacaggtgtgaaccactgtgcttggccttttttcccttttgttttataccatccttggatggggggattctagggactgctccaaacaaatgaagctaactagagatatagtttggactcctatggcaactcagaatgactgtacacatttcattgatgaatgggaacacatcattggacccaatttgacaaaaatggaaccagtctctgccctctatgagacctaaaccaagcagggtaaaaagggtgcatgtgggtagttaag

SEQ ID NO: 49188 - DNA, 6523 bp, Homo sapiens
tatgttacccaggctggtctagaactcctatcttcaagcgatcctcccaccttggcctcccccaaagtactgggaacacaggcatgagctaccatgcccagctaagcagccctgttttatggatgaagaaactggggttctgaaattaaataattgcaagattccacggaaactttgatttgattccacagttgtctggctcctaagtccacatgcttttgtcttctccacctttaatattttatgatgaaaatagcaaacatacagaaaagttggaaggataattcagggaaacacctagtcatctatctaaagaatcttttgctatatttgccttttcaacccatctctccaccacctccctgccccccgctattttttttttgagatggagtttctctcttgtcgcccaggctggagtgcagtggcctgatctcagctcactgcaacctctgcctcccaggttcaagcaattctcctgcctcagcctcccaagtagctgggattacaagtacaagccaccacacccaggtcatttttgtatttttagtagagacggggttacaccatgttggccaggatcgtcttaacctcctgaccttgtgatctgcccgtctcagcctctcaaagtgttgggattacaggcatgagccaccgcgcctggtctcttcaccccgctttttatgcagattgcactggtccccaatagaagcaggtgggtgcttcatactcacagacacatctttgcctcggtacttaaattttctccgcctctcttctggagcatctaaggtcggcatattgactggaagtagtaagttacctgcaggttggacagcaacaaagaaattttcagtgcccattgtgtgggttattatgtcagtatcataaggctctaacccttaaagggctcacagtggagcaaagggcagacccaggaagctagcttttttttttttttttttttttttttttttttttttttttgagacagagtctcgctctgttgcccagacttgagtgcagtggggggatatcagttcactgcaacctccgcctcccgggttcaagtggttctcctgcctcagcctcccaggtagctgggactataggcgcctgccaccacgcccggctaatttttgtctttttagtagagacggggtttcaccacgttggccaggctggtcttgaactcctgaccttgtgatccgcccacctcggcctcccaaagtgctgggattacaggcatgagccaccgctcccagccagcattttttattttttgggaccagagaagctgagtgagagttagaacccatatacacagcacagactccccgtccccaacccttgggctcaacctggcagcaagaacaacagtctggacttctcagctccatgtcctatttctgcaagacctgcttgttggcatcagagtctcactctgtcacccgggctggagtgcattggcacaatcacggctcactgcaaccttgacctcctggactcaagtgattcacccacctcagcctcttgagtagctgggactacaggcatgagccaccacacatgactcactttttatttattttatttatttattttttgagacagagtctcactctgtcacccaggctggagtgcggtggcgcaatcttggctcactgcaagctccgcctcccgggttcacgccattctcctacctcagcctcccgagtagctgggactacaggcacctgccaccacgctcagcaaatttttttgtatttttagtagagacggggtttcaccgtgttagccaggatggtctctatctcctgacctcgtgatccacccacctcggcctcccaaagtgctgggattacaggcgtgagccaccgtgcccggccacacctggcttatttttggttttgtttgtttttgtagagtcggcttttcaccacgttggccaggctggtcttgaactcctgaccttgtgatccacccacctcagcctcccaaagtgctgggattacaggcatgaacctgaagtcagcttctataagcatcaccacaccagctcagtaggctgtgaacactgtgggagcaccaagaccaccaatgctgggcatagcagtaaaggaaagcttttaaaagtgctttggcttcaactgggtcctcaaatgaggcagatgggctggttgtcatatatagaagcctttcatgccaggtgcagtggctcacacctataatcccagcactttggaaggctgaggcagatggatcacttgaggccaggagttcgagatcagcctgggcaacatggggaaaccccatctctactagaaatacaaaaattagtcaggcatggtggcggacacctataattccagctatttgggaggctgaagcaggaggatcacttgaatccgggaggcggaggttgcagtgagctgagattgcgccactgtactcgagcctgggcaacagagtaagattccgtctcaaaaagaaaaagaaaagaaggctttcacacggtgtgtctgaggagttataaatcaggcatatgtacagggtggtgaggagacccgccaaggctgcaacaggaaaaccccacacccaatgcaccagcacatggggtcaggacagtctcaagcacaagtcactgagaatccttcagtagactgcctccaccccagtccagaccactatcacctcttacccacactactgcagttgccttccagctggtctccctgcttctcccattgccttattccaatctgttctttgcacagagtacatgtgattgtggatcacctgaggtcaggagttcgagaccagccagaccaacatggcgaaaccctgtctctactaaaagtacaaaattagccaggcgtagtggcaggcacctgtagtcccagctactcaggaggctgagacaggagaatcgcttgaacccagggggcggaggttgccgtgagccaagatcgcaccactacactccagcctgggcaacagagcgagactccaactcaaaaaaaaaaaaaaaaaaaaaaaaaaaagaaaaaaatctgattagtcaggcacagtggctcatgcctgtaatctcaacaacttgagaggttaaggtggagacttgcttaaggccaggtgttcaagaccagcttgggcaacaaagcaagacccccgtctctacaaaaaatataaaaataagctgggcatggtggcacatacctgtagtcccagctacttgaggctgaggtgggaggatttctggagcccaggaagtcaaggctgcagtgagccacgattgcaccactgcactccagcctggacagcagagccagaccctgtctccaaaacaaacaaacaaaaaaaagaaaaaatcaaggagaatctgatctaactctcctgcttaaaaaaactctcctggctacccaatgagtttagaagaaaattcactttctgcactggccccagcccacttcacctccaacaactctttccttgatcattgtgttctagacccctgggcttcattatcaagtgttccaggttcattgtactcgggcctttgaagtagctgctctgcccaggatctctgcacacttggctcctcttcattcagtctctgcttaaacatctctgaaagcccttttaactgtcttcccagtcttattttcttctcagctttaaccactgcctgatattttcttgtttgtccaacttcctctcctcctactccccatggtaacagtactgtgtcttaggcagggatttcttacctctttcacaacacatgacaaagtaggtactcaaatatttgtcaagggagggtactgtgtgatacgagacagggagttggccctcagttagaggtggttattcaaatcaggccaagtttgaactttttttaaattggagggagtttgcttttgtgtttttgttttgcttttgagacagtcttgctccgttgcccaggctggagtgcaataaatagtgtaatcatggcttactgcagcctcaacctcttgagctcaagtgatcctcctgcctcagcctcctgagcagctaggactacaggcacaagtcaccaaggctggctaatttgtattttttgtagagatgggatctcactatgttgcccaggctggtttcaaacccctgggctaaagcaatcctccccctcagcctcccaaagcattgggattagaggcatgagccactgcacctggccccaactttgaatgttcacaaggcagcagggaatatttcttacaggtatgtaatattcatctgtttctgaccatacgagatggtccagactacattatagaaaagagaaaattggataaagaaagtcaactgactcttgtcttcagtgaatagcagccaagaatagttttggtagaaaagactaattcagacatatcaatttgaaaggggcagtgcagacaacttggagatttgcatcagagaatttagagctggctgggcacagtggctcatgcctataatcccatcactttgggaggccaagacgggtggatcacctgaggtcaggagttcgagaccaacctggccaacatggcaaaaccctgtctctactaaaaatacaaagattagccaggtgtggtggcacatgtgcctgtaatcccaactacttgagaggccgaggcaggagaatcgcttgaatctgggaggcagaggttgcagtgagcctagatcaagccactacactccagcctgggcaacagagtgagactctgtctcaaaaaaagtaatttagggccaagactgatgttgtaagaagagagacaagctctatgcaagatcagaacaaggatcgagtcttgaggatgctcacattagggcctgagagaatgaagaattagcaaagaaccaggacaaaggagggagttggagatagaacaacagagttagtatcagaggcactgctggcaacagtagtcactgcgccagggacaagtccctaaaatcaagctccagccacccacagcaagacaggagctacaggagagcatgtcagctgagcctcagagcagaggaaaccaacagcccacaccatccctctgggtttcagatcctggtggctctgcctgctttaaagcattagtttcctccacagcctgggaaagaatagcctatataccttgtctgcaaatctgatcctgggaaatgcaaattagttcctggaattgaccaatctctcccactctccgatctcaaagccagagaggtggagggtgacacctggtttaaacattcacgaagctctcaatcattgtgagtcatgttgacctcctccccaaccaatgtggacaaagggacctcagtgaatccagagtcctttggttgctgcccagggagccctcacacaagttggcttaagactatctcaggctttagatttcttcaatacaacttcaagctcgaggtagctttactcctagcaacacatcagaactcagtatacctgggaagggaagagaacaacattgcaagacagcctcagcactgggagatcaggctaggaaacactggtgtccgatccacatgtgtccttttttttttttttttttttttttttttgagacagagtttcattcttgtagcccaggctggagtgcagtggtgcgatctcagctcactgcaacctccacctctcggttcaagcaattctcctgcctcagcctcccacgtagctgggattacaggcacctgccaccacgcccagctaatttttgtattttttttctttttttggtagagatggggtttcatcatattgctgagctggtctcaaactcctgacctcaggtggcccacccgcctcggtcccccaaagtgctgggattacaggagtgagccaccatgcatggcttacttttaagtaatctcaaattctgccccataaggaagcgttgctttttaagactaaattggccaggcacagtggctcacacctatagtctcaacgctttgggaggccaaggcagaagcttgaggcaggagtttgagaccagcctcagcaaaatggtgagaccctatctctaccaaaaaagattaaaaaaattaaaaattaatccggcatcgtgatgggcacctatagtcccagatactcggtgggaggatcgcctgagccccagaaatcaaggctgcagtgagccatgattgtgccactgcactccagcatgggtgacagagaccctgtctcaaaaagaaaagaaaaaaagaaaagaaaaaatcattgctattgatcacagtatccttttaacatcttgaaaactagattcctagtcaccagaataaccaatgtcaagaggatcatcagttgaaccaaaatttgggtttaaatgagattctatttctaggtctccaagagttgagacatagggcatttataagtctggagtagacaagaattatgggcctatttaaggagcaatggccaaaagggatttttttttttttttgagacagagtctcactctgttgccaggctggagtgcagtgggtc

SEQ ID NO: 49189 - DNA, 2548 bp, Homo sapiens
caagaaagcaagcaggaaagaaaggaggaaggaaggaagggagggagggagcgagggagggaggggagggagggagcgggggagggaggaaggatggaaatgtggaggcaaagtgactacttacccacagccatgcagctcatggggcattttgtgatgctcacctaccgtcacagaactcgacaagaaaccaagaaaagaatgaaagaggaaaagggaggggagagattggaacttaggggcctatttcctaaatctggctgtctggggggcagggaccaagccctctgcatgtgtcaagtccgggggtttctggatgtgcatgccaagaacgtctccatctccaccactccccaaatggagcacggtgcttgggagtcatcgttcccatcccagagatctggctatcattcattcaataaatatgtcttcatcatctaataggtgctaggcacttcacatatatgaactcatttaattcttctaacaacgggatttagggccaggcgcagcgactcatgcctgtaatccaagcgccttgggaggccgaggcaggcagatcacgaggtcaggagttcgacaccagcctggctaacactgtgaaaccctgtctctactaaaaacacaaaaaattagccagccatggtggcatgtgcctggtgttccagctactcaggaggctgaggcaggagaatcgcttgaacccaggaggaggaggttgcagtgagccgagattgcgccattgcactccaacctgggtgacaagagtgaaactgcatctcaaaaaaaaaaaaaaagagagaaacggagccatgtctcagatgctgactcattgtgttatctttgggcaaactgcttcacccctccgagcccatttgctcacctgctgaaaagagaccattactcatctgccccacccgcctgcccaggctattggaaggatcaaaattagattttggactccggggacgtctgtttttattgttgtgccaatgccaacccatgactctggggaatttttttcagccagaggatttaagcccgcttgatttctatagaaaaacccattaaactttctccagataccatgagccaatgattccatccaatgcgcttcttgctgcatttttaaaggcagggcactctgtgtgcccactcactcttgggcagtgctagccacctgaaaattaacctgaggccttccccaaagcaaactccctcttccttctttctttctttctctttctttcttttctttctttcttctttctttcttttctttctttctctttttccttccttccttccttcctctttctttcctttctttctccttccttccctccttccttccttccttccctctcgctctttttctttctttctttcatctgtttattttgttttgagatggagtctggctctgccacccaggctggagtgcagtgctggcatctcagctcactgcaagatccacctcctgggttcaagcgattctcctgcctcagcctcctgagtagctgggattacagcacccgccaccacacccggctaatttttgtatttgtagtagagatggggtttcaccatgttggccaggctggtcttgagctcctgacttcaggtgatccacccgccttggccttccaaagtgctgggattacaggcatgagccacagcgcctggactattttattgtagagacagagtctcactctgtcacccaggctggaagtgcagtagtgtgaagacggctcactgtagcctcaagctcccctgcctcagcctcccgagtagctgggattacaggtgcccgccaccacgcccagcttattatttttttatttttgtagagacagagtcttgttatattgcccaggctggagaagcaacattatctgagatggaactttctggaatattaaccattaaacctccccaccctcatgagaagctcaaaccacaagagaccaaggggcagctcttgctgcacggggccaggagctgatggcttcctttgctccagatccacctgccatccttttccaccccatcctgggtccaggaggctgaccccccaggtacctgcctgggttcctactttctggctctggttgggtttggccacaggagatgctgagaggagatgggtgcgcaggaggggagaggtgaatgcacccccggccctgctgggtctggtcgggcggcagttgcactgtccccctggagttgctccgtgcccctgggggccaacgcttctcccacagccacatccagggtgcaggggcttcccctatggcctgagcaggcggtgctttactgtacctattgtctttcttgaactctgccccacctcagtaaattgtctcttcattaaaccctatgcagtgaggccaggcaccacggctcacgcctgtaatcccagcactttgggaggccaaggcgggcggattgcttaagcccaggagttcgagaccagcctgggcaacatagcaagattgacctccatctctaaagaaataaaaataaaaataatcagcctgggcca

SEQ ID NO: 49190 - DNA, 1889 bp, Homo sapiens
gaggcgggaggatcgcttgagcccaggggttccaggctgcagttagctatgatcgcgccactgcactccagcctgggctacaggttgagaacctgtctaaaaaaaaagaaaaaagaaaagctctcgattagccccatctgtgggggctggggatgctccagaatttctagggttcaagggcagcagcctgattgcaggtggggatcagggcatttcttggaggctgcatctgcggggcaggctctgtcctctgtgaattgggggccttgccaagttcccccaacccttttatccctgctgcgccatcttgggagcagggaactgcttgggagcaggggattctgtcccaggaagggtcgagaaagttcctggggggcttcaggggctttccacagagggagcacggcgggggcggaggctccctgcagggagcagcgctgaggtagactggctctgaccttggctctctgaagggagaaaaacttaatcgttcttcaggtccaagagctccaaagacccccaatcctcagtaactcatctcctgacaaaagaccttgcgaaactgccaaagcgccacacttcggctcgcgattgtgaggaaattggttgaggaacggagtgggacgcccatgccgcttcgccagcacttgccaggcgttccgtggggcagcatctcctctgaagggccgccgacagtaccacgccaatggaacggcgtaccctcctccactgcagcctgcctaaccccggactgcgcgcccgagctgtgcgcatgcgcggaccgtccgcgcggtcgcaacgcgcaggcgccgtgtccacttccgggatctgtcagccgctccctctgggcttccgtcctccgcccgcgcccgacggagcctgttcgcgtcgactgcccagagtccgcgaatcctccgctccgagcccgtccggactcccccgatcccaggtaacggccagcaggggcgagcgtctcaccctgtcggcctctcttgtccaggcctggcgccggacttgccgcgggggcagtgagacgggggctcaggccgcggggccccgaggctgaggcgcggccgggtctccctgccggggcctcctgagggggcggggatcccctttctccgtggatcccctgcagcttttctcaggatgttcgagctcctagccgcctccgatgcccgaattaacggccccttctgcgcccccagggtcctacttgcacctctgctgggggcatttgtcaccgtctctaaaattgtgtcaagtaggaggatctcccgtaatcgagcgacccgcgggactattcatctctttagtgtctagagtcgatccctgcatacagtaggcgcccataggatgtttgcctgctctctagggcagccctcaatccttcggttaatggggaaccttctcgatctcgagaaaaaccttctcccgagttcttttaagatttccctgcatgagtaccgccttcccccaagtcaaaattgcacccttctcggcgctcttattcatttagtggaatcttttatgccagtcctggcaccaccactttgttgagtgatcctgggaagatgcttctctgcgcctgtttcctcatctgcaataaaaagattcttaccgttttgctaagaatcaagtgagcttatttgcataaattgcttagaatagttcctggccgagagtaggtgatcaataaatattagctattattactgcttctgggcattctatgcatatccgtcttcctttccttttctatctcctccactctccccaaacaccaaccctccagacttgaagaccagaatggtgtcagccttatttatgtttctagccccatcccggtatttacaacactgctgggaacatgataggcacttaatcag

SEQ ID NO: 49191 - DNA, 903 bp, Homo sapiens
acccagcctataaaaattttaaaaattagccaggtgtgatggtgcacacctgtagtcccaagtgctcgagaagctaaggcgggaggatcacttgagcccaggagctggaggcttcagtgagctgtgattgcgtcactacattccagcctgggtaaaagagggagaccctgtctctaaaacatattaattaattaagcggataacttggctcacatatctgaatctttggaggcaggttgggctcagaccttccagtcagaggtgaccagagctccggttacttctctgaccttctctcggctctgcactctccctgcagcttcccttgttgctgttccacttccgcgttccacttacgagtccagattcctgcagctcgctcagaaggggctttgtgcgctggatcatcagctgaagtcctgggctttgctttgattgggtcatcttaggtcacaagtgcagcaggacagggaacaccgtgagctgatttagaccactcagggccacttggggtcattccctgggcatctacaaagcggcagaagagtaggatggaagccagggaagcagcaacagggtcacctcagttaccctacacttgtccctgtgggaagagggctgccggtacagaccccttgaagctttgtatctgcttgaactaaaaccaccgcctgtgtttgctgaggttgccgacatctgtctgagaaaatacgcaggagcagcaaggttgggggggctcagaaaagttcgagcacttcctgtgtgcacactgtatgacccgattcacacacctggacacatttaatcctcccaactaccctagggggtcgaattcagtggaaaagagagcggcggctaagggcacctccaatggggagggtgtcggggcaaagcgacctgaga

SEQ ID NO: 49192 - DNA, 1910 bp, Homo sapiens
agaagtgaagccgattgacgtaaaacagaaaggaaagaagttaactggccggccagcgtcagcaggggcggccagtgtcaccctgcccggggacagcacccctgtttcgtggcgaggacacggagggccaagggggcggggccgggctgccctggccacgcccggaccgcctgctccccgcccagggcctgcacagttggcgcccaccggcatcagcgtgaagggagctcctcgctggctgccgacggggctgcagggctcgctagccgctcacctgcgtgtgagcgcggagcccgcagtacccgccgtccgggctcagaggacgtgactccccgaccctgcgcccggcagtccccgggggccgtgcgcccggcccaggctcggaggtccagcccagcggcggctcaggctgcgcgcctggctcccagcctcagtttccccattggtaaagcattgacggtggttgcggacggcttctgcggacagagccttgggctccgacgtctgcgcgggtaccggcagcacccccaccccgaagggagggcgggacctggatctcgcgaccgctgccccaggtccccgcccccgggccctaccgggctgaggtcggcaggccccgccccccgcccacgaggaagtggctgctgctccggcgcggagcccagagccggttcggcgcgtcgactgcccagagtccgcggccggggcgcgggaggtgagggccgtgggggcgcccggaggtgggggtcaggggagccacctggaggtgggggggcgcgtagatgtggggcgccgcctgggagtgagcgggactggagggatgagagggggtgcaaggaggggaccggggggcgcctggaagtgaggacgcatagatgtggggcgccgcccaataggggcacggggatgagtgggggcacatggagaggagggggcgcggggacgaggggctcacggaaaggagagggagccctgggattggagggggcgcgggggtggccgcagggccagactgtggaaacgcgggctcccagcgcaccgggcgccctcggggcgtccccagcccccggccccaagcttccgcctcgtgccttccgcccctgctccccggcccccatccccagccttgccccgcggtcggtcggtgtagccccgttacttcgggccggcggggccccacacccagtcacttcccctccatccccggagccttccgggttgcagccgccgggaaatgagctggcgtctcctgccgccccgcccctgccctcctggccgctcccgctgctcccacccgcctcccccgggccaggtccgaggggtcccgtacggggcgggcctggctggcggggtcccggaacgcaccccctcagctgcagggctccgcggccagggcagatccgagcagcccctccctttccggaggcgctgggagagcagccaggccgcctagggcggggcggggccgggctgcacccgcgggcagtgaagggatcaggagtgcaagcctggggagtcagacctccccctgcctcctctgccaatgcagcccggaggctaccaccacccatcccggccgggcgcggtggctcacacatagaatcctagcattttgagaggcccaggcgggaggatcgcttgaggccaggagttggaggccagcatggacagcattgcgagaccctttctctattaaaataaataaataaaatgtagccaggcgctgtggctcatgcctgtaatcccaacactttgggagtcgaggtggacggatcacttgaggtcaggagttcgagactagcctgaccgacatggtgaaaccctgtctctactaaaaatacaaaaattacccaggcatggtggcacgcacctgtaatcccagctactcaggaggctgaggcaggagaatt

SEQ ID NO: 49193 - DNA, 867 bp, Homo sapiens
agtggtcagggctcttcaagtcctctcggttgcccttgcccactggcacacgtgggggttgctgtcttcagcagagccagccactccgtcttgacagccagggcagagatgtggctgggcacacagcaagaatgtgaccactgatgctgggatgtcagagtctgtgcatcaacccagggttctgagtctgggctctcccaccctcatccccggaggttccttcagtctgggcctcctggggctgaaagggagggaaaaattggcctcagctggagtcctggggccaaccagagcctgggtggagtgtgaaagtgggcttctggccttcaccctgcccctgccctgctggtgaccttggaccatgggggttgtcggggtgtagatgagcaccgtgaatcagtcacaggccttgagcttctctctgcacagtgctggcatcagatgtgggtggtgatgtcccagcctgggaacacaggaaacgctcagggaaacccccatcagacctgctgacatggctgagggcgctgagatggtgcttccggggccctcaccttacacaaagaggccttataaggagagagaggctgcagaggcagccccagtgggtgccgggtgcttgttctgggtaaggctgcccacacgtgcaaagtgtgcttgtggacacagtgcgcttgcgtgtgtgcaaggctgaacatacatgtgtgcaggcctgcagtgtgcctgtgtgtgaggctcaacacgtgcatgtggggagtatggtcatgtgtgcaaggctaaacatgtgcttaaagtgtggggaggtgcagtgtgcatgtgtgtgtgcaaggcttaacatgcaaagtgtgcttgtgtgtgtgaggctgaaca

SEQ ID NO: 49194 - DNA, 623 bp, Homo sapiens
ggacccaccggggtcctgttctaagcatggaggaaacatgaggtccctgccccgtgcatgtacacatgtgcatgtgtgtgtgtcctgtgctgctccaggaatcttccaggacatcctgatacaagtgaaagcaagcggtttggatctggagtgagcaggaggtggacagggccttccaggcagtgagcgcagggggctttgtgttgtgacctcgggcaggctggtcactgagccctgtggggccaaactgcagccccaggcaaaggtcgttctgcctttcccttgtgcctgggcccagatgcagtgcaggatgggccggcccctgggcagggcagtgacggggcagccaccggcctcctggggcattcagggttcccagtcctggttggctcccagcccaggccctgagacccaacacaaaactgccagtctggtgagggaggcagccacattatctaatggctgtcactggtgactctgggcaggtggcctcagcccccacatctgtcatctggagctgacctggagcctggcatccctccccaagtgcagccaggcctccctgaaagtccagggctggtgggagtgttgaagtcaagaatgtatacagagcacctggccag

SEQ ID NO: 49195 - DNA, 2663 bp, Homo sapiens
cattcagcaacctccttttacagatgaagggactggggaacaatagcagagagacttttccagccacagaataaatcagtagagagctaggtttaaacacatttagctctgtaatgcccaattatctctggagtcaggaagcgatttaggtttgaaaacgctacaggcagatgtttctgtgggttgagtgcattaaccaatataacacatgagctaccaacacaaatatatttgttctgtgccaggaggtggccaggcactttatgagcgctataattttaccaccccggccccaattcaacaagctaaggattagcccagtgtttcagatgaggaagaggttaacttgttcagggccacagaattagacgtgacatagctgggattcaaactggggactatcgattctaaagggggaaacaggatagagaacgggctagaagatagaggacgggctacaatggactgggcagtcatgaacctacttacaagatcaagagctggcaaagccttaaaaataagaatagttactgcttcactgggcacttttaacgactgcctggcactgtactgcgcactccacgtggattacctagttgaagcctcccaacagtactaagaggtaggtacaatcgttattcccattggcaaatgagaaaacggagacacaggaggtggagcgactggctcaaaggaacacaccgagccgctaccgaacgggggagtcgaaaccaggtctggaaggctcatgggcatctccttaagtcctcctaggcaggcctggctgaaccgaagccagaaaaagcccacgttttacgcgagaggcaggcgggcccggcacaagcgcgggacgcggtgactcagttcctagccagccaaagagtgggataaattccagaacccctagacccggagaagcgcatcctagatccggctttctaggccggcgaggacccagagcttccgaaactcctcagaccactgacggagtgactctgggacaccacagtcctcagtttccccatcgggacaattgggcgtcgaggcccaggcctggctctcagccggtgcggacagcctccctctgcgctgctctcagagacgcgcacgggctgaggggacagcggaagccggacctgggccgcccctccaggcctgcgggccaccggcgcccgcccctcacctcctttaggcattgcggctccggcggctgcggcggcggcggcggcgcctcgaactgacaccggaaccggaaatagcttgggctcgacttcttcctcctgggccagccgccgccgccgcttcagtggccgcagtggccgcaaggacccggacctcagggaggcctccgcacgaagtcggaccgtcctgcgcgccgcctaagtccaggcttgcccgtctgctgccaggcaacaacgcccctagtctctccgttcgggaagacgcgtggccctgcctgccacccaccggaagtgagggcaaatggcaacagcggctctggaattctatacaggcattgctgaggacacctaagatgacgcaatctccgcgcgggtagggcggggctccgcaaggacctcatgccttagagatcgcctgaagagcggaagccttctgtcgagaagcagctacccaagctccaggagcttccggtatgtgttttccctctgttctcgattaccttggcaacggctgaggcgggagaccggtggtctgcaccgtcctggagggagatatgagtggctggactctcagccagccactgggatgtgttcgggctttggaccttgaggccggagagagctcccgagaggaggcggcgccacgttcgttcttctgaggggacggtagatttgggggttttcctctaggattctcgcgccgtttcctctggtaggaacgtcttctgtgttctgattgtttttctaagctgggttcagatgctgtcctttttatgagttttccctacaatcctgcactatcttccttcgctcctcctcgcctccttcccctagcgccccaatctctcttacacctcccggcacatctttcttctcgatctgattacctcctacgtcctctttctcctcgatctggttaccgcctaccattttcacctccgagaggcctcttctgacttccaggctggatcagggccctcgaatttccctgggtcgtagaaaagcgatcattctcttgtcacagactatgcgccttggggccgagaccagaattcacctatttttagcttcagcgtaggggagactagtgcgaagaccactgatttgggagtcaggagccctccagagtcaggttttgcaaattctcagctgtgtgaccctgattctaccttatagagtttgattcctcctctatatggttgttttagagagttcatgagaggaggctctgtgggcggggggggggtgggtctttgtaaagtgtcagtacagaagggagtgactgaatgaatttgagagagatgaatctgttatgctgaaaggtaaatacttaacctgggttctctctggcagcaaggaaatgctgtgtggtttgaaaaacgctttgctatttagattgggatcggcctcttgtatgggaactacctgactttatgtaatatgttgtttggtgtgaaagagaccttggcaatcagccaatcc

SEQ ID NO: 49196 - DNA, 1556 bp, Homo sapiens
tgtatagtggctcatgcctgcaattccagcactttgggaggcccaggcaggaggatcgctttgggcttggggccaggagttcgagaccagcctgggcaacatagcaagacccgccacccgcccccccaaccccgccgtctctacaaaaattaaaaataaaattttaaaaattagccaagtgtggtggtgcagcgtctgtagttccagctactcgggaggctgaggtgggaggatcgcttgagtctgagaagttgactgcagtgagctatgatcgtacccctgtactccagcctgggccacagagcgagaaaaaaccctgaattagagacacgctgcggccgtccttcctcggagagacccgcccctcctcagaggcccacccggaccctcaggccaacgccgacccctctccacacggacttctgcagcctcagtttccctcctcagacgcccccggctccaatcccggctcgggcacttccttcccctctggcgtgtcttggcccgggtcccggggctcctgcgaggatcacacaggaactcacttgaagtgtccggcgcagtgcactccgacggggagccctgcccggtccccgcggcgaaccagtctcttcctcgggtccccctctccccaagcgcgcaggcgcaatccgcgtcgccgactcacgcggctggtttcaggtttctggcgaggccggtgttcggctggcggctagctgggactagcggaacggcggagtctcgattggcagtgcctggacaggcgcaagggccggcgcgggctccgggcgctcccggcatccctcgggcggcggcggcggcggcggcgaggcgaagcgaaggaggagtgtgtgcggcggggccggcggcgggtaaaggcgagaaggctgcaggagaccgagggggagccgggccggtggggccgccgccgccgccatgcaggaaatcatcgccagcgtggaccacatcaagtttgacttggagatcgcggtggagcagcagctgggggcgcagccgctgcccttccccggcatggacagtgagcgcggggcccgggcgggagggcaagagcgactcgaacccgggacccgctcctctgtgatcccgggactccctcgcctcggtcctgagacctcccccggcttcctctggatcctgggacccctcccctttggtcgcaggactcctccctctaggtcttgagagtccctcccacctcctccgggtcctgggatcctcccctttagttaccgaactccctcatctgtggtcccgagactcttcccactccatcctgagacctcctcttctggatcccgggacgctccccttggtttcaggactcctgactcccaggcccccatttccaccgtctggggactccttttaccctcactcggactcaggagttcactgcctcggatctttggccctctgcggctgttcaaaggtaatctgtaggagggtagaccttgtctgttcgcttaattcttgaataagggtgggttatcctggattggaactctccctcaacactctcccaactgcaggagagt

SEQ ID NO: 49197 - DNA, 1928 bp, Homo sapiens
agctactgcactctagcctgggcgacagcgtgagactccatgtcaaaaaaaaagaatacagaaacgcagtggctcacacctgtagtcccagcactttgggaggccgaggtacatggatcacctgaggtcaggggttcaagactagcctggccaacgtggtgaaagcccgtctctactaaaaatacaaaaattagctgggcatggtggcctgcgcctgtaatcccagctactcggaggctgaggctggagaatcgcttgaacccaggaggcaaaggttacagtgagccgagatcacaccattgcactccaccctgggcgacaagagcgaaacgccatctcaaaaaaaaaatgataaaaaaaaaccagaaactgagctaagacacacatgtgttaatcaaaactctgccactatcaggctgtgtgacctcagagaggccacaccacatcccgaacagttatttccctcatctgtaaaatggaatcgactttcccaacaaggactctctgacaaggctactatggagcatctagggctaactattcaaaaacaaacaaacaaaaatcatcagtgtgcacagcgggatgaatgtagcgatttacacatgggtgtctcggaaaagcctgctagtcataaggccgtcctagagaataaagttcatttaccacgaatcctcaggtttgaataccagctcagccctcgcacgagttgtgaccttgaacaggtcacctcgcctctctgattcaacatatatgcatcgaaccttacatggtatcaggtacagtcctagtcctgagctcctcctggagcttcatctgagcttaagccttgggaaaaaagggcaaaagctgcgcctaacattcaagtgcaaagcaactgggtcgcagcgggagagggaagcggctatttcttagcggaaagaggaacagtggcccaaggcggcgcattcccaggcccagaagcgcgtgccccagatgccttcaccctccacgcctaacccggttggcgcaggccctgggcagcaggaaggcgcgcctgggcaggcggagcggggtctggcgcgcctcaagtgaggtcgtggcgaagtgcctgagcaaagggcaggcagctccgcagcttccttctctcccagtgtggctctggaccctggaccctggctcctgcttccaccacggagtccaaacagccttacctggggccggacactcaccaactgacgccattttggagtcctggtgtccgctgtgccggaccgcgcgagggctgctgggtagggaatgcacgccccatccaggggcgtagagcagaggctcacgggaagcaggtcacaactgcgaacaccctggaactactagaaggccatgaagcgaagggcgaggtgcctggacagcaaaaatccgagggtcctgcagttagagagaggggcgcctcagcctgggctctctaccttaaaaggtgggaagaggccgcgctgggactacaagcgtgcaccagcacagcaagctaatttttgtatttttagtagagacagggtttcaccatgttggccaggctggccttgaactcctttcctcacgtgatccccccgcctcggcctcccaaagttctggggttaccggcgtgagccaccgcgcccagtctatttttatttttattttttacttttcagacgagcatttacttttcagacagtggcttgatcacggctgactgcagccttgaactcccggagtcaagcgatccacccatctcagcctcccaagtagctaggactacaggctcacatcaccacttccagctttttttttttttttttttttttttttttttttttggtggaaacagtgtggtgaggagtgggggtagaggctctctattttgctcaggctggtcttgaactcctggcctcaagcgttcttcctccacctcc

SEQ ID NO: 49198 - DNA, 496 bp, Homo sapiens
gaaaccccgtctctactaaaaacacacacacaaaaaaaattagccgggagtggtagcgggcgcctgtagtcccagctactcaggaggctgacgcaggagaatggcgtgaacccgggaggcggagcttgcagtgagccgagatcgcgccactgcactccagcctgggcgagagcgagactgtctcaaaaaaaaaagaaaaaaaattaaccccttactcacattaaaactgtattttgggggtaatttacataagccacacaattatccttttaattaagatctaatattcttttttttttttttgagacagagtctcgctctgtcgccagtctggagtgcagtggtgggatctcggctcactgcaagctccgcctcccgagttcaagtgattctcctgcctcagcctcccgagtagctggcactacaggcacgccgccaccatgcccagctaatttttttttttttttttttttttttgagacggagtctcgctctg

SEQ ID NO: 49199 - DNA, 1149 bp, Homo sapiens
gagccaccgcgcccggcaatttttttgtatttttagtagagaaggggtttcaccatgttggccaggatgatctaaatctcttgacctgatccgccggcctctgcctcccaaagtgctgggattacaggcgtaagccaccgcgcctggcccatttttcttcttttatctgataaccttactcccctccacaaacacacagccaaagaaacgaattgtgtcgctcttgaatcatagaataattctaaattatgttacgattaaacaggaggggcggggccctgtccatcacgtgactctctcggtgctgtctccggccgttgattggcctgggcggggagggcggccgttgattggttcgggcccactcgcgcgggcgccactctctttgtctgacaagagagtcgtgaagcctccgcggtcctagaggggccgctggctgggacgcttcgctcggcgcgcgcaggtggagccagcgagaggctctgaggctgccagagtggttgtgtctgttcctccggtaaggggtgattcgccgaggggcgcggaccagacagacctcgggtcaggcccgggaaccccgagaggagagcccagcccctggtggaggcggcttggcggagattcggagccgtcagcaggtttggggagaaggaaacgagtgttgtggggggcgtgggtgcggggggtaggccactgcgcacacccccggctcgcaggggacgctccgggtttgtgcggcggctctcggggcctgtggcaccagcttttgagtatttttggcggtgtcaagtcttcggcagcgagaggagcaaagtccgaagaatgaatggatggtgaacgcctggacttggttttgttagagtgggagatgagccgtggttgttagtggaaggtgttcacgtgattgtgaagcggcattttggattttgtcaaaagttaacagtcccctccagttaaagttttaagagtttattgtgcatgcagaggaacagctggcaaattgttccaatggcagcttggaaagctaaatgaggaagtgcagtgatcttgattgtaattggccattatcaacttgcattccttctagggtaagtcgagctggatcagcctcgcatctgtagctgattggttcagtttatcatgcggacg

SEQ ID NO: 49200 - DNA, 1277 bp, Homo sapiens
gaggcaggagaatcgcttgaacccgggagtcagaggttgcagcgagccgagatcgcgccattgcactccagcctgggcaacaagagtgaaactccatctcaaacaacagcaagaacaacaagaaaaaaaaaaaaaagaaaagaaaaagaaagaaaaccagtaatccgtgttcgctttatgctgaggtctataacaagtcatttcctggatggatctgtcactgtggcctacagaaaggaagtccatacacaccccaatgttcacacgaaatgtaataaggaagtaagttccgaaacgcagagcacccctaaacgcctattttccacactcccacctccagaacaggcctttcgcttctcacctgggatgaggttccatcgagcgctcgctgcagagcccgcaccacggccaccgcctcctccccgctctctgggcagtgctctcgcacccaggcttgaagctcctcgggcaggatggtgaggaactgctccagcaccagcagctccaggatctgctccttggagagcagctcgggtctcagccaccgacgacagagttctcggagccggctcagcgcctcttccggtccagccacctcctggtaacgcagctgcctaaagtgcagtcgagaagtttcggggtccggcgaagccgcgggatagttgggctcccaacttccgggtgagtcttcctccactttcacgggcaaaagtccgtcgcgttgggacggcgccgcgtccttggacctcgcagccatcacccagggtcccaactcggcgtcactgccgcgcctctgggcggtcaagctggaattcatctttctccggcatgtgctgcccttcctggagtcttcttttcaggtgaagaaagagcaaacccaaggaactcatcagccgtcaacaccctccggtcccaaacaccgggccccaccacaccaggcccctctccacactctcctttcctcagctttgcgcctacaactctctcggtcaaacaaccgaaaacatcccgtgccggaagcgcgtcatcgaggccttgcggcacctttccctgcatttccggggcctctctaggcgcctgatggggtgaggtgcatctcgctggtttatcgtcctagccccgcccgacgcagagggtcttgacggtttcccgcatcccgaggaaatacgggcgtccgagccggtggccgagctccggcaagggcgggaaccttcaggattaaatagacagggtctggctctgtcgcccaggctggactgcagtggcgcgatttcggc

SEQ ID NO: 49201 - DNA, 1759 bp, Homo sapiens
accgagcccggccaagggagggtatttctaatagacaggggtctcgctatgttgcccgagctggtctcgaactcttgggctcaagcgatcctgcttcttcagcctgtccactagctaggcttacaagcgtgggaccccgcgcctggctgaagagaggtatcattaaggacgagacccccttggccagggaagccctgcgtaagcaacgcccctctcttcaaagggatgccccgctccctccgcccactcccagccttccagccttggctcccgaggacacgactccgggccctgccaccttctgataggctcgcgagaccgaggctgcaaagagagccgccccccattggccaaccggcgagtcccgcgcgccacctcctgggagatgtagttccgggaacagctggcccctgcgactcgcgggtgtgacgttgaagatgtcggccttctgagccgactgcggtggtcaagaggtgggtttgtttggaaagtgggtggtgagagtagcgaggatgcgggtgaagaaaacctaagggccccaaattcaacataagcgaggtttgcgggctgtcagcaaggtacagacctacttcaaatcggggcgcagagcgttgggggtgggggaaggcgcaagctccccggccaatcagacacgagcaacctcagcccaactctggaggccccgcccccttccccgccccacggaaaggggaggagcttgggctgtttgaatggctttgggatggagcaggggagagagtggctccgtttgcctccccgctttggtgatgctgtgcgagcggcttcgggggccctggagacgtccgagtcactgagggtgggctgggactcggggcccgcgtcccatctccccgccgattggtccgccccccgtgcgaggtgaggtcctccgggattcctagagaggacgcggaagtgctttcgggggggggtgggatctaacggtttaaccccgttggacagggcaagattggacttggttacttccggcgaggaagtgttggggagtgtcggcttcggtttctctccgtgggaagaaccgcatcttcccagcctcggctgcggggagcttgatgttccaggagagctcccctagagtggggccttgaggggagggggcaggggcttcgtgactggacgggggtcctgtccctaaccttgaccgggccacagtctctgtatctcggggtcaggggccattctgaggaatccaggtccagatctgtaccttataaacgctgcttctctttgggaccgatggagtctccccttggcctgtcaagctcttgtagcttagagaacaggctcagttttgaccattataatgattttcacccttattccgacttaagttcgtcttatggtagagagaaagagcggctgcgtctggactagttagtctcgtcccgttatttatatggaatgtaaagttcttcactctaaaactgtgttttaggttgggcctgatgtcagatttgtatggctctcttttacacttttaaaatgttggggttattccttattatcattttgtgggtgaagtgatggctaccttgtagtacctatttttaagtaaattactttgttgagtggtcgtctttagtatagatgacctctttgccatctgtctttgctaataatgatgcccaatacatcagtaggttgcatgctactgaaagtgtccttcagaagatattaaagagcagaaaaacaattgtttcagtgtaacacagccagc

SEQ ID NO: 49202 - DNA, 1298 bp, Homo sapiens
aggaaagggtgaagtgtaaatgagcttttcctattatatccaaatcacttctttattcagtaggcttcaaacattctctttttttgtttttgagacagagtctcactctctctctctgtctcccaggctggagtgcagtgacgcgatcctggctcactgcaacctccgcctcccgggttcaagcgattcccctgcctcagcctcccaagcagctgggattacaggcgtgtgccgccacgtctaattttctgtatttctagtagagacagggtttctctaggttggcaaggctgatctcagaactcctggcctcaaacgattcgcctgcctaggcttcccaaagtgctgggattatgggcgtgagccactgcgcccggccttcactctaatcaccaccataatggtactgggtttgagggtgaacatatcatccgcggacactggcttaacgagcccatccgaataaaacaaattataaggccaatggcacttggtatcgtgtaagatcgccagaattttacaactcggggtacccaggaaaccagaaaagcccccaccacaagaaaaaccagtgggcacaactggggagcacagatatctgactggggtcattttgtccgcgcgtctttggggtaaaacaccaggactgggggtccagaagggacacgcagaccgcctctctccagtcccaggggtgtctccaatccggaaaccaaaacttcgttcccttcccacctgtatccagggacacctctgctgggggacagcgcttgccaccgccgaggctggcgcgaggaacgggggcacggacccgcttccactccgtcccgggcggtcgtggcgaggggattgcaggacacagccatgcacgtccaactctgtccccgcccggagaagtctgggatgctgggatagaaggggttgtgactttggggaccaggagcactagactcacatccaagccccctggccttcagagcccagggaaagcgtcacaaaagccggaagtgcgtcacacccgccttccggagctgcgctccgcttcggggtcctctctaggatcgcgggaggactttgcatccctgtgtagggctctaatctcgggtttggggatcttgctcctcagcttgtccgctccgaggaggtgcacagggcggggaaaaagggatgaatttccctttataccgccctgctcagatatttatatgttccttctatttttcttgatgacaataattgtaatagttacaataaaaatagtgattgtctgtggcagaggagctgaatgaaacgagggt

SEQ ID NO: 49203 - DNA, 2355 bp, Homo sapiens
aagtactgtgtcatctattgtcctggggacctgtcaacaggaacaatagatagacatcaccaggggtgtatttctgttcaacacaaggaaaagtttctaattggagctgtccagcatgaaatggactaagcagtgcattttctttctccgatcctgactccactgtgacgggcactgcagactagagagattgtgtcctagtatgaatttaggttggataaatgatacttagggataaagagaggaaaggaatatcagaatctccaagaagctgatacattttgaaaaaatatataaaatgccacacttcaggttttcttgtgtttaatttgaaacgtccagtaacattaaagaacagcatttgatttgcttaaacaaagtagtaacagctgaagttccttccaaatcacttttctgattctctaagaggcttgcctatgccttgcagatctagcttcacctacaagacatattctgtaaggatccaggttcagcaaggtgtcagaatgtcctaagggtttctgtcccggcgctctgcctgtcccgcttgtgcacaatgcttttgcctatccctgtttctgcatagattttagtcttcccaccagggacgcaactgtcagtttcctccgtctctctcggttctattccaatctgctcatctcccctcccgtccccgctttccccaaggacctactgagatttcgatcccacaacttagtgggtcccatctcacccaggccccgcaatcctcgccttctacttgtcagcgttgtactacactctgagcaggcacccctgtgctactcacggaagcgggaccattaggtcggccattcctcctcaccccacgacacgcacccactgggtcgggccgcctccttgcagggagtctcaaggatgggctggcgtcagggaggggcccagggggcgctttcccaacactggtcgcagtcattgttggtataacggctagagacgcccagtgagttagcatggagggcagtgggaccggaaaaagacgtggaaaagctgcgaaaacgagccttcgaatcatggacgcgcgggcccagctcctcctccgagttcctcatccggggccgtcactcacatccggggccctcactcacatccgggaccctcatccggggctctcacccacatccgggaccctcatgcctgggcggaggagggggggccctcattcgggaccctgcactccgtcgccggaagtgccaccgagaagcgccggcctcggggctgtctacagcggcccgggagaggctgtggtggccccgagcgcgagtgtgtaggtgacaggacagcggccaggcccgcccctcccctcggtgagtacccggaagccgttttggggtcgcagcggggtggcagcttgttttgccttcacgggagtagaaggaggcggcgtccggccgcggccgacggtagttcgcttccccgagagtgcgcggaggcccgggtgcgaggagggcctgtttctcttcagccctggttcattcacctcgcggaccgagggccccgccgtcaggagccggcgaccgtgccctggtgcgagctggtctgtatgtcctcactggtccttttgggactttgccttggcctaaaagggaagtgggaggagggcagcgccgggcaaggccttctgaggaccgagctgggagccgggcaggggcccagggcgagggtggtgggagggggacggcaccctcatgcgtccttgggcctgaaggacgccgctcaaacctgttcgaaccgcagctcttacctgcgttgctctcaggattccgggaaaaggccggtctagctggtctgagttagcgaagggcctgaccccaaaagtggagttttattcgccaagcccgtgtagtaaatcggagtgggctgacggtgttaccaagacatttcctagggggcctgctgttttatttatttaaatgagtttatttacgtaaacgcgggcctgtcacggtggttcacgccgtaatccccgcactttgggaggccgaagtgggaggatcgcttgaggccaggcgttcgagtccagcctgggcaacatagcgagactcccatctctgctaaaacaaaattaaaataaaatgagcaatcataactagcatttttctctgggcaccaacttgagcctccaaagacgattgtaaattttaaatattttgttttgtttatttgaggtgggctgtcacgctgtcatacaggctggaatgcagtggcgcagtcatagctcactgcagcctctacctcccaagctcaagcgattctcctgccttggcctttggagtagctggaactacaggcctgggccacctaattttttttttt

SEQ ID NO: 49204 - DNA, 2379 bp, Homo sapiens
accctttcttgttcttgggggccttacacactggttgagacagcacccattcacaagagaaacgctgatcaagtgtctagaacagtgcctggaaagggtcagaagtctgctaaataaccctagcccaggacaagtccccacaagtctttatgctttgctttgcccatctgcaaaacaggtatagtcttactcttctgtaagaggactgtcatgtgatgaagataaagtgaaatacaagctttcctaagaaaatcctgtatcacaggtcaaaacacgcataaggcatgcaagtactgagacgaagcagagtagacacacccaatacctgaaaaatgttcattggttttactagagtattgaggagggtcctgctgacaccccttgggctggagaggcctcctctgaaagggagccctgggaaagggctgctctcactcttcactcctttctcctccctcagctccacctgttcctcaggtgcctgctcttccccgtgagggaagcccaggagaccaggcagctgcgctcttgacagccaggtaccaggtgagctgaggaaccctctgcttttcctcagggactattgctactgatggagtgtggcctctctctcatcccatctgtagaccttgcctggaatttttttcaatagcagactccagtttgggaattgatcctcttcggagacctggacttcacataaaccaacttcccatctccccagtgccatgagcaaactctgttttctctttgtccatggttgtgtgatgggtgcttattagatgtttaagggttatgggctttattccgtaggttctaatctgttctccctcctcctcaacgtaagtacacagtggataccctctctatgatcttcattctctggccatggtgctacagtgttctcattcctcagagcagccaggatgtgttatttcaggagtttgtgacattcgaggatgtggctgtgcaccttactcgagaggaatggggatacctggaccctgttcagagggacctctacagagaagtgatgttagagaattatgggaacgtggtctcactgggtaaggacttccttattattcggtttatctatttgaatttctttactttcttgtttcttcctaagtataaggtctctgagaaggtctgtagagtgtggcttagattccaggacttagaacctctgaatccttatctttcacatcgtcttctccgggaggggtaattaacgtttgtttgggggtgccaagaagagacattctcctccttatccccagttcatgtttatggccattgtggggcatcttttcccttttagcaaagggaaactttcttgtgctttgcttgatttctcaccgttcttttcttttccatttttgtaggagagaccccagggtggcctcccaacctccaaccagacactttcctctttgttatctcagtgtccctgtattagagaattgaagaatttcccatttttctaggaaaaagaaatgccgtttatttaaaaagacaggctaaattccttcttgttgagtagtccctcaccccttaagatccccagatgtatctccaagcaggcagaacttgagatgtcatttgaaggcatgactcactgtgagtacatttcagtgagtcacccagaatggtaatcccacgtaaccacacccagggcagcagaaatctcagatgtttaccccatgctgaggtggggtcaatgcttaactcatgtctctcccttgtcattttgaaaggtacagtgggaagctgggattagccaagctgtagtgctgctgggaagcatcagtggggtttgtcggcagctcccttggtgtgagcattgttcctttttctttagtttattttttatattatattatattttttattttattttatttttagatggagtttcactcttgttgcccaggctggagtgcagtggtgcaatctcaactcactacaacctctgccttccaggttcaagcgattctcctgcctcagcctcccaagtagctgggattacaggcatgggccaccacgcccgcctaattttgtatttttagtagagacggggtttcaccatgctggtcaggctgatctcgaactcttgacctcaagtgatccaccttccttggcctcccaaagtgctggaattacaggcatgagccaccgcacccagcctcctttttctttagtttcttgcttgcttctgcactcttctttttgtgtgtgtaaatactgaatcatgcattttcttttcttttttttttttccgttggctttgtctatgctggtggcatccagggcattgctttgtctccctgattatgctcaggattcaaggtcttcttatttgtggggaggcaggct

SEQ ID NO: 49205 - DNA, 1596 bp, Homo sapiens
agtaacactgggccacccagttgagacagactgccttcaggctggacgcggtggcttgcgcctgcagtcctagcactttgggaggccaaggggggaagatcgcttgagtccagaagttggagaccagattgggcaacatagagagatccccctctctgcaaaaaattgaaaaaaagtcccagctacccaggagactgaggtgggaggattgcttgaactcagggcttcgaggttgcagtgagctatgatctcaccactgcactccatcctgggagacagaacaagacttctctctctctttctcaaaaaacacaaacaaacaaacaaacaaaaaccccccacaaaaaacagctccgatgctggctcctccaggaagccttccctgactacacatacacacacgcacgcacactacccggggtcaggagcctcttaagtgagccggttagatccagtgcgccccctatctcctctgcccctacgcctcgcgcaaggccctcgcagccggaatagtcgcgcattgaccgactggactctaaagccccttggggcaggtgctgtgtccagtagtgtatctggcgatgcaccgagtcctttccacggagggcaagcaggtgaaatggcacggaagtggaaggggcctagccacagagcgcctcgagctgggcagtcaatcctggggaagccctggtggtcttcgcctcgccgggttcggaacagcaggctgggatcagcaaccatcgagacgcatccgccgagacctccgagcatcctagagaggacacggaagcgagtctttccttacgcacctgtctaacagcgtccgcagctcacttccggaccgcggatagcactggcgaccctagcgggtgagaggcccttcagggccgcggcgggtgagagcctcttcagggccgcagcgggtggcgggcgaagtggtaaacgggcgcggggacgggttttggtgccgctacggggctcggcggcagcggggttgcagtagagcccgtctccctccgctcagccccggctgagggcggcaagtctctcaggagctgccttcagcggccccgaggccctgcgggtctggacgctgaggggccgccgcgctgtaggctcaggtaggagcgaggctgatcccgctctgccaggcttggcttagtgcagggctggccacgaacccgaagagatcttgaaccaaagcagaactctgtgcaaagtgaaagtaatcacataggacacttatttaaagaatagtgatgagccagcctggtcaacatagcgagaccctgtctctacaaaaattgaaaagtagccgggcgtggtggcacgcgcctgaggtcccagctactcgggaggctgaggcaggaggatcgcctgagcccaggagttcaaggttgcactgacttacattcatgccgctgcactccagcctgggcaacatggggagaccctgtctctacaaaaataaataattagctggtcatggtggcactcgccagtagtcccagctactcgggaggctgaggtgggaggatcgcttgatcctaggaggcaaaggctgcagtgatcgcaccactggtctccagctggggt

SEQ ID NO: 49206 - DNA, 2821 bp, Homo sapiens
gtgactgagtgattcaaagtgaagtacagcgagtggtctctgatttcgtattagtgcagccacaggaggtggaagtgctgagcttgcaggaaacatagaagtcctctactccagaaaacagagaacttggtcagctctgacttactctgtgaacaagtattatgtgcagactccatgctagcactagggacaccatgaccaacaagacaaggttcctcccatcagcaaacttgcaggtaggggctaatgaaagtctagatcccaagcatcctgaatcaccagccagtaccctaaaaatttcattctaaattttgcttaataatacagtaatgggaaaacaccaactatatccagagtgcgaactgtgcctaaggcctgaccttgtccctgaattcccagaagagcatgctcaagacacctccaaggaggagtgtgtgagatgtctactgagagtataagggagctggcacaggactgcagccacagataggaccaggaggacctgtgctgtcttgtgtcttcagtgaagtggcttaaaccattagggatgaggacttctcaggacctcagcctgcactcttataattactacagaggaaatagcaagtaacgttgaaagcaaatggaatgtggaagcatgttttaaagtttctgttaaattcagagagctaaagggcacagcatagaaaaaacagaaaggaataaaaagcctatacacctgaaataacatcatggttaaatggtttatggcatatgcaatatatacatatatatatatttatatatatacatatatatgtatatttatagtaatataggtcagtggatagtttcctgttaaatcaagtaagcagcaattcaaaccaaataaaaagtgataccattctaatttttaaaaatctatataggcgtagaaaaatgcccacagggacataattgattatctttgtcttgtgctgggactgtggatggatgtagtttcgttttttctagtctgtggtttgtaaagtttgataattatcacttttttgtgataaaaagacttacaagcaaatgattgtacaaccacacgattgtcatgtagattaagagaggcagaatatgcttgaaccagcctgggtcagggtgagctccatttccctggagacttgtacctttcagggcggaactcctcaggctctgtccagtactttgggtcatggtgaagagcataagttggaatcaccaccattgaccctttgggaatgaataccccattgatttcaacatctttcttgcaagtcctctcaagtctaatagcaactgggaataatctgagtgtttcattcaccaccatgtcaaggtactccatctgtaccacggcatcataggtaggtggtgcctggaaggaaagaaacagaattggataatctgagattttgaattaactctcaactgagtccatgcagtactattgaagtattagaagctccagagaataactcatactggtaaatgatcatagtattcgtgaagtattttaataactggcatgtccattgatgtgctcagtgacctactgagatgtgtggaggagttatgaatgtaggagatattcaagaccatcctcaccccagggactgaaatccttagcatgaccatgtagtggtttttctttctcatgggaagaaatgtgattaatggggctatgaccattaccaccaaataaaatacaccaaagtcactatcacctttcaaaaagaggtcacacatctgtaccaagaaagaaaaacagggaaaagagcaaatatcctcttcacacaaggattattggttgcagagtcctgcttggtaactcttttgaggagtttgagaccagcttgggaaacatggtgaaaacccatctctacaaaaaatacaaaaactagctgggtgtggtggcgtgtgcctgtagttccagctactcaggagacagaggcgggaggatggcttgagcctgggaggcagagtttgcagtgagctgagattgcaccactgccctccagcttgggtcgtagagtcagaccctgtctcaaataaataaataaataaataaataaataaataaatttgtggataaacttgttcctttctatcacaaatacgacaaaataaatttatgattggatgctaccaaggtacacaatttgagttctagttaaagttatgaagagaatagaaccccacactcagccccatcccctccttttggaatagtttcctagttgttgcttcagggctggactgtaatcttcaggactggatgtaaatgtccctttgtgtctgcctcacagccacaccagggtcagccccacaggccaggtctcttcacactaaaaagaatcccagtttgggcagaagtctgaaaactgtggatgatatgtacctagcacttggtgttatatttgggaggcagtattgtagagggttagagtttagctcaggagtcagataccctggttcctagcttggcttcttggccagtggctacctgactggaacatgagacaggtgtggggagagctgagtcagcctccatcgcgcccccagggccaggctacctcagaccatagccagaccagagtgagtccagtcagtatcagcagaactcactatccagtcttgtgagcaataaatgcttctcattagatgccactgaggtttttgaatttttttttttatactttaagttttagggtacatgtacacaacgtgcaggtttgttacatatgtatacctatgccatgttggtgtgctgcacccattaactcgtcatttaacattcggtatatctcctaatgct

SEQ ID NO: 49207 - DNA, 464 bp, Homo sapiens
tataatgtcactgaagaaatcgaaatgtcaccatgctattaaaagacacaactaaatcaagagatttatatgaagcagtgaaaaatatgttaaagcaattttctttgtcctttgtaaacatatgtgatatagctacagatgctgccctggcgatggtaggtaaaagagagggacttgtacaattaatagatgatgcagttgccacacaaaactcacatttgatgaagtattattgcataatacatcaagaaaatccatgtgcacaagctttaaaagtagataacgtcatgcaaattgtcatcaaggctgtaaatttcacaagggcccaggaattgaatcatcgctagtttcaggaattccttaaaagtatggatgctgactctagcaagtcattcactttttagaagtaagatggttaagtcaaggcaaaatgtaaagattttatgctttgtgatgtgaaatca

SEQ ID NO: 49208 - DNA, 2923 bp, Homo sapiens
ttctttctagagacaggtgtctcactgtgttgcccaggctgttctcaaactcctgggctcaagcaatttgccagtcttggcctcacagaggctgagattacaggcatgatccactgcacccagtcccaccatttctgaaaatgtgaaacctcagaactccctcccaaggaggggcatttttactgatggaactaagctgatgtttgcaaccataagaagcaaaagaggaagctcaagcaactcacctgacgataggacaaaacatttcccaacaaaggcagaggtgtgggccctggaattcccagtctcttaaaaagtccatgtgtacgggtcccatatctacaaagtgaaacagaaatcaggtcacagggattgtgactttatagatcagagggctggtgagttactcaggaactggaatggtcaagagagggaggtaatatgtacacgataaataataacagcaactccaacatcagtaattgcattcactcatcaggtcctttcctgactattctgagacccctgaaaagtctcaatgattagctgaaagcagctgaagtcttcatagtcccaatcctggagtgaatacttgataaatgtcctcaaatgctcctgagaggttcaggcaggaattcttccaggacacttcatttccttatgtctgtttagtaagtggactcttcgctgatttggggactctcatcctaggtagaaagagtaagattttttttgtcttttgcactgatgatgagattttgcatcactgtatgcactcaatcacagagggtcactgggagcctatggtgacactgcccttacaatttgctcagaaatgtttatgctttttcttccctctaagctctgaccctgttttaggatctagcccttcttaaacgttcattcacagagaggccttggaggagtcatggagtccttatttctacagattgacaactgtgttcatggcttctattggccttatagaaatgtgggcagctttcaggtacacctcagtctctgtggtcagatgatctggttgatttgagctgttgaggaggatggttgatccatatgtccttgaatgattgtgtgcagaagaaccagcaactaatacttctcaggtcatactcacctgagaagcacagtgccaggcacactcatctttttcaaggtggtcaaccagaaagcagtcagttcactgcctctgtacgtgaagtatctctgaggaaaaacccattaagcctggtgttcactatggcaggcctgcctggaactcatctttcatgagtcatgtgcaaactcctccaactgatggttctggatccttgcagaccttccccctccggtgtgactgagggatggaaaactggaggaagaagagaggctgaaggaagaggttgccagacactgattcagctgtgaagctgctagccccacacagttggctccagagaggcaaactacaaaaatgtggctgaaaaagatgatgtgcataaaagaatccacatgcctcatatgtactttcagctaaaagacacagagggaccttccaaagtccaggtactttcctgttgatagcaaatggtgcagtatggcatataagataagtaatgataaaacgtcccggagagttgtattaagaccttgtttactcctctttagaggttagccttcaaggcagtataggttccaaacattttgtaaacatccagtgacttataaaatgtgataaaataaaactgagaaattacatgaagggcagggtttggaggactcagcaggggcagcatgagcaggcccagtcatacatttggttccctgccccagaacagttagtggaagtgcgtgcaccacctgccaaagccagggtggccttgggtattcccacttcagttccctcctttgttgtcacagccatgtcaaatcaatgacactaatctctgctcctgaactttaaacacattacctgacctctcaggtgaggacaagctattgagttaatgtgtcagcagcattggcccccaaggaaagatcttggtgagtgtctagattcacatggtaccatgtcaaggcagatgctgtgctgggcgaactctttagtttctttccagctcccctctggtagagtaatgcagcctttgggtccagtgaagagactaacagaaaagccagtcatctattgcatgtaattgtgttggcctaaggagggcctggtctacactgcattttctgactcctgggctgcaccagcattgtctaaggctaaggcattgtctgcctggctgcccgagtctgtagtgaccggcccacaacatggcagaccacacacagagtgacacagatggtgcccctgtgtccaggcttgaagcagatgagatgccaacctgtttgccctttgagtgacctccacggtggggccaggacccatgaatatctctttggagttctaccctgagagctgaggaatattttctcacttcatatggatcctacctggaagcctttgctatcgtcactggctcacagtcttgcttactcccctgtcctgagagtttaagacaatctgctaagcaggtatattcgaaaaggagttattaaaataaatggccggacaggtatatttgaaaagacgtgcagtcttgtcttagaggtatacatttgtgcattagactcatattcctgacattcaggaaaggtgacattattttacacacacttattgtcacaaatactgaactaacagccctgttttaccatccagaaggaacatgctggaaatagtctatctccaaaaaattctggtttaaaaatgaatgaatttaaaccatatcaattcatttaaaaatgttagacaatggaaaccatgttgccacaactcactgaattcctaagctttctgtgaaagaattaaaatgaggtt

SEQ ID NO: 49209 - DNA, 1704 bp, Homo sapiens
tccacctgctctaggatgccaggaatcccaccagtgagagggtttgccctcctgtactgtaacataaaggggaaaaatatgtaaaatccaaattggctttcatggctcctgccttttcaggctgctagtagattcccattaggtgagaaacaaagctctatattaatcctagcctcccagagacgggaggaaaaagattaaagcaaagaataaatcctcgaaacttcctccaggtctcctttgctctagaggttaatcattgcaagataaaccatcctgtgtatgacagggtggaggagtgactcataggagggaggggattttcaggggcatggcacaggaaagagggaagagccaggggacagcttcccatgaagtcttggtgtcccctggtgcgttatgtaaatgatatcctgggttggaaggcgggggagcaggaaccaggtctacaggggcaatacagctacacatcccttccagcagacacagaacccagaaagcgaattaatgagacaaaaatgcaagccactccttcctgtacccagaatccccagagcctgggaaggggatgaggatcacactgtccatcatgatcagcagtttgtaatctgccgctgccatgttttcattgattagtcttcgtcagatctaagctaatcaaatcattcccactaccaaatgctgtccctaaaccctcctagtcaccaaaattagaaggtggatgggagaaatgcttatttattcattcatagatctgcataagataataataacttctatgcgtttgtagcgtccaacacttcagctacttctccttgaacatctcttttgatcttcaaaacagataagggaaaaggggcccgattagcaccccaagtccaaggaaacaaagagaggagtttggacagttactcacagatagaggagcaccaggctgacagccaggagaagccaggtttccaccgccaaatttgggatgaggtccatcgccactttccttcttcaactgtgttctgtgagtcttccttttagctgagtgctgctgtttgctgggctgtttgcctggagcttccctgccctgcacagcagtcttcagccaagctgctgaaagatttatgtgctggagaaggaggcagggctatagctgcagccaatagcaaagaatcgcacacacccctttgctgacctcttttgagttcatgttctatgaggaatcatgaaaagcttaatcagtgttatcggggagtccaagggttctgggttcttatcagaaactcaagtggagccattggcatgaaatctattaaccctcctctcacctgcccctccatggctgccttcattctagaataattgaaatccatcctcacaagccacacctacacatctttacccacgaaattccctctgcctggagtgtacctgtgccctctagatgactcctacgtatccttccaagcccagccagacagaccccttctgctaaaatttttccttaccaacctcctcacacaaatgtaaccatttcctcctctgggtgcctcctatccccctcacacagtcctattgtcctcttttctctctaccaccattgtaagtttctatgcctgtttcccttagcagaggtgagctcctcaagggcacagtctggtattatttactttcatgaccctggttcctagcagggtactgtacacatggtgg

SEQ ID NO: 49210 - DNA, 565 bp, Homo sapiens
aaataaagcaaaattagaaactgtagcatcaaagtaaacaaaaaatgtattgctgactatgcacatagtttgtgaccattacaaactatgtggaaattcagggaggtaaagcaagacaaagatgttccaaggaaaatatgaggaggatttcatatcagttttgaaataattctcctttgctaaaagatcaataacaagggtgacaccacaccaaggttggacaggcagtcgctgggcaggtgcccttgcagaaatatttttgtgtaaggttgggattgcctttgtgcaaacttgtggtttcgcaaagcgtttgtgatagttgtgttatcaggcacacgagcatgggaatcccctcttcacagcctgctttatttgtcatgatttttaaacacacacactgacacacacacacaaatacacacgtgacatcatttggttctgacaacgtccacatttgctattgtaaaacttttcaaggcttgtcctaccaaggatcccataagtcacctagtgtcgaggtcttcagtgaaactaggctgggagccttgtggttaccacttttctc

SEQ ID NO: 49211 - DNA, 2180 bp, Homo sapiens
aaccactgctctcttcagagctgtcagacagggacgtttaagtctgcagaggctgtctgtctcctgtgttttgttctactctgccctgcccccagaagtggaatctacagaggcagtaggccttgctgagctgcggtgggctccacccacttcgtgcttccaggcctctttgtttacacagtaagctactcaagcctcagcaatggctgatacccctcctctatcaagctgcagcatatcaggtggatctcagactgctgcactagcagtgagcaagtctccgtgggtgtggcacctgccgatcgaggcacgggagggtatctcctggtctgcctgttgctaagactcagttggaaatgcagaagtcacctatcttctgcctcaatcttgctgggagctgcagactagagctgttcctattcggccatcttggaaatgcttcccttgattaatatttcaaatatacttaaccctgcgtctaattggggctgaaaacagttgaatccaatgaaatcagacttgctggcagttagaggaatcttatttggagacatcataagggaaaggagagaaaacagaggaggtatttgaaatgggaaatttaaaatcactcttgaattttctcaaagtgctgtagatactgaatgacttatcattgtgtgtaaactaggtaactccttgtctttctgatgcctttttgctttttcatgtattgtctctaaaatctcataaatccttgaatgatcacctccaggggcacatggggaaactgaggctgagggaaagagagtgagtgtcagaagggaatgcacagtcttttatctctgttcatcatccttttcatttatttcatcagctcgctctagaattctagcagaattaggaagttacagacatcagggacctcttttagtctagcagatttagataagtctgaggcatgttgttgagtgagaaaaggagtgagtgacagaatgacaaagtggactcactttccagttttccagcttaacatggaagttctgagaaaatgtcccctctacacattggacacagcaaattacaacacttgctcagcgttttcactgaaactgaaaaacaaactttcctgttttctacatttcagggttgatgttttacctgtgcaaacaaagatcccaggaatgtttatcttggggggtacatctactaaagaactgacctagaaaaggtggcggggaaattattgcttttgcaaagggaaaaatatgaaattcctgggcagtaattagacaacaaaaccctcacttggaagaattggaatcagggaaacaagcctcaggtatgcgggaaagatgatctaagccacagagctgactactgctgctgctggccctgtggagataagctcataattttccatccagaggccaggccctagacagagcatcagaccaggttaggcacaaaggctcgaccaaagttcacagtccatgtggcacatatgacattttattcagcaaaattaaatatttaataatttcatcaaattatcacctttctagtgattttgcatatgattctgcctttgtttaaaaaaaaaaccacaaattcattttatgcttaaatatctgagtttgatagataaccactatctcatctcagttatatccactccctgctcagactcacccataaggtgcagcctttgaaataaaagaagtaaagcagaacacctttgctctgactcccaaagctgcaaaagatgtcatggggagtaagagctggggtagagccatggaaataccttcaggggatttagcattttttggagaggattcaagcaagtgcgaatgacccaatggtaaatacttgagctccctaataaagtgagtttcaaagctgtccaggaggtaggggaaaaaggctactcctgagctcttgctatagagaggaaagtttgactctcatgtacacagatagcaagccacaaatgggggctccttttcctactcttaatactaactaaatatgactgtaccttcctgggaacctacatggggcaaaagaaaaatgttctttatggtgctcacaaagtctgcacatcaagttctgaacatcaggttgccgatatacctgagatttggactgttcaactgaggcaaacctgaggttcctgagagttagcaagagagtcccgg

SEQ ID NO: 49212 - DNA, 549 bp, Homo sapiens
cttgctgactcctttttcagactcagttggcctgcacccaagtgattaaaaacatttattgctcacacaaagcctgtttggtggtctcctcacacggacgcatgtgaaagtagggaaattattgcttttgcagagggaaaaaatatgaaattcctgggcagtaattagacaacaaagccctcacttaggagaactagaatctgagaaacaagcctcaggtatgcaggtcagattgtctaagccagagagctgactcctgctgctgctggccctgtggaaataagctcataattttccatccagggaccaggccctgaacacagcatcagataaggttaggcacaaaggctcgaccaaagtccccagtccatgaggcacatatgacattctatttagtgaaattaaatattcaataattttgtcaaatcatcccctttctagtgattttgcatgtgattctgcctttgtgtaaaaaataaacccatgaattcatattgtgcttaaatatctgaggttaatagacaaccactatctcatctcagttacatc

SEQ ID NO: 49213 - DNA, 4182 bp, Homo sapiens
cagctcctacaggcaggagaagagcaaaggtgggataggatgcaactgggagaagataaccacccatttaggccctgaactttaaattatggatgggtttcttaactgagattgcagtgaaagggtttcacacattctcacacccactcacactcagcttttactcaaggaaatgatagtgaatacgtgtcatgctaagtatttaccctgcattaactgattcaatctgtctaacaacccatggtattgatgttgttatgatccctattttacagatgagcaaactaagccacaggaaggttaactgacccatccaaggttacgtcactaattgctctagcagagccaggattcatatgtagattctgtagctggagagcccagggtcataatcttttgacataagcccagccttgcccaaggacacacagagttagtggggaactagcaatgcagctcaggccttctgaatgggtagtggccagagctctgtcccatatgctgggacaaaatgaagtcccaaagcaaacttgtcagtgaggactggggtgaagcaatgtcctttcttctccctgcctgcccttgccctgaagtatatgcacttctgtagactttacaacaaaaaagaagaggagctctctctctcctgccaccttgtgaagaaggtgccttcttccactttgccaactgccatgattgcaagttttctgagcctccccaaccatatggaactgtgactcaattaaacctttctttgtaaattaaaaaaaaagaagaggaggaggacttaatcataactgttttctttctactctattctggagtgtctatttcttgataaagtaaccaccaacatctccatggcacttcataatttatacagttctttcccaactctcctaatatcagcaagaaaactttgtaagatgagtagtattaggatgatttaactcatgctttatagatgtggaaacagatagttagaaatagacttcagacgtgactaagccatgaagccagggcatggagcaggacattgtgatttcaaattgcatcagtggtgttcttgctgggattccaagaaggctcctaaaacaacttggcaggttgtgtcagccacacatgagataaatatttctctctacacctcccagcacactgccagtgtagttataaaatgctacagagctggttatgaccatgaaaacaacatgtgcatcctacactttactaaattgtgtattcagtgagctcatgtttcagcagaaaggggaatgttgcaaataattctgacatgtcacaatcagaatcatttgtgtttccaggaaagcaaaaagtaaaaggtgatgaaaccaacatgtaaaagagaaatcaaagaatatgaggcaaatttcagaagagcacgtggaagggaattaatgaaacaggaaattggtgaaggaaatgaagattgtcatgagatgtgttacaaaacatcagcaaaacctacaccatttctcatactccttatttcagtaacctcctagcttcttttgcctaccctgggcagtacttatccagggaattccctactcagccaccagacagcatctcaaaaaacatggaatcttaaagcatgcttccttggcttcagtccctgcaactgttcctatcactcacaggataaaatctaagtatatctaggaagtaacacaagaccctttctcatctggccactgttagcttcttcagcctgtctcagtccacttctccaactgtacacggtgttttaagcaaatggtgcgattggctactccccaggctctgcaaaaatgatgtgttcgtgtctccttgtgtccacacaagctgttctttagcatagactgggtccaacccagcttccatctggtgcattcctaaccatccttcaggagtcaaccagggcatcatctccccaacaagcctctttcatgaccacagcaagcaaatgctggagagggtcccgctggtgctttctcacagttttaacagctggacacacagtggctgtcatcccgggatgctcacagaattcacatgcatgaggagcttttaaaaaccacagattcactgtgtgtggaggcacaaaactgtaatctcagcactttgggaggctgaggcaggcagatcatgaggtcaggaatttgagactagcctgtccaagagatcacaatggcctatattgtaaaaccccgtctctactaaaaatacaaaaattagccaggagtggtggtggatgcctgtaatcccagctacacagaaggctgaggcaggagaatcacttgaacccaggaggtggaggttgcagtgggccgagatcaggccattgcactccaaccccagcctgggagacaaagcaggactccaactcaaaaaacaaacaaacaaacaaacaaacaaacataaaacccacaggttcctgggcctaccagaaatgagaaagggttgcctaggagcctaacaatgaggaggcagggaccattgagggccatctggagagactccaaagtgtcccatcaatccagttacatgaaaaagaaggcatcacacccaactcattcaatgagggccacatgatccaaatctgaaaaaaatcaggaccgcaaaggaagatgacatgccagtctcattcatcggcatcagtgcaaaaatgctgaacacaatagtagcaagccagagacaggagtgttcaaagatgatacaccatgaccaagttgaatttaaacctgagactcaagaatagttaacagagaaaaagtataaataccaatgatctcatcaacagattaaaggagaatgattataagatcatctcaattgttttaggaagagcctttgctagttcaataataatatattaataatacatgataatattcaactcccattcatgatataaaaaaccttcaacaactaacagcagtgaattttattaatctgatgaaagcatctaccaaaaaaaattagagaaaacattattctcagcagtataaaagcattatcctcttataccttcttgtttaccatgtgcacaaattacctttccaaaactagtaacatctttaaaaaatcctatcagttaacttactttttctgtaattgaaaagaatatcatagcttgtccttgtcagaagtccagcttgtgattcacctggggtcagcatagggcaaggtttaataaacactgaaataactaaacattgtaatgcctcatggggctgcttgaactgacatgatttcaagggcactgagaggctgggggaaagcagagggtcagcaagttcattcagctgagattatctcagtttacaaactggagtttatgaactttagttgggacatgagtttcattgattattggaatgaaccatctctcgagaataaaccagcatccagcatcgggcatgaagttccaagaggaccccagggagagatgttactaggaagcttgccaaatcctgtgactttccagggggcctgcccacccaagtgcagcccatgcctgacacccagccctcaatgccctattctgatcagttacatggttatctccagaaccatggggccctctctatcggtgtgaatgggttgtccactctgcccagtgctgtgacacaacacaggggaacagaaccataagggaaaatgtgaacaagaccttcaaagaacgagtcatgctgagacccaaggtgggggtacttcaccacacagagggaactggggagacaccaggagctctgggaaggcagagataaggggatctggaactacctggtgtgaagtattcctaaaggagagactgtctgcattatcatcaacagagaagtgtttgtatagaagaggggaaggtgagaagcatttcaggctgtgagaatggttcagctttttttagtaataaaaaaatagagaaagtagaaattgcttttaactttgtgtattgaataagtaaggaatggcgtcccaaccgttttctttattattattattattactattactattattattattattgtttagacagagtcttgatgcattgcccaggctggagtgcaatggcacaatcatggctcactgccacttcaatctcccaggctcaagcaatcctcctgcctcagcctcctgagtagctgggatgacaggcatgcatcaccatgcctggct

SEQ ID NO: 49214 - DNA, 6147 bp, Homo sapiens
agaatcatttgtgtttccaggaaagcaaaaagtaaaaggtgatgaaaccaacaggtaaaagagaaatcagagaatgtgaggcaaatttcagaagagcacgtggaagggaattaatgaaacaggaaattagtgaaggaaatgaagatcatcatgagatgtgttacaaaacgtcagcacaacctacaccatttctcatactccttatttcagtaaccccctaacttgttttgcctgaccctgggcaggacttatccagggaattccctactcagccaccagaaagcgtcttgaaaaacatagatcttgaaacatgtttctttccttgtcttcagtccctccaactgctcctatcacccacaggataaaatctaagtatctctaggaagtaacacaagaccctttctgatctggccactgttagcttcttcattcggtctcagtccacttttccaagtgtgcatgatgttttaagcaaatggtgtgactggacactcctcaggctctacaaaaatgacatatccgtgtctccttgtgtccacacaagctgttcttcagcatagagtgggtccaacccagcttccatctggtgcattcctaaccatccttcaggagtcagccagggcatcatctccccaacaagcctcttccatgacctcagcaggcaggtgctggagagggtcccactggtgctttctcacagttccaacagctgaacacacagtggctgtcatcctgggatgctcacagcattcacatgcatggggagcttctaaaaaccacaggttcactgggtgtggtggctcatgcttgtaatctcaacactttgggaggccaagccgggcagatcatgagatcaggagttcgagaccagcttggccaatattgtgaaaccccatctgtactaaaaatacaaaaattagcagggtgtgtcggtgggtgcctgtaatcccagctactcaggaggctgaggcaggagaattgcttgaatctgggaggtggaggttgcagtgagccaagatcgggccattgcactccaactccagcctgggtgacagagtgagactccgactcaagaaacaaacaaacaaacaaaacccccacaggttcctgggcctaccagaaatgagaagggcttgcccaggggcctaacaatgaggaggcagggaccattgagggccatctggagagaatccaaagtgtcccatcaatccagagacatgaaaaaaaggcatcatgcccaactcattccatgagggccataaccacatgatccaaatcagaaaaaaatcaggactgcaaaggaagatggcatgccagtctcattgatgagcatcagtgcaaaaatcctaaacaaaacagtagcaagccacagacagcaatgatcaaagatgacacaccatgaccaagttgaatttaaacctgagactcaagaatggttaacagagaaatagtataaataccaatgatatcgtcaacaggttaaaggagaatggttataagatcatctcaatggttttaggaaaaggctttgatagttcaataacaatatattaataatatatgataataatattcaactttcatttatgatataaaaaccttcaacaactaatagcagggaattttcttaatctgatgaaagcatctaccaaaaaaaacttagagaaaacattattcttagtagtataaaagcattatgctcttataccttcttagtgtttaccatgtgcacatattaccttttcaaaactagtaacattttttttaaacaaaaaaaatcctatcaattaacttacttttttctgtaattgaaaagaatatgatagcttgttcttgtcagaagttcagcttgtgattcacctggggtcaacacaggacaaggtttaataatcactgaaataattaaactttgtaatgcctcatgaggctgcttgaaccgacatgatttcaagggcaccgagaggctggaggaaagcagagggtcagcaagttcattcagctgagatcatctcagtttacaaactgggctttatgacctttaattgggacatgagtttctttgataatcaaatgaaaggaatgaaccatctctctagaataaaccagcaaccagcatttttgcatgaagttccaaggggaccccagagagacatgttactaggaagcttgccaaacccagtgactttccaggggacctgcccacccaagtgcagcccacgcctgacacccagccctcaatgccctattctgatcggttacatggttatctccaggaccatggggccctctctatcagtgtgaatgggttctccactgtgccctgtgctatgacacaacacagggcaacagaaccataagggaaggtgtgaacaagacctttgcagacagagccatactgaaaccctaggtagggtacttcaccacacggagggaactggagagacaccaggagttctgggaaggcagagataaggggatctggaactacctggggtgaagtcttcctaaaggagtgactgtttgcattatcatagagaagtgtttggacagaagaagggaaagtgagaagcatttcaggctgtgagaatggtccagctttttttagtaataaaaaaatagaaaacgtagaaattacttttaactctgtgtattgaatacgcaagaaatggcatcccaatccttttctttactattatttttgttatttagacagtcttgctgcattgcccaggctggagtacaatggcacaatcatggctcaccgccaccgcagcctcccaggctcaagcaattctcctgcctcagcctcctgagtagctgggacaacaggcatgcatcaccatgcctggctaattttttgatgttttgtagacatgaagtctggtattgaactgacttgcctaggatggtcttgaacttctggcttcaaatgatcctcctgtctcagccttgcaaagcactgggattacaggcatgaaccactgagcccagccactttattatgaacaaggttgaatatttctgtatttttgacagctgcatttcttctttgataaaatgttcatgtcctttgcccttgtgatacctgttggagttgctttgtttttcatgtcaagctataataaatataatttaactggcaaagagagaaaggcccagcttaacccttattatcattgttgagtcattttttggttgcaaggtacagtgtctgtatcgaggcagtttcaattactgctaataaagaagccatctggccaggaatcatgccagcatgtggatattatacttttagggcaaaggttctgccctccaccggtcagcaagaggcttaaggctggccggggaccccagataacatcaccgggcttggcaggcaccacagtgacctgttccatgcctgctagtgtatatttctgaggtttaaaatatgtatagggatgaaattcacataacataaaattaaccatttttttatgattatccaatctcaggactgaaaattaaccattttaaggtgaaaaaaatcagtggaattcagtacattctgtgttctgcaatcactacctctatctagttgcaaaatgttcccatcattccaaaataaagcctgtaccagttgagcagtttctccccactctcccctctccccagaccctggcatccaccattgcacattctgtctctgtgggcttccctcttctggatattttgtatgatgcaatatatggactttcgtttctggccttcacttcatagtaaagtgaggctatccattctgtagcatgtgttcatccattttttttgcggttcatccattctgtagcatgcgtcagtacttcattccatttatggccgaataatattccattgtatggatagaccacaatttatttatccatccatcgatggacatgtgggctattagcaccttttggcccttgtgaattggactgttagaaatatgtgagtccgtgtattttagtaactgtttttaatcctctcagatctataacttagaggggaattgctgggtcacattgaaattctgttgaactttttgaggaaactccaagctgttttccatagcagcagcaccgtattacattctcaccagcaatgggtgagaattccaatttctccatgttcttgtcaacacttgttatcttccttcaaaaaaaaaatagccatctgagtgggtgtgaagtggtaatttttctgggattttgaatttgtgcaaccacaaacaattaggaacctgtgagaagatgccagagacagaggaggacaagaaaaaggtgtggctgggaacctgacgcaggtggtccctgggctttctatttttgtttgtttgtttgtgtttgtttttgtttttgaaatggaatcttgctctgttgcccaggctggagtgcactggcacaatctcggctcactgcaactgctgcctcctgggctcaagcaattcttgtgcctcagcctcccaagtagctgggattagaggcatgcaccaccacgcccagctaattttttgtatttttagtagagatggggttttgccatgttgcccaggctggtcttgaactcctgagctcaggtgatctgcctgcctcggcctcccaaagtgctgggattacaggcaggagccaccgtgcccagccaggctcctgggctttctatggactccagagacatctcgttctgtagagagaagacagtgagtagggatccttggaatatgactgacgtgcaggccctgtctgagttatttaaacttcctcagcctcagttgcctaatctacaaaatgggtgttaataattctgtctttccctcccaaaggagctcagaggagaccagaccctggcctgtgatctgcagtgggcttgggacctagatctgcaagtctggctggtgttggctttgactagagagaacggggaatattaccaagcctagtacctgactcttggcagtccttccataaacgtttgctcaatatgaaaacagttagttcagtagttgccgagagacaggacaagagttatagagtaacccgacattacataacgtattttctttttatcaagaaggggagacatgagttcaagttttactgaacaaataattgaaaggttgggcgcttgctaagcagggtctctgagccacagagtgacctacggaagggagcattggagaaggcaggaattggaaggtgggaaacagccagatcagaccagacatgtgattaggaggaaatgaaaggacaactggaacatattgtcagaatgaagtcatcacagtagtccagacccctccaaatctgttgtttactcacgtgaccgtgggcaaaatccttttactctcattccctatctagccattagaaccacatgttcttgatgcccaggattctatgagctaagttcaaagcttccaaggttgcagaccacgagacagagataaaatgcaggcatggtggctgagatcagcagccagctaaaatatgttgcagtttaaataataccagcagtgatgacacatatctaatattttcctaccatcttactggcataatccttgttgaatattaaacaattaactcaactttgcacatgaacttcaggaagttcagattctaacgactactgcagacaggttgagaatatgagtaggcttaccccaaaacacattattagggtcaattccagtgcctgccattgaaagtcaaggtttctttgacaggtttaattctctcagaatatgtatcaaagtagaacctgaaagacagctacttacatgcccagaaattattattattattaattatactttaagttctggggtacatgtgcagaacgtgcagttttattacataggtgtatatgtgccatggtggtttgctgcacccatcaacccgtcacctacattaggtatttctgctaatgctatccctcccgtaggcccccactccccgacatgccccagtgtgtgacgttcccctccctgtgtccatgtgttctcattgtttaactcccacttatgagtgacaacatgcagtgtttggttttctgttattgtgctagtttgctgagaatgatggtttccagcttcatccatgtctctgcaaaggacatgaactcatccttttt

SEQ ID NO: 49215 - DNA, 6792 bp, Homo sapiens
aacagggctgaaacatgccccttgctcaccacgttgcaggcaaagagaaggagagaagagccacagtccttcagggagcccagacctggaagctccccaaaacagggttgtgactctttggtatcctgcagtgcctggtgtctccaagtttgcagtaaccactgcattccccagtgctggctggggaaactgcttgcagtgcacctggtccagccacagcctcacagagagccagtgcctgtgccggcacctggagctgcctgtcactgcagcggctgtagtgtctgactgtgcagtggcctgaccccacattcattcacacacccctcatggctccattcctaactcacccttggcaggcatgggatccaggctggtagtgtggactgtgtgcagcttgccaacccaagtgggtggaagaagcccagcaagtccgagcaaaacttgggcaaaggtgccactggccagaggttttaggccataaaagcaacacctcaaggatcctataacattattgtgatgtcttctccataattttcttatctttttatggaaatttcttgattagattactgaattcaggatggagctcttaaatagagtgatgaaagctttttttccctcttttttgaaacagtctatctctgtctcccaggctggagtgcagtggtgtgatgtcagctcactgcaacctctgcctctcgggctcaggtgatcctctggatcacctcagccaccccagtagctggtattacaggcatgcgctaccatgcccagctaatgtttgtatttttaatagacatggggtttcatcatgttggccaggctgatattgaactcccggcctcaagtgagtcacctgcctcagcctcccaaagtgctgggattacaggcgtgagcctccttacctagccaaagaaagcattttaatgtttggctgtactatgaataattctgaaaaagaagtcagtctattttacctgaggatctatcctttataaacattttaggctttgattttttaaaactgaaggtacccttttgagtgacaccaaaaccagtaagttcaggcctgttgatatgtgacactgggtaggttctccggggattggactttcccaggactaaccaagtcacaagggttagggaagcaaaagacccatagggatggggcttcttaagagaaactcccccgagagctggacatgtgtagaacaacaggtgtgttcttcagaagcaccagctgctcagtccgcagagccagctccaacaagtgggcttataggggtttcaggcccatgttctacactcctgtagccccttttatgacagaacagcacagaaatacaggaacaaaggaaaagactatttctagaggaaaaggggatcaaacgatgtgagtattcataagagaaagtactagagagtaccctagagttgctgcacccagcactagtaacacaaatccttttctcctatttattaagattttgcagaggagacaaagagcaattcttaacatctgcccaagtggatctcccagaaagaaaggccaggagcttgtctggaaagaaattcttacttttctcagccagacatggaggcatgtgcctgtagtcccagctacttgggagactgagatagaaggatcacttgagcccaggaggcggagattgcagtgagccaagatcacaccactacattccagcctgggtaataaaatgagactctgtcaaaaaaagaaaaagaaaaaaaaagaaattcttacttttctgctgacttacaagtgcttgggctcccttcactgaggcttctgaaagaacagagtggctttggtatcctgctcatagggacagaactgctgaggccaagaaaaatgtttgtcctttctcctctgaaggtttgttaacaacaaaaaaaatcacccacaaaggagattaatgggagaaatagcatacatattcattcatatgtttatggaggagaaatacagagtgattcccccttcttgagaaacagtaagtctcaaagaaagagactttctttcacccccttttatccaggggtaagaacaactagctgaacaaaactgacagctgtcaatcaagtgggaagtccaaaactcatgagagacccacccagttttcaatcatcatgaaggagccaggggctcaatggcccctgctggtaccaagttgccaggtccctgcaatgttccagacaaagacagtgatggtaaaaagggaaaagtggaggtagaatgcaagtgcagcagcaggaagatatgggactctccattttagggtcttcaagtttttcagattttctgagacatgggttaactcttcaggttagtctcctagtaaaacacagccaaagtcccaattgtgtttgaaactttcaaaaatgcagattgaaagaaagcctcttactgtctttgagaagtccagactcctcttatcctcattgcatgcttcggagttcaatttaggtgtatctctcacatccatttctgtcgagcctttacctttaaattttaaacttgaaaaactgccagagtacctgatagtgattgatcagagacagagccaccgaattacccgatggcaggccttagagaccatggccttaggacctaggttatgcatagccctcaccttaggaaggggtcccttcaagggcaaataaaatgcgatagtccttgcaacactgaagcatggagtatcctgtgaggcatgaacttgcttgatgcagcatgaatgcaccccaagaaacatgggcatgcccctccaagtgcaagcataccccacaagtgggtagccatagagccagaagggcaggttccctgaaaaaaataaagacctcaagacctcatcctaaatgtgagatcttggatgtaagaggatttactgatttttccacaaaacagccaggccaggaagataactgagcttagaggactcttgctggtgccaatgcattgattagtccagatgacaagggagaggatcttgagagccaattttgatcccttcctcatcaccaggaaatatgagtaaagattgtgggatctgtggaggacagagggagagcttcattttctataaaacacagtctgcagattgaggagatgcagcctcggaggtggagagctataaagtcaaaaaccacagagcaggatagaggagtcagaggagtgaagaaaagagtcttgattagacagcctttaagccccaagtcacatgtctcttaattggctgttcctaggtggtcagttagttcttaccacatgatctgttggtgagcagttggaaaattcccaggtacagattttttcagaaaatgttatttgacttggctacagaaaaataggttttgcaacacttactaagaacacagagaacatgaccatcacctaaacctgccatggcctcttgggtttgtttttgcttttgaggcacagggagtccttcttgtctgtttacctggaggcatgatttggcaacctagataacaaacagagataggctttctaaaaagaattatttttatttgggaataaagcattgcaatgggaatatgcgtgccaaggtaaactatgtgcttattcaggtaggtaaagtaagacaaagtttaaaaaaataatgagaaggattacatatttgttttggaatgattatccttggctataaagatcaataacaagactgacatcagtttgaggttggacaggcagttgctgggcagatgttcttgcagaagtatttttctttaggttcctgagaatctataacctttgggcttaccaatagcagtgactgatttgtttactgattgttcacagaataggaaatcaaaggaggccaaaataaggacagccataattatttgccaattgtcaatttgaaaagggtacccaaatccctccatatgaggagtagcataagtggcttttctactggctgccgctgtagacccacctccttctccagcacataaatatcgctgttaacattaactaaatcacctctgggcagagaaacaaagctctatatgcacagcccagcaaagagcagcacacagctgaaagaaaaactcagaagacagagctgaaaaagaaaactggtgatggatctcattccaaactttgccatggaaacatgggttcttgtggctaccagcctggtactcctctatatgtgagtaactatgcaggcatgtttgctcttaactctaagacctgaagtgctaattgggcccatctttttcttatttgttttgaagataaaagagataacggaggggaagttacctaagtgccaaatactgtgaacacataaaatattattaatatgttaggactcctaatacaacatttgaaaatgtaaaatttagtctgggtgcggtggctcacacctgtaatctcagcacttgggaggtggaggcaggccaatcacaaggtcaggagttcaagaccagccagaccaacatggtgaaaccccttctctactaaaaatacaaaaattagtcaggcatggtggcacacacctgtaatcccagctacttgggaggctgaggcaggagaatcgcttgaacccaggaggcagaggtttcagtgagcggagattgcaccactgcattccagcctgggtgacagagcaagactccgtctcaaaaaaaaaaataaaactttgtcatactgagtagtttgaactaaagaagactgaaagacttcacaaatgtcttcagaatctctgaccctcttctgtctacccatcccccattctttccctcctgaagtgcagggttgctctgaagttctcttatctgactaagggaagatcttccaaaaagaatgcaattgtcttgagcctctccaaataatctcatcaatcagaaaactaattcacaggaaaagagaaaaagtttgataatacttattctttggagcactgctacctgagagactttatctccacaataaaataacctttgttcatcatgtgttttctcccttcaccttcccataacttgtgtcagaaactccctatcagaagccactccctactttttagcttacaatgctatttaagctttactcattcagtccttattttagtctcatatattgtgggcctccagcacatatgcatgtaaaattttgtatggattttcactgtaaccacccaagagattcaccttgccccctgcctcaacagagcccattcatcaagacaggggaattgtaatagagaatgagttaatacatgctgccaacaaaaagagccaaactctgtacaatacttgaagagatttattctgggccaaatatgagtgaccatggcccatgacacagccttcaggaggtcttaagaacatgtacccaaggtggtcagggtgcagcttggttttattcttttagggaggcatgagatatcaaatacatttaagaaatacattggtttggtccacaaaggcaggaaatgtgatttttgcagaattctttgtgatagagcagactccagagaaattgcaacaacttaaagtctttcagatctggccctaaggagctataggagagaaaaaaaatctgtcagatcaccattgcctacctctactccaactggagctgtttcaaaaccaacatgtagaaatctttttgtctggctgccctgtgaactcagaaactagtctgctaaatgattaacttttggtctccttttgctttggtagaatgacctcttattaagtacctgtttaactgcaccatatacagacctatctttcatgacagcagacctgcaacatcacctcctgaaatgaggcacagctgtttaactggattgacattgctaggaatgtgagactggtttatactggtttaatgtgattccttgcgactcagctaccaattcaattgtcctctccacaagcatcaactcagctttagtatgtacattttctagggaagtttatgacaggggaaagttggggctccaaaaatgaaaccccaaaatatggcacttaagcatgttgaggactttgaaccaaaggaaattgaaaggtctcagaaagtcttcagaaccaagctaactcttatgttctcctgtctcccaaccctgctatttctcccaaaatataggaaggggctttctctgaagttctcatacctaaaggaagatcctcctaaaaaaaagcaatggtcttgagccccctccctataatctcatgaaaaagaatcttagcagggccaggcatggtggctcatacctgtaattccagcactttggaaagccgaggtgggtggatcacgtgaggtcagaagttcaagaccagcctggtcaacatgatgaaaccctgtctctactaaatatacaaaaattagctgggtgtggtggcaggtgcctgcaatcccagctactcgggaggctgaggcaggagaatcgcctgaaccctggaggcagaggttgcagtgagccaagattgcgccattgcactctagcctgaacaacaagagcaaaacttagtctaaaagaaaaaaaaaagaaaaaaataatattagctcacagaaagggagactaaggttgataatacttgttctttggagcactgatgcctgacagacattataataagatgacttttgtttatcatgctttttcttccctcactctctcatgtcttgtgtcacccactccccatcagaagatactacatttttatagctcagaatgctatttaagcttcaatcatcaggccattctttgagtatcatatctttcaaggctccca

SEQ ID NO: 49216 - DNA, 437 bp, Homo sapiens
cccaagtatacaccacctagatgtaacaaaggcttctgatatttctaaccatgatctctttgaagagctcttttgtctttcaatgactctttcctgtttgagccacatcacccttcgttgtatgaaggcttaagtggcttccgtggtgagaatcttactctgtgtcataccctaattgaccttggagctggctttgctgtgtattgcacaactgcaagtatggatgatggaatgtcaggatcaaaatctggattctttggtgtggttccagctgcagaatcaggcaagcgaggtttagtcagctctgttttcccccacacaggctgtatgaggggcaacagcccatgctggtcatcatggatcccgacatgatcaaaacagtgttagtgaaagaatgttactctgtcttcacaaaccagatggtaggcctatatttt

SEQ ID NO: 49217 - DNA, 1056 bp, Homo sapiens
caagaatgcctcctcaccacttgccaggacaatttttgcaaaaagcgtaagcatcagttctttcatttacactatgcagaaaggctgtaaagagtaaaaacaaagggagaatcgtaggtagtggatgcttcttgcgtaagtgtaagatctttgtgaaacagtgctggtcctgctgcatccgttgtctgttagcaacataacaccaagtaaaaaatatccagaaatctcaatgacaactaaaaacaatcatttattgctcacaagtctggatagtgagctctgctgatattggctggactcgctgtggtctggcagtggtctgatggaacctggccctgggtgcgctgggcaggctgactcagctctgcctcacacctctctctgctccagtcaagtagctagtggtgaagaagccaagctaggacccagggtgcctgacgcctgggccaaacatttaacctctacaatattaccttccaaatataacaccaaatgctagccacgtattacccacactgtttccagaattctgcccaaattggaattctttatggtgtaacgagatctggccttggggctggccctggtttggcagtgaggtgaacacaaaggaatgttcatctaagttcatagtccaggcctgaaggaacaagtgggaaattgttcgagaaagacaggatggggctgcccggagggttcctatcctgtttacaactctcagtagcactgaaattgtgtgccctgtccagttataaagttcttttgtcatatttgggttacaaaagaactagtttatccccaaactatttatagggtttttatataacatagtgttactctccacattttttttttgcatggagtcttgcttcgtcgcccaggctggactgcagtggggtgatctcggctcactgctacctccgcctccagggttcaagtgattctcgtgcctcagccacctgagtagctgggattacaggcgtgcgctactatgcccggctaatttttatagttttagtagacacagggtttcaccatgttggccaggctggtctc

SEQ ID NO: 49218 - DNA, 1863 bp, Homo sapiens
cagctactcgggaggctgaggcaggagaactgcttgaaccccggaggaggaggttgcagtgagccaagatcacgccactgtgctccagcctgggcaataaagtgagactccatctcagaaaaaaaaaaaaaatctcattgataattttcatctcagctttgaatatttggggtaatcagattaaataaaatatattattacaattaacgtcacctcgtttccttatcttaccagaaagattttaaattacatatgtggtttctattggacagcagcggcacacaccctctcagtatgtttttctttattatgagctccccaagggccagtttattgaaaattctgcacaatgattgctgaggtttgcacctcccctcctctcattccagttttaaccctagctctgaaattcgtgttttgcttaacttctttgagtttcaggggcttttcatgcttccagtaggaatgacagccacttcgtggctcttttaggagcattaagtaaactttatcgggcaacactgacagccccgtcatagtcaccgcgacggccagctcacccggtagctctcgaaggcctcgtcgatgggtgccatggcgtgagtctggtgctcctgggactccctgcacaccaggcacactggccgctggtcgtcctcgcagaagagccgcagcggctcccagtggcggccgcacaggcccgggggcacggggcccaggcgccggcgctgcgtcttctcagtcagcctggccagggcccagttgggtcgcagcgcggcgggcgccgatgggtgccgacattcggggcaggggaacgggccgccgcccggcgcccagttgcggtgcaggcagccgcggcagaagttgtggccgcactcgatggacaccgggtcctggaaatagtccaggcagatggggcaggtcaactcctcctggatgtcctcagcttccatgctgcttccctgccgcggagacggagtccgacgtgaggcgcgggagaggccagcaagctgcgagcggccgcggggaggccagacgacttccgaaccgccgtcaccgcctcacgtaaaagggtacaacgcagtttctcttccggggttcaggacccaaaaagaacgcacggacgttgcccggcctgagcgcgcaagaccggaagctgctgggtatccgcgccggaaccgcgagggggttggttcaggcctaggcgcggggcaggacgggaccggtgagtggctcctccaaacagctatagagacccagaaatgcctgtggaaagctacagaggacttgggcaaggcgttagagccggacgttgtggtccctgggggagccaaccggggaggtgcctatgatctttctttccaagtttgagggttcaggtctgtgttcgcctgctggttagaccgatttaagttttagagtcccaggagttctgggcgagctgcagcctaggggcctggaaggccaggaagacttgaaggatctgtgttggtaggcctggagtttggctaacgtggggatgatttggattctgagatgcagatacattgcctttttggtatccaatttgaaaagtagcaaccattttgctatcccaaagaacatccatggaggctttcaacaaataatatgctcacctgtttcagggaattatctatatcccttaagtggattttcgatcttgtgtttctgaggtgctttgctttttattcttcccactttcttccttttcttgtgaatatttgtttaaaacaaaaaaaactctggactgacaaatttaatagaagctatttgcacaaagaacagttcatgaattgggcagcactcagaaccaaaagaggttcagagagctctgtccagcag

SEQ ID NO: 49219 - DNA, 3403 bp, Homo sapiens
acataaggaaaatctcagctatgttgatttagtattccattggaggtggagcttgcaatgagccgagattgcgccactgcactccagcctgggtgacagtgagaggctccgtctcaaaaaaaaaaaaaaaagaaggaatatgatacctgagatagtttaaaataatggaggtattgataaccataaaggttggttccaggactgtagggttgatcatttaaaagcataggacataaggaaaatctcagctatgttggtttagtattccattgtcatgcttacatgatatgtcaagacagcttttcttaaaggcttttaccttgagaacatgattcctagagttgtaatggcatatcccacagatttgtactatgcttgagtgtgattcctcaggaacgaatatgatttgaactcattcacgtttagagagggtgtcaagttgaaaaccaggcagattcacttaccctaaaaatgactctaaagtaaaatgattgaagaaattagattccaaagattctgggtggaaattctgaagtatatttacattcatgtggacataaaagaggccaaaattcaagaactgtgggctgacaggagagctgtggattaagcaccagttctattaaaagggaggctgggcacagtggctcacacttttaatcccagtgattcaggaggctgaggtgggaggatggcttgaacccaggagttcgagaccagcctgggcaatatagcaagaccccattacaggtatgagccactgcacctggcctcatcttttaattagcataaagcccttagttcctacagctttgctccacaagagtgaagtcaacgctgagcctcagcaggacatctcttcccactgtgggccccgaagcttagtgaagctaacttgctggcctctggagaaccaaaatctgtgtctagaaatggttccagcaacttctccacaccccatgatgaaatagattactgggctttttcctgatgtgatgcaagatcaaatacactttgcataattcagattttagactacaccagccaaaaccacaaggacactgtgctactgtcttgagttggtgactctcttttcattctacctaatcaccctgtggccctgggtgacagccagcctctctccagccaagaagatcatgactacagttgtgtagtatttggttcataaaagatctgaacaggaaattcaggccattgcaggctggagtgcagtggcgaaatcatagctcactgcagcctcgaactcctgagctcaagcaatccttcctccttagcctactcggtagcaaggactacaggcatgcaccactatgcctggctcattttttttttttttttttttttggttttcgtagagacaggggtctcaatatgttgcccagctggtctcgaactcctggactcaagtgatcctcccacttcagccttccaaagcactggcattacaggtatgaacaaccatgcctagccccatattagtattttcccttttttttttttttgtacttttagtagagtcagggtttcaccatgttagccaggatggtcttgatctcctgacctcgtaatctgcctgccttggcctcccaaagtgctaggattacagacgtgagccaccacacctggccccatattagtatttttcctgtacaatattggatgagcaatatgtaaaaatactgatttgaacaggtttattccatttagtcagagaagataagccaaagcgctcaggaggaaattgcccagccagtgacatttcacagtaatgtcgaatactttgagcaaataaagaatagcacatgacaggaggaacatttcaatttttttaaaaaaagcaaagggcaacatgagcaggccagggcaaaggaagatttgaatgtgagctctggcgtcatgacaggagagatgggtaggggtagaagaaggggaggaaacctcagaagatccaagtcttggccagatgtggagggggagcaatggggcacagagctactcagaattctgcaaactctatttatttatttatttatttatttatttatttatttatttatttatttttgagatggagtcttgctgtgtcacccaggctggagtgcggtggtgcaatctcggctcactgcaacctccgcctcccaggttcaagcaattctcctgcctcagcctcctgagtagctgagattacaggcgcccgccaccacacccggctgatttttgtgtgtttagtagaaatttttgtgtgttttagtgtgttttgtgtgtttagtgtgtttagttcaccatgttggccaggctggtcttgaacgcctgacctcaggtgatccacccacctcagcctcccaaagtgctgggattacaggcgtgagccacagcgcccggcctgaaaactcttttacacaaacccaagcgtcttctgtgcctcagtttccccacactccttggcttcctgggagacccggcccttcactccagccgctccgcatctccacaccatgttggtcttggctcacacatccagagcttgtttgagaaccctcagctctccagggcacagctcaaggatacaggaattggccctggggttgtcagatcccctccaagtcccagggagtgagtttcctcaaatgagtcaccaaccgccatgcacaggtttcaaccgcaaaagacacagcagagctctcaccttgaccttctcatgaaacctcacctgcctgtgtctgtgcttttccttcccgtggcacagaactttccttacatcctgtcctcagcctcccactctggattattccaaagtccatcctccaagctgggctccttaaggaaatcattcccagccttcagaattctaagtcaaacatctcatctttttggaaagcctaaatttgaagttatccttccccaccacccgcttttttttttttttcttaatgctttgggttcaacttggaaatcaaagctgagaaattacttcttcagactaatgaaatccgcatttcctcttctggggcaaaaagttctatctgaacatatagagccccagggaagaaagctcaatcaagagggaaaaatacagcaactgtatttttcaattcaaaaaggatgacaccctcaacaaataaaaggataaagaatcaacagcttaggtcaataaggaaaccaaaagctcgtgtgagcaggtcagggctaaagaacattaaaaatgggatctggcctcatctgtaacaggaaagaggagtggggtggacaagggggaggaaacctcagaaaactgaagtcctggacaggtgtcagggttggggagaggggcacagagccactgagtcacccagagaaaaacccccgtagggaatgatgtatcagagatgtgaagacctaagag

SEQ ID NO: 49220 - DNA, 545 bp, Homo sapiens
tgcaccactgcattccagcctgggcaactctgtcacaaaaaaaaaaaaaaaaagaagaatgaataagacctactatttgatagcacaacagggtgactatagtcaataataatttaactggggccaggtgtggtggctcgtgcctgtaattccagcactctgggaggctgaagtgagtggatcacttgaggtcaagaggtcaagaccagtctagccaacatggtgaaaccctatctctattaaaaatacataagttagccgtgtgtggcagtgtacacccgaggcaagataattgcttgaacccaacaggcggaggtttgcagtaagccaagatcacgccactgcactccagcctgggtgacagaacaagaatccatctcaaaaataataataataatcataatttaattgtacacttttaaataaccaaaagagaggccaggcgcagttgctgacacctgtaatcccggcactttgggagaccaaggcgggcagatcacgaggtcaggatatcaagactagcctggccaacatgatgaaacccg

SEQ ID NO: 49221 - DNA, 2879 bp, Homo sapiens
ctactaaaaatacaaaaaaattagccaggtgtggtggcaggtgcctgtagtcctagctactcaggagactgaggcaggaaaattgcttgaacctgggaggcggaggttgcagtgagccgagatcatgccactgcactcctgcctgggtgacagagtgagactctgtctcaaaaataaataaataaataaataatcaaatacttttaaaaactaaaataaccaaaaaagtataattggattgtctgtaacacaaacgataaaagcttgaagggatggatacctcatttttgatgatgtgattatttcacattgcatgcctgaatcaaaacctctcatgtaccccataaatatatacacatactatgcacccacagttttttttttaatttacaaaaaaatcagtagaccttgagtaaagtggattactctccatagtggtgggcttcatccaatcagttgaaggccttaagagaaaaagcctcagatgtcccctaaagaggaaagaattctgcctacagtctgcccttggaatcaagactaagacatcaactcttccctgggtctccagcctgctggccggctctgaagatttaggacttgttactcctcccaatagtgtgagtcaatttcttaaaataaatctctactctctctctcttttgtatacatatatgtaaatctcttcctatgtgtgtgtgtatccatgtgtatacagtgtatgtatgtatgtgtacgtacatatatatgtatatgtgtaccacctattagttctgtttctctggagaaccctgagtaattcagattttggcacagaatcagattaacattccaaagtgattgttatataacaaacatataacaccttttctgacaatttgtaaatgtcatgaattttaaactcacacaactgagaagccattcgcttccatgtctttatcctgcacattctcatgccacaaacagcctccttcccttatcctaggagtgactcttgatctcccggagctcccactctcttctcttccagccactcgccttccagacccactgcagtggtgtctgagtgtgggatttgggcacgggtttccttctagcaccatccctccagccaacctgccttcccactttccccttggggctgctctctctttccctcagcgtcaggcaggtgtacccagccatcggaaggagggaaggaacaggagcagaagcagctccaggcatatggttcctactccgtcctgactgtctaccccaagcaggtcgcttggtctttggagtctttgttttcactgtaaactaggggttttagattcagattcctgaaggtcttatttcgggccagcgcagaggctccctgaatgctcctggaagtgtgtgagctgagggagttgacagccttgggcacccattcctgccgtatgccagggtatcccagctgcatccagcctgtctcccagccacatgtcctgttcctcacctccttccagtcctctccagcacccatcccttgctttccccactcaccatcttggttctcctgggggacagcaggacccagaagcagcagcagagacagcaggacaggcaccattcttaccattgtgtctgcttggagggttctgggcaggaggcacagatattatcctgggtcctggggccctgcccaggggaggtgaatctacaggccaatgggagtgccaggacgggctcctcccctaatagagaaaaaaaaatgatacacaagctaggctgggcagaggttatgaagaatgaatctacacacaggatatgcaaattcagagctgagtccagagttgatctctggactgaggctttgtgtgtgcctggggtggaaggatgccagtgggtaggaggtgcgtgtgatgggtggcaagcgcctgggatgtgtcacccttccagtctattgtgacaacccctgggccagtaggggcatttgtgtgtttttggaccacactgtatccctgccttccagaaaaactctcaacatgtccaagacatggacctgggtagaccccagctggggtgggaccctcactctcccacatccgatcctgccagaggctgtgtctggaggacagtcacattcccatctctccctccttcctttctgtgcctgtggaatcccagccttccatgatggaagcagaaatagccgcatcctccttttgcagcctccctggcaacagaacgagcctcccaaaatgctgggattaaaggcgtgagccaccacgcccagccaagataatttttaatgcatacaacaagactcgttttacacagacgaagccagttatttgaaaaccaggtctttccaggcacgctcagtgttgatgggctatttgcagagagaccctccgaatacaaagcaacatgctattctaaagtgactggggcccgggtgcggtgactcatgcttgtaatcccagcactttgggaggctgaggtggttggatcacctcaggttgaggtcaggtactcgagaccagcctgggcaacatgatgaaacctcgtctctactgaaaaaatacaagaattagctgcgcgtggtggcacatgcctataatcccagcactcaggaagctgaggcaggggtttcaccatgttggccaagctggttttgaactcctgacctcgtgatctgcccgcctcggtctcccaaagtgctgggtttactagtgtgagcaactgtgcccagcctctcttttggttaaagaaacctacaaagggaccttttatagtgacttcaattttatggaataattgtaatgctcctaaggccgttgtgctccaaagtctagccgcaggtattgttattgattgggctccaaaagggcattattggcaagattgctcca

SEQ ID NO: 49222 - DNA, 1539 bp, Homo sapiens
cctcagtttccttggtctctgggggaagccaggatgataatcagccatgctccaacccctcagctgaaactcaggcctggatgcattgtaaatggatttcctcttccacaggtgagccgctgaattcgattccttcttccttccttccttccttctttccttccttcctttcttccttcctctcttccttccttccctctctccctcctccctccctctgtccttcctccctctctccttccctctcttctttccttttttttcctttttgagatggggtctcactgtgtttcccaggctggagtgcaatggtgcaagcaaagctcactgcagcctctgactccagggctcaagtgatccttccacttaagcctcccgaatagctggggctacaggtgtgccccaccacacccggctcattttattaattcttggtagagaccaggtctctctctgttgcccaggccagtctcgaactcctggcctcaagcgatcctcccacctcggcctcccaaaggactgggattacaggtacgagtcactgcgcccaggcttttctcccttttgactcattttgaggcccccgtcgtagggtacacgccctgggaatcgggggtcttccagtatagggaaccaccgagatgcgggccctccgaagtcctagagagggcgcctcggccgccggcacccgccacacttccggcctttgtgggccgcagcgacggcggtctgcggctgtcggttctgtttgttgctgtcactgctgtttgttcttgccagcggctaggtgtgtagttgcttggggctcctagcacgaggcctctgtccccaggcacgcagcgccagtctccggctgttgcgccctgggcgccgcctctctccggcccccctttgtttcctgagccagctgggaagactaaaagggtgggtcctgggagcggcccatggttcgacccttcttttcaggcatccttggagcatgcaggctgcagatttcaggccgaccccgctagcaccaaagtccatgctgctgtccgtggcagctcagtttgaaaatggcctggtagaaagtccaggttgttgaactggtaaacgcactctgcatcccttgacttgaagttttcattattctctaacgtgcacttacccccagtagagagcaaatgaagattcatacaagaaatactgcctttcccaaaatgggacattccagcaagggtgccggtactgacttgggttagcttaagagagagatgcagttgaaaagcttgtcggcagggatcagggaagacttccactaagtggtgtgtattcaaaggagaggtaggaattggttaggtggacgacatgctccaccatccaagaagaacattccagatggaactcaggcaaaagcacaaagttcgaaaagtcagaagtgcaggggaagtggtaaatatttcgacaccatccagataaatggttgtttttggttttttgggatgggggacagggtcttgctctgttgcccaggctggagtgcagtggcacgatctcggc

SEQ ID NO: 49223 - DNA, 1333 bp, Homo sapiens
agacacagaatcttcccatgttgctcaggctgatctcaaactcctggcctcaagcaatcctcccgcctcagcctcacaaattgctgggattacaggtgtgagccaccatgccccaccccagttctccccttttctaacaccacccttcctaccaccttggtttctgctgcagacaacaggccccctcctatcacggccagactttgagcaaagctggcttttctgtaccacatagtacaggaggtattggcaagcaccactcctgccccacctttgcccctcctgcctactcttcccccatccatctccaccccgagtctcaccccctccggatgcaggctctcttcccctgagcagagctgctcttcctgggcagttacaaagattctttgtaatgtgtttacaggaggagggggtgagagcggggcctggctgtactgatgggcccaccagccctgtttacataagcagagaaggagccaaaacagatgaccctgtagctcagggacctagattaaacacataaccaaagtccagagccctgtgccccagccgcccagtttctaggctacaccacacagaagcagcatggaggagcctcttgacccagggagggttgttgactcggctgggtgagagatgtttgcacagagagggaactagcagggccatctggctgttctcctgctaagcgctgggcatttgcaggtcaggcaccctcaggattccagggcccctgggaaggcagccccagccaatactgtttcttctttggggaaatttctaaaacattgttatttttacatttttcgcccggtaattatacccaacccaaataaactgtgaagttttattttgcgaggtggtgagaaatgcagttctccgcatttaaaacatggcgatggctggcacctaaaagtcctctgcagtttacaaagcattgccacctccacaatgtcataccgtcctcagagtagctaagtgggtagctatttgccaaaaccatccctattttacagatgagggagtcaagacttagagaggtcgggtcacttgcacaaaccacacgcccaacaagagtgactccaaattttacacccctactactctgacccctacttcctctccattgggctgtaaaataaggcaagaagagagcttgttccaatacataatcaccttgcaggtggctcccaggagagagtgtcacatctcatctcagacatgctggaagccgaagtggtcagcctcaaggggcacttagagggccctgcagtccacccaaggacaccaccagcggggcgttcccagtacgccactcaaagccttacgt

SEQ ID NO: 49224 - DNA, 2544 bp, Homo sapiens
aaaagacaggtgaaatcgaactttcacatggactggtgtctgagctggagagtctgtttgagtttgagtaggggaaagcctgaaaccccccaccacctgctcccgttagtccctgcattaactaggggcggactgggacctgatcctccaagctggaggcttgaaaactcaagggcaggcgcctggtccagcgattcggaaaccgagatgcaaagtcctcccgcgctcctagagaggacccggaagcgcggcgcggtcccggaagacgaggtggtgacacgcttccggcctttgtgactcattgtgtctgtgtcgaggcgtcgggagggcctaagtccgtgtgcggtgcccttcggccggcctgagccccagagtcagctcccctttctcgcccagcgcccccaggccgctcccggggctcacggtgagacttggggccggcctctggggtgggagggcggggccgcaagggtgtgtgcgcgagggtgggctccgcagctgcggccctgggaccccctccaggcggccccgctgttgtgcgaagagagtccatgcccctgcctcctggccgggcccggccgtagaaagcgccgttcttcctgggagacgtccccgccccacccccaggatcaggcggggagggggcgagggtttcagtggctgagggtgcccggagacccggggagaagccgtctgtgggcccctctcccgcagtgtcgtcatcgccctttgacgtttctgcaaacggggtcgcgagcgaaccgaccccggtcttgatttttctgctctcccttagtcgccatttgctttgattccggtgaggtgtctttttccccccccggttccttcgggacctcgaggtgaaatgagcggaaggatgagagatggacacattttgaggtgccgcatacgtttccagacctgcctttccttctcccaccctcatcactgagcggtgattaaagagtatttgaagcctagtcatagtggataaataggtgattgggatctagtagagattatatacaccccactctttcagcttgatggaatgctttgaaggctttggaaaagagctgtccgggacgttaggtggatttttcaattctggatagttgctctgtttgacatggagtggggtgagaagtgaagggaatttgtggaaattgcactgtgtcactaggagactgattagctgagtgaccttggataagacgagacactcaccaagtcttaatttcgtcatcaataaaaactaactggattttctcaaaaggcccttccgacttcgaaatgatttggtcaatgtaattgaagaattaactacagtttagcttgacactcctccatccctcccctccctttcctgcagtgccccctgtacacagtaagatactttcattatagagagtggctgttccatggcctgggaccaaagaaagcatttattgtacgggccagtgctaggcggattggaggcggtcaataaatacttgttgaattgaattgtggagaattcattgtaaccacatcagcaaagcactgttagtatatatgctgaacaaatgtggagaaatcgctgttttacataggaaaccatggtgatttgccccagaatgtgtatccaggtttgtatcttctctgaattaacatataagattcttgtttattatttcaggcagttttcaccactcttaaaatacaaacgaggaagctagctacttagtcttttgctcattctcgatttaaaagcatttaaaatacagatgaatagcatattaaatctaacattttcattctgtgggagtatcaatattctttgaatagctagctgtcttttaaggtagctttttcatattaaaacatttgattgctctttaaaaaaatgagtgtaaagggcaaagggcaatttatttaaaaaaaaatttttttttttttgagacagagtcttgctctgtcgcccaggctggagtgcagtggtgcgatctcggcttactgcaacctctgcctcccgagttcaagcgatcctcctgcctccgcctcccgaatagctgggactacaggcatgtgtcccaaggcttggctgatttttgtatttttagtagagacagagtttcgccatgttggccaggctggtctcgaacgcctgatctcaggcagtccgccaacctcagcctcccaaagtgctgggattacgggcgtgagccactgtgtgcccagcctttgtttacattttcaagactatgccctggaaaaatactgggctgtttggaacacagcctttgagcttgtaacttcaagccgttgtttaagaaaatcatttctgtttatcctaggtgagaactgaggtatccttagctgctggaggtaattttatttaaagtggatggtatgtcagtatgtttttcagcccatattcacccagaggtagtttcctactatctggaacccccaccctacccccatttgactgataaagatacaaaatgccagagaagttaaatacctctctcagggatgtgccacttacttgtgggagactag

SEQ ID NO: 49225 - DNA, 407 bp, Homo sapiens
aggcagccacctactactgagcaaacctaaccctcagttatgtcatttgtaaaacagcacttaacagtttggccgacctgctagggctgttgtagggacaaaagaagatggtgcgtgtactgctttaagcctggcacctggcactctgctaacattcagctctctgggctgggcactgttaatgctccatttcgtaacctgctgtcaacctgcaggtaaatcactctgactccaagcaaacaccctgagggtggagtcggcctgtttgaggtttctgtttgcaaatcttgatatatgaagtgacagtggagattgtacagttttttcctcgatttgtcaggatttttttttttttgacggagtttaacttcttgtctcccaggtaggaagtgcagtggcgtaatctc

SEQ ID NO: 49226 - DNA, 787 bp, Homo sapiens
gaaggaactttgtcatcagtggctgcggccagaaataaacaccaaggaacagatcctggagcttctggtgctagagcagtttctttccatcctgcccaaggagctccaggtctggctgcaggaataccgccccgatagtggagaggaggccgtgacccttctagaagacttggagcttgatttatcaggacaacaggtaaaaagaggtgaaacctattatgtgtgagcagggcacagacgttgaaactggagccaggagaagtattggcaggctttaggttattaggtggttactctgtcttaaaaatgttctggctttcttcctgcatccactggcatactcatggtctgtttttaaatattttaattcccatttacaaagtgatttacccacaagcccaacctgtctgtcttcaggtcccaggtcaagttcatggacctgagatgctcgcaagggggatggtgcctctggatccagttcaggagtcctcgagctttgaccttcatcacgaggccacccagtcccacttcaaacattcgtctcggaaaccccgcctcttacagtcacgaggtaagaagcaaggtttcatttaggggaagggaaatgattcaggacgagagtctttgtgctgctgagtgcctgtgatgaagaagcatgttagtcctgggcaacgtagcgagaccccatctctacaaaaaatagaaaaattagccaggtatagtggcgcacacctgtgattccagctacgcaggaggctgaggtgggaggattgcttgagcccaggag

SEQ ID NO: 49227 - DNA, 1158 bp, Homo sapiens
ccaacatggtaaaatcccgtctctactaaaattataaaaattagccgggcatgatggtgggcacctgtaatcccagctacttgggaggctgaggcaggagaatcacttgaacccaggaggcagaggttgcagtgagccaagattgcacactgcactccagcctgggtgactagcaaaactccatctcaaaaaaaaaaaaaagaaagaaagaaactgaaaagtgaggtgtggaactccaggcaacgacccaagcacttattttttaagagggaaaggactttggtcatgtttacattggcctttggtttttttttttctttcagccacaactatatgctgatataactcagccatcacttttgagttttgtttttaaatgaaggttaaatgtgacctgtgccctcacatttaattccgtttcatggagacatcttcctgactttgttggatagctgccactagggttgcttcgatcttcagccacatgctgtccttgaagcagctatttgaagatgtgttttctgaggaaaacaggctacaactgtttattaaaaccacttgcagtgcattcgtttatcagatgctcagtgcaaagtgtaattgggtcatggtcaaaaacgcttgcaacatctaattggcgttcaagatagtcattcaaaagttcttggcccgctgaagtctgttaacagttgaaacattctacagttaaccattagcatgctagttgtcctaatggaaatttttgaagagtttttcaatatataccctacccttgccaggaagagaagtaaaatcctcaggttgtggggtatttgtttctactccagcctggcaggcaaggctaaaacctgagattatcgatctatgagacatcttgatatgtaaagcacttaatattaaaggcataaaagtgaaactgctaaatatgtatagagaggttgacgtgtgatacgtgggacagttcacatagacatcagagaatttattccagaaaggagcctcctgaatgtgatgaatacggcaaagcctttaatcacatctcagcccttagcatcggaaagcttatactgtaaataaacttgatgaatattatatgtgaggaaaactttcatgtatagcactcattgcttcagacagaaaatgaattccgtcggtatg

SEQ ID NO: 49228 - DNA, 511 bp, Homo sapiens
tgatggcgtgagactctatctcaaaaaaaaaaaaaaaaaaaaaaaaagtagcactgaataatttttttcatgaagtttaactccaccattccactttcattctcttttcctttcaatttctttagcaaatgtctttgcagctttccaacatgctgcacatgtcttctgcttcctggaagaaaaaggacatgttcggagttgtcatgcgccagaggcttgcccagcctgctctaagggaagtcacggtttggttaccctctgctggccagctgatggcagcaaaaataggtgatgatgagaacgagcgaggaagatccagaaatgcacctttttagagagaaccatgaacaccttactggaaatggaaggaaggtgccagagacaacactaaatgctggaatcttttcctctcctgggtttccgctgcaaagggcactggaattatttttcttttgtcaagccaataatctcccaggcatggtggtgtgcatctgatcccgctacttgggag

SEQ ID NO: 49229 - DNA, 1945 bp, Homo sapiens
tggactggtatctgtctgtgccccaagggttggggacccctgccttagtcatcccagacattcctttctattgattataggtctttagacaataactttcagccagttgcccattagaagatccttgagttcacctatgacttggaacatccccgcttggaattgtcctgcctttcccacagaaccaatgttcatcttacatgtcttgattggtgtcttatgtctccctaaattgtataaacccaagctgtagcccgaccatcataggtacatgttcttaggacctcttgagactgtaccttgggccattggtcactcatatttgtctcaaaataaatgtcttcaaatattttacagtttgattgttttcatcaacgaagtattaactcaatctctggcttcacgggccaagcacagcgttccatgtccataaacctggaccgaggagctgggcccaagggtatccagtgacctcgatccaggtttatggacaaggaaccctgtgcttatcccaagggtactcagggaccttgggctctgaagtccacgagggtgaccgaggtggctgcctcagcccatgccctccctgccccagggcgtcggggttgggtgagagaaccgccgcagccttcatctggtctgaccgtcttcggtaaaaacagaaagagtccctggcttttcattttcggggtggactcaactcctccctgatgtcccaagggccagagacacagagaggacctcccgaatttctagaggggccgctacggccccgcactacttttccgcgggggcggggctatgacgcacttccgggtgcgcggtcccgaggtacgcggtgcggtctcccggtacccggagcggctctgattcatggtgagcctgctggtcgcgggttagcgaggcggacaggagagggagccgtggctgaatggtctggggagggaggagtgggtttagcagctgtggcttccgaggaccccacctagaccggtcctagcagggctgtggggaggagctcctcgtccccgcccaggaccagctggtgggggcgctggctgcctggaaagccttttcttccacttggggctttaacaaatgaaagctggaagaacagatgttttggaagttctttcgcgttccagaatagttttttttgtgcgttccccaagccaagccgtctatcagtctgaccgtggccgccttttttccctttctctgaactggaggtccgaacgcaaggctcattgatggcaatacgcccaaggtgttggaaacctgtgggaagccgaacctcattagaagtgttgggtagaatcaaatccaagggaagaaatagtcccctcgggctttgttcgggctagaacacacacacagaatagggatctgctcatggtttagaaaaacagtcttaaagaaccatgtataaataaaagagtgtcaggacaaagttgatttgggccaggcgcggtggctcacgcctgtaatcccagcagttcgggaggccgaggccggcggatcacttgaggtcaggagttcgagaccagcctggccaaaccctgtccccacgaaaaatacaaaaattagctgggtgtggtggagcgcgcctgtaatcccagctactcaggaggctgaggcaggagaatcgcttgaacccaccaggtggaggttgcactgaaccgagatcacgccactgcactccagcctgggcgacagagcaacacttggtctcacaaaaaaaaagaacgttgatttgatgggtgaggtacttggaaacccacgaaatctaaggaacagttgagctgtggagaggaaaagaattaagaggcaagataattgttttcaagtgttggaaggctgctatggagaaagtgagtattggtcttggactaacctaggatttttgaaatgatgcggaatttgattcaggttaaagaatttgtgt

SEQ ID NO: 49230 - DNA, 930 bp, Homo sapiens
gtctctactaaagatacaattagctgagcatagtggcgggtgcctgtagtccaagccactcgggaggctgaggtgggagaatcgcttgaacccgggaggcagaggttgcagtgagccaacattgcgccactgcactccagcctgggtgacagaacgagactctgtctcaaaaaaaaaaaaaataaagcgaatgctttcactagataataactgcataccaagagccaggggccatgttgaactgtgccggcacagctgttgtggatgagtttgtggcaaacaaccattatcagccacaactcgtcggttttttacagaagccatacagaaagagtgtcttttgcgtctttgagggcagcaataatcacttcagttccattcagggtgtggtattgtttcttgccactttgattggctggggaagggcagggtgtgcaggagtttccacttgacccttctgcctatgacctaagctacaggttaagtaaacaatgtgctgggcatctgtccccctgctaaacatatcccaattatcttctcagggacatggccatagggtgagtctgttcccactgggcccactgagatggatttgggccaggactccatttatcagctgacctgtgtctggagggcaatggtaagttttagatccgtgtcatactagatcctgtatcaaaaagcctcaaaaggcctgggcattctgttttcttagtacgttactctagtgaacagccacaggtcctttggggaaatatttattgcataatactcgtggtacagttggaaggtcttcaaagaaacccagactccccttaacttgatggattccagatctcagaactggctcagatctggaaagcagcagcaggattgcaatttcccattgtaacagccggtatcagccttctcatcaactcttgggatttt

SEQ ID NO: 49231 - DNA, 2354 bp, Homo sapiens
cactgcactccagagacagtctcaaaaataaataaaaattaatttttttaaaaaaagagcttcaataacagaatcttctccttccacccgactgtccatcaaacacgtataatcaaatgatgcccactctccacagatgtcttttctggagaaaataatacgctcgttcctctaattagcccatcggtttcaggttcatcactctgctatcttctcctggagtttacaaaagcccttcagagtgtaaacaccgatgtggattcaatcccacttccggagagaggatcaaaccaggaatctaatacaactgaaaacggagcctgagccaggtgtatcacgcgatgcactgggctccagcaggattacccctggaatcggcgtctgcacccactcccagccctcgtgctaactgcgtacgcttagcagaatttctctgatccttggacccagctgcgtaaaaataaacttcctctcctgccacgggcgcgaataactgtgttaacatcaaataaaaacgtctgggagaaataccaagttagggtcgctgtcattagctgctttcaagagagaggcgcccctaccgctctgctgaaacttttaaacgctccagctgggtcgccgttaaagtcacaaaaccagaaccggagccccattactaacccctacgcaggatcccgctaggctagggggatccctggggaagcggagtagaggacgggctgcaggggacggaggggcgcctccccgaaccctgctccgggccggccgggggaccctgcgggccgcagtggcacagacaccacccccttccccggcgaccacagcctccgtctcaccgcgagacccggggacgcgtggactcaccctgggggcagggacgacagatttgggggaccggacacggaccaggccctgttggaccctgtcacagacccacacaccggggacagaacaaagaacggaagttccccctcgtttcgcttccgggtcggttgttcttgccactcacccgtacccccaacgcccacttgttctgtctaggaaaatgggaggtcctcgcctctctgtggtttgctgactcagggcggctggcaggcggcgagggcaaggagcgcgatcgctgacgcggcactcggggatctttcgctgcgggggctggccggctgcgccctctgctggccacgaatgtgcgaaagcggccgaccacggtcctgggcctcaggacatgtgctccagcgtcgccggccttgggggcgggcggcgggggcgcgcggggatgtcgagcccgcgcttctcaggctggctcgcgaagggcagcagtaaacatacaattattgaaggattcatcaatattaaaaaatgaaccctgatttaaaacttgcctccgaacaaaccgagttttttttgtttcttgtaaaaatgccccctttaaattacccacatctgaagaaaacattccagtccatcacagagttgacatgaggaaaaaacccgtgtacaggtgatgagagcagagaagaggaagcttaccggccgggcgcggaggctcacgcctgtaatcccagcactttaggaggccgaggcgggcggatcacctgaggtcaggagttcgagaccagcctggccaacatggcgaaaccccgtctcgactaaaaatacaaaaaaattacccgggcgtggtggcagacgcctgtaatcccagctactctggaggctgagacaggagaatcgcttgaacccaggaggcggaggttgcagtgagccgacatcgcaccactgtactccaggctggccacagagtgagactgtctcaaaaaaaaaaaaaaggaagctacaggtggaagcgaggcggggatagtcaaggaagtgaccgtgtcctggagacgcggcaaccgtggtgaccgcagtcaacacagtaagccccagcattcgcattgtaattgagctcattcaagctgagcgctctccagtagggactttcccctgtagggagcatgcgcattttgatttcacctgtcctcaaactgaccctttgctcattatcttggtaaaaaacacgcccctgggtggaaatttaagatgctaatgaaacatgcaatgtatgaacaagcctgtacacccactgcgcatgtgcacctagaggaccacccagaacatacttactagtaacacttctcccacccccttatgaataatcgtgtaagaccccttacaaagggggtctctctagagccagcctttgctgtttcatccttaggagcagccctccctgaactaactctctctctatctctctctctcccagggtgtactgtctactctgcacttaactttcaaaatactattttcctttt

SEQ ID NO: 49232 - DNA, 1600 bp, Homo sapiens
gtggctcatgcctgtaatcccagtgctttgggaggctgaggatggaggatctcttctgcccgggagttggagaccagcctggacaacctagtgagacccccgtctctatcaaaataaaaacaaataataaaattagctgggtgcggtggggtgcgcctgtagtcccagctactcgggaggctgaactgggaggatcacttgagcccaggagtttgagggtgcagtgagctgacatcaggccactgcactccagcctgggcgacagagcgagaccctgtctcaaacaaaacaaaacaaaccaccaccaccaccagacatgagggccagtgcagctgaagcctgaagatcaagggctagaagaggccaggccggggccagatcaggcagggccttgcaggttgtggttagttgtttggattttattgtgagggaaataacacgacatgtcattccttctgcaacagccttaagaactaggcgttcttatcccaatttcacagacgaggacgatcaagtcgttaatttgtcaaaggtcacccgcaggcgacaggcggggacagggtctgggaaaacccgctaggcaccgaggcccagagggcgtcgggcgtccccgcaccgagtgccgcccgccgcgacccgggaactgcctgctccccggacgccaggcccgccgcacgccgcggggacaccgaacatgcgccgctcgccttacggaagccgggaaggaagggggcggggccgaggctggcgggcgcggggaaaatggcggcggcggcggcggcggctgcagctacgaacgggaccggaggaagcagcgggatggaggtggatgcagcaggtaacgggccgtgcgggggtggcttccggagacctccttcaggggttcgttgaggcctccctgtgctcccgggagaagggaggagggcggagcagcaacatctttccctgggataagttacgggaggaaagtgtggcccgggctccgccgtcccccactgccatctccagggaagaacgtggggcccggactctcaccctctctcctttccctccacccttagtagtccccagcgtgatggcctgcggagtgactgggagtgtttccgtcgctctccatccccttgtcattctcaacatctcagaccactggatccgcatgcgctcccaggaggggcggcctgtgcagggtgagtgttgggcatagactccagtctcttctccttgctcacctcccccaggcagtggtcttttccccttcctctactggagccaattccccctcccccaaatcatcgtttccccaatacatggttcccactgatctcagaccctcaggtcatagaagtttctttaccctcaccttttccatgtcattctctttcccagtgattggggctctgattggcaagcaggagggccgaaatatcgaggtgatgaactcctttgagctgctgtcccacaccgtggaagagaagattatcattgacaaggaatattattacaccaaggaggagcagtgtgagagtggaatagatgtggggaagaggagtgggagttaaaaaaaaaatgtacagggtggggaagatggagagggttggaa

SEQ ID NO: 49233 - DNA, 2236 bp, Homo sapiens
ataaaacaagccaagctgctgcttatggctccttaagcaccccgctccccattccctttacccaatcttagacttaccaactggttcccatacttgaactgcttcttcccgagttcatcatcctggtagaactcttgtaagaacttcttaaccttttctgtaacatgaaatgtaaaaccgtaagacacaaactttaagacaaatcttagatacccattttcgcttaaaacacgacctatgaactaattaataatatgagcatttaaataaacctaccgaagtctccccaaagtgggcataactctttttcacaagtctgtttctaaccagcgaagaataaagagcccgtggcagtgcacagggccatccaacatctccccaggggaattccggtccctactttagtttaaaattctagcgcccttccccgttggcccctcacactccggtctcaaggttctcagctttctttccacccctatgatcccccgccttctttgggtccccttagcccctgatttcaccgggacctccgccaccgcaccccgccaccgcaccccacccccgctcccgccatcgcttccgctcttagtaaacaaagaagcacatgggcccggattccagccgcttcacagctcgggattcctccgcccagggcgggagccagtccagccattggccatcacacccagagacaccgcgatcccagcccactgccgcctttcccgggcccgagcgaagctccggatcccaggcacgcccccccgggccgcagctctctccgcggccgccgcgcggaaggacactgtttacacgacactccctccagcctcctcgcgccacttccgcccggctccacttccgctcggagggcggcctcaaacggccaatcccggcgcgcagcggccccggcctgcccgcccccggggcctacgcgcgcctggggagggcgcgggaacctgggaatgcccaaaagcgcgaaggaaagcgggcacgggagcccagagcccttaagactctcctgaggtcctgggcgcgacttttccctgtgcagcccccagccgggttagcgcgcccccaagcccccaaccccacgaccctaacacctttaccaggtgggattactagcttttcttcaacatcgatggccccccgcacgcttcccaggccccgtgggccttagccaggccgcagctcgaccctgcctctggcctcgcgcaccccagaacccgccgaccccggtcccccaagaccccagctcacaccaacaggtgttccccgggaggctccccgcgcaggacgccctcccgggctcgtagacccgtacccttctctagcgcgtagtccttcagtgccatcgctgccgagggccgtgcggccgcgcttggcgggctcagaggtcttgctcctggggaagctgagaatctccgcgcggtggactgtggccggccaaccgaaattggcgcgaaacgtcgccccccacgtgaccggcgccactgcgtgcgggccaatcggacaaggcggccttcttcacctcccgctagccgcaagccaatcaccgtgcgggcctagaatgagtgacggggaggcggtgcgggcgtcggaagggaatctccgggcggggtagtgcaggcgccgggtttcccgcggtccgagctggcgcgggcggaggagaatcgctcttaaagggccagcgcacacgcgttcttttgttccggggccgcagggcggggcaggcccgactttcgccgtcttcttgtctactctccagaacggccatgatttcccaattcttcattctgtcctccaagggggacccgctcatctacaaagactgtatcctagacccttggggctgggaaggggcggaggggccgggcgggaggggcgcccagggccagcctgtgtcgcaggatccttcactgagtccttccacccgccagtccgcggggacagtggcggccgggatgtggccgagctcttctaccggaagctgacgggactgccaggagacgagtccccggttgtcatggtaaccagtggcgggaggcgggtgaggagcggggtcccgtcgggccgggtgggcgccagctccctcccaggactggttcattggtagattccacttggggggtgcattccgccaaataaagctaacgtgaggcccggcgcggtggctcacgcctgtaatcccagcactttgggagaccgaggcgggcggatcacctgaggtcag

SEQ ID NO: 49234 - DNA, 2660 bp, Homo sapiens
gggaacccgggaggcggagctggcagtgagccaagatcgtgccactgcactccagcctgggtgatagagcgagactccgtctcaaaaaaaaaagccacgcatggtggtgggcgcctgtaatcccagttactcgggaggctgagacaggagaatcgcttgaacccaggaggcggaggttgcagtgagctgagatcacgccactgcactctagcctgggcgacagaacaagactccgtctcaaaaaaaaccaaaaaaaatttagaggggcgtgcacgcctgtattcccagcactccaggaggctgaagcaggaggatcgctagaaccaggggttcaagactggggcgagctatgatggtgcccctgcactctagcctgggcgacagggcgagactgtctcaaaagaaaaaaagaccaggcgcggtggctcacacctgtaatcctagcacttcaggagaccaagactggaggatcgctggagcccaggagttccagaccagtcctggcaacagaactagaccgtgtctccaaaaaaaaagagaaagaaaaaatagaaaccttagctgggcttggtggtgcgcatctgtggtcccagatactcgggacgctgaggcgggaggatcacatgagcccaggaggttgaggctgcagtgaggtatgatcgcgccactgcactcctgcctgggcaactgagcatgaaccctcctcaaagctaatggcgcttcaaaattctgcagtgcaaagaagttgctggggttgcggagcggagaaccgccaggaggctggagcccagccaggcagcctcctcgggcacacggtgaaggcgccggaactacagctacctccgcggcgccgcttcggccgccatatctgggtacacgggaaccgcagaggacaaactctcacccgcgttttcgatttctgcgctttcttcgagtgaggcaagacctagcagaggcccaaggtagagcgcggctaggattcgatggagggaaacataaaggatagcctttggagggtgacgggcaaggacgtacgtaccgcgaacggaatggggcgggggccgaggacgccgagggaggggcgggcccaagtgtgaagggagtctgggcgataccattttgggcaggggttgagggtgataccaacttaatgggaggcgggtggcagagaaccgaggcttaggggcagtggcggggccgagcgcgggtgggggatcgcggagggacaggacggtcgcccactgctccatttcctttctccccagcccgtccctccctgccaggagcagcctcatgcggaccgagccgctgtgcggggcatcccctctgctggtgcccggcgacccctactctgtggtggttctgctgcagggctacgcggagccagagggtgtgggcgatgccgtgcgcgccgacggctccgtgaccctggtcctaccccagacccggggcccggcctccagccaccgagagtccccgcgcgggagtggcggcgcagaggccgccctggaggaggcggcccgtggccccatcctggtggacaccgggggcccctgggctcgggaggcgctgctgggggcgctggcggggcagggcgtggccccgggagacgtgacgctagtggtggggacccacgggcactcggatcacatcgggaacttggggctgttcccaggcgcggctctgctggtctcgcacgacttctgccttcccggaggccgctacctgccccacgggctgggtgaggggcagcccctgcgcctgggcccggggctcgaggtgtgggccacgccgggccacgggggccagcgcgacgtgagcgtggtggtggccggcacggctctgggcaccgtggtggtggcgggagatgtgtttgagcgagatggggacgaggattcgtggcaggcactgagtgaagaccccgcagcccaggagcggagccggaagagggtcctggtcgttgccgacgtggtcgtacctggtcacgggcccccctttcgagtgttaagggaagcctcgcagcccgagacggagggtggagggaacagccagcaggagccggtggtcggagacgaggagcccgccctgcactaatcagcctcgagagggactgcactcttgtcagggaagccctaacagcgaagagctgctggagacagagtcagagcagtcaagggtgggagcttccagcccttccaggaggccagttttctagtgaagacagagtgcacctgacactgccatcacatcgtcagtatcactgcctgtctctgccaccaaactaagatcaaaggaggggctcagctccctgtgcattctccctgggcctcagtaaaatgggagaaggttcgtgggaggggcctccaaaataaaaatggaaactgcattgaaaatcatagtgccctagtgtaaatgtgaagcattgacaatgataatcgtgcaaacatggtaatctacaactacagcagaggcatactttggccaattgcccctttcttataggatggaggttgctgagagaaggtacagggcataaagatgaccccttagtcacctgacttatgtatttgttcatatttttttgtcacacaggctagagtgcagttgtgcagtcatagctcactgcagcctccagcttaagccatccacctgcctcagcc

SEQ ID NO: 49235 - DNA, 1193 bp, Homo sapiens
tgttggccaggctggttgaactcctgacctcaggtgatccagctgcctcagcctcccaaagtgctaggattacagatgttgagctgccacacctggcctattattccttttcacaaataagaaaatactgaagtgctgagtggttaagtgacttgaccttaagtcaacagagatgacataaatagtaattagtggctgggtgaggtggctcacacctgtaatcccagagctttgggaagctgaggtgggaggattgcttgagcccaggagtttgaggccagcctgggcaacatagcaaaaccccaactctaaaaaaagaaaaaaaaaattagttgggcttggtggagcccacctgcagccccagctacttgggaggctgaggcagaaggatcacttgagcccaggagttggaggctgcagtgaagccatgattgcatcactgcactccagcatgggcaacaggtcaagaccctgaaagttattggcaaagagtaactggcagagcagagattccaacccaggcaatctcgctacagaggtggactttacctcttcatggcattctgaggcggctcctgcaatgaataatagattgatttccaatcgaccaatgcaaaagggacacgtggtttttcttttctaaccaaagagagcatacgcattagactggaaagaccagagtttcctagtgctaagttctcaggttgaggactgagtgccactggaaatttcccggacgaaaagctgcttggagcctccagggaccggcatccggtaagagaaggcgctgcaggagcctccagcttagcccccctacctgggtacttcgccccggccccactacctccaggcatccgagcggcagctgttaactttcgtgatctttggcgcccccttctgcaggcccgcggagcagcagccgtctcgactgccgtccctctcccgggagcgcagcagcctctttctttcctttttcttttcttttcttttcttttcttttcttttcttttcttttcttttcttttcttttcttttcttttcttttcttttcttttcttttctttttctttctttctctctttctttctctctttctctctttccttctttccttctttttctctccttccttccttcctttctttctttctttctctctctctttctctccccgcttctctctttctttcttt

SEQ ID NO: 49236 - DNA, 1033 bp, Homo sapiens
aaccccggcctactcccgcccctcccagatcctcccctcctcggacgctcccgcgtcttcctctcgctcaggcactgaggggcggggagatgggtgttaaagaggggatatcaccaatcaacgtgcgcctccgggaaacagcgcttcgcactggctggttgggtctgacgacgtggccactgtccaatcctcatgctagaggcggggctaaaggccagtggcgcaagcagaaggaggagcgcagcggctgcaagcacgtgaccggggcctgaagccggaagctacctatctggtagggagctcccccagcaccgaagactgcgatggtgagtgaggacgcatgcgcgagaggacccgccgggggttcagcgtctctgctccccagtctgtgtggtttccccctggtgggcctgcgctccaccctcacctcctatccgctcggggaggaagaggggatggaaatgggagggatggcgacgagaatgctggggaggggtctgtgggagggtgttctggggctgcgggtagtctgcaggtcgggcggagacgaagggaggtgaagagagggtctgggggcaggggccagtggggcagcaaaggccccttggggtagcaaaggtgggatgtggaaggccaggggagcccgggggcgagagtgggggcagatggaggctcgggaagatcagtattgaggaccatgtaggggggagggggccgggaagggacctggctggggaatgagaaaacctggggccatcgtcaacccagagacttgggtttgcaggtgaagggtatcgggccgtccatccctctagcatgcttctcacgacttgcatctttacccactagacttctgcgctgacccaggggctggagcgaatcccagaccagctcggctacctggtactgagtgaaggtgcagtgctggcggtgcgttctgggaaagggagggggtcccttagtgcacacagcccggtaaccccttctaatattggcccttcttttctcggcttttatctggtttcctgcctgg

SEQ ID NO: 49237 - DNA, 1793 bp, Homo sapiens
ttggctcagaatagctggacccctcaggccccacctttacccagaaaaaaccggacctaccccaccagcctgcccagaggaactgcatccaatcagttcccttgttgctcccggaggctggagccggcagccctgcttacccttgagcacggtcaagtgttttccagccacagtgaactgccggcatctcagaaccggagggggcagcagagtcagcagcgtgctcactgcgggagggggtgggggcaagaagtgatggtctggaggctgacctcacctccaacccagaattctcaccttcctcttctcagagcccattagccactttccagtgtgacccctcccctctgtcccccaattcccagactctagccctttgcctctgcgctgccctgcccaccttgggccttgaaagcgctctgctcgccccggaatgtctccccaggagatcgggtctgcagcaatcgcaggtagccttgatctctgacctctggtgcctcaatctcccgcttccacacagtcactacaatctgtcaagaggaaagacagatggctgagcccggaaaaggtgtctgaattaggacaatagctccactcttgctcatcttaccttggccttaggtgtccctgggggcagtctatccagtgaaacggtgagtgggaagatgacctcatctgtggacacaatcggttcctccacaggcagctggggttgggaaaggggtgaagaggtcaggagcaagtcagaggcagcctgcagcctttccctttaagaccggcagttcatctgcctcctgcctcaggcccccagcaaaccgcccctccgtcctgtgccaggtcccccaaagctcctcaccgtggtcgctccccctgaggtagcagggcccgggccgtgggtgagaagggggctgcagcctcggaacaaacccccacccccaggatcccctccccctgggggctccgaatcctggtcgccggcgccgccgccccccggcatcccgcctccggcgctgaccgaggccagggcggccagggcggttgccagttctgcccaggctcctctggagcccaagcccgggccgcccccggtgccggaccccgcaccgccccggcagcgcaacaccagcagaaaacggacagtctcccccaagtacagatggttgcgccggggcagcgcccggtaccggcccggatcccctgccagctccgcgcgcggcggcagcggcacggccgggaagtacatcgagtagtcgcactgggactccatggggcggcgaggacggcgcgactgggagcccggaccggaggccgaccgccggcggggcccgctagggtgggtccagagggtcccgacacctccggctgctgcgcccggctggggcggccggagagaccggcccggtcccggcaccggggcaacgaacccgaaccgagacccggcagcgccggaaccggggtactgagccgaatgactggagagaaacaggaagcggaagggagggggcgtggccgccgaggccccggaatctgcgggtgcccggaccgtggaggagggggcggggtcccgctgctctgaggctgcgagaatgcaggcgggggctgcggccaggcttcttggaaaagaaatggaagacctcgtcggccaggcgggttggctcacgccagtaatcccagcactgtgggaggccgaggcggcaggatcgcttgaggccaggagttcaagaccaccctggccaacatagcaagaactcctctctgcaaaaaatttaaaaattatccgggcgcggtggcgc

SEQ ID NO: 49238 - DNA, 3294 bp, Homo sapiens
ggaatcgcttgaacccaggaggtgggggttgcagtgagccgagactgcgccactgcactccagcctgggcgacagagcgagacagtctttaaaaaaaaaaaaaaaaaagccccaattccaaatccacctgcaatccaaagggaagaagttttgcagagaagttcttcccatttgtggggcgctcccatttttcctctcttccctcaccccttattctctctcagggatagcggttcaagtcggtgtccctgagccacacgtccccctctctcttccccgtcccctcccttccttcctcccaccatgagggaatctcccctccacccccactcctgccgaggccccgtgatccttattctcactcatatcgttggtgcccgccaggagactgggctattttttttttgtctgtttcttgggggcgacagattctgaggaaaaagggcgaagggctggttgtcgccctgagaaagtttctcctcaggcaacgggtgccaggactggcagcgcctagcaccttcacctacaaccagaaactagctggctaccttcaggagcaaggaggacctaaaggcgatgggcggaaccagctgccgcagcgactccgcaagcccctcacacctcaacccaggtttcccgccaccaagaaaaggcacgaggacgccctgagcactagctccacccgagggcggtgcgctcgcggggccgaggcgcatgcgcaactggaaacagcgtctgcgtttccgcagctgaggtaaatccgccatcttccacccgaacgtcccgggaaaactacaaatcccagaatcctctttggtgtcacatatttttaggcggcggccgcggcgcctgattgttcctgaagcacatctactaacttttctgtttcagactgccttttcctccctctttccgttctctaattcctcctcttcctgctggtctccttcacgccctcaccttaggattttgagactctcctggaccccactgtcacccctgccgccctgtcctcggcccagcactccgctggcagggagaccgggcggcgcatctccccgggaaaacggcgtagactcgcttcttcctcattggcagaagctgggggggcccagcgcggaccgaacccccgtccccgcccacactcgctggtatataagtcggcgtggcgccgcggtgggtgttgagaggcccgcgaactgacgggccagtgagcgggcgtcgggagtgggcggatgcgttggggttcgggtcgtgggtgttgaggcggagaggaaggcgtggtgtggcgtctccaggtgattgcgattgggggaaggtagaggagccagagaacgactcagccgtttcgggggaagaggaagttggacaacatcggctgttttagtgctttttatttttccccaattcagcagagaatattttcaaggggggtgagttataatgacctatcgcgttttactgagcccagttccactcccgcccttccttggctttgtagggtctcccctccgctccctcggaagcgcttctaagaaggtgggcagagggggggaggtttgctaccaacagctcatgaataattcatgagccccgcccttcgtcaggaagccccgcccctccggatcgcgctgacgcacgctgcgtttaccaaacttaaggaagcgacgtcacaggcccaacccctaagacggggggcggggcgccagtttcagcacgtgctgcctctacccgcgcaagcccaaaagggtgtgcgcaggcgctgcccactaggggggaggaaggaggcggggtggggaggttgttggatttagagccgggcggagaccgctgagactcattcctcaggaacaagggtcgggtgtcaaggagaccttttcacaccagctcccgtcccccgcctacggtgggtgggatcgcgcggcagagacaaaggagatcagtagggccggacatagctgcgcagggaagtagggtgtcagtttggggtggtgggcttttgcgggggctgtgggggggttatatttaaactcccagagccgttaagttggttcgtagtctgatgcgcgcgcaaccagggtggtggcggagtgcgcatgcgtggttcccgggcgaagggaacgcgcgctcaccgtgcgcgctcgcggccgggtggtagtggcggaggagaaaggggtcggcgcacgcgcggttgagtcctcgagtagttcgggtctcgcgggcctcttgttttggtctcgcgggctagtagggcgcacttggcggggaggcgcttgggcgcgagactaggcgtgaagagcagagctgcgcgcgcactcgggaaaggggggaagggagcagggtccaggcagggggggttaggccccctgatccccctcgttaccccgactggcacggaataaggggaggaaatgatcgagatggcggcggagaaggagccgtttctggtgccggccccgccgccgccgctcaaagatgagtcgggcggagggggcggccccacggtgccaccgcaccaagaggccgcctctggggagctccgcggcgggacggagcgtggtccgggtcgttgcgcgccatctgcggggtccccagccgctgcggtcggtcgggaaagccccggggccgcggccacctcctccagtggtccccaggcgcagcagcaccgagggggcggcccccaggcgcagtcgcatggggaggcccgcctgtcggatcccccggggcgagccgctcccccggacgtgggggaggagcgccggggagggggcgggacagagctgggtccccctgctcctcctcgaccccgcaatggctatcagccccaccggccacctggggggggcgggggcaagaggagaaatagctgtaatgtagggggaggcgggggaggcttcaaacatccggccttcaagaggcgcaggcgggtgaattcggactgtgactctgtgttaccctccaacttcctcctggggggcaatatctttgatcccctgaacctgaatagcctcctggatgaggaagtgagccgcactctcaacgcggagacccctaagtcatccccccttccggccaaagggcgagatccggtggagatcctcatccccaaagatattactgacccgctcagtctcaatacttgcactgatgagggccatgtagttcttgcttcgccactcaagactggtcggaagcggcatagacaccggggacagcaccaccagcagcagcaggcagccggagggagtgagagtcaccccgtgccgcccacagcccctctcacccccttactcc

SEQ ID NO: 49239 - DNA, 1858 bp, Homo sapiens
gctctgcattttgagagatcagaataagtgatgcagagaacaatcgctacctgatcaaaaacaggcagtagctgtggctgaagtcagggagaggcaggtaaggttgtgaacggaggggtatctaagtaaacctctaacgtggacagtgttttccacttgccatgactctaccaagttccaaaaaggcccccaaacccgacttccaggcagcttccaacctgaggctaagtggataaccccctagagagcttttaaccccattttaggcctccaagaagagtcccatttattagcaaaattactttattctaacaaatagtttaacacaaaaatacgaactagccctccagggatctttggggtctacgcttcccatcgcctcagtgtccggtgcatgaggaaggtgtcctctgaagggcggggccggagttgaagtcggagagggggcagaccgtccagggtcaggtgtggagattcataaaatagcgtttctgggtcacacaagatggtcatgtctggcccaggcccaggtggctcctgttgggaggttgggcccaaagcaaggttacactttgggaggaaggatccgggtaagggggtacatggaggaagccccacgcccagaccccatcacctttgggtgcggggctcgagcctgtggcggcaggagagccaatttctccctgagcgcggcattcagaacctgttcctccggcacctgcaggctcaccaggtcccggaagagccgcttggagcgcggcacgttcagccctgagagcgcagcggggacggaggtgagtggcgcgcctcaccccgactcccgcacgcggccggccgcccgcccccctcaccctcggacacgctctcctccaggccgcagcggatctggaacgactttctcagctgttcctccacggccttcgcagcatcaaagtggctcccggctgcggcccgcagctccaggcccaaggccaggctgctcttcagcacgggcatctccagctcctgcggcaccgcaggctgcggctcggaccgcaccggggagggcggcgtcaggcggaagcggacctgggagcagagggcagggcagtgaccaggtgggcgcgaggccgtcgcgggccgggggccagcctcccccgctcacctgccgccgctgccgagccgcgccccgccgctccgcccgccccttccgccgcccggggctgccgtgccgcggctgagggctgtcgggccgcgggctcaggctcaagtccaggccgggctcgggcactggggctcggagttgcgggacttggggctccgggggtggccccgggaccgccgcggcttcttccccgtccgccgacttcagctctgactccccacaacccatcatcatctttggaggtgccttgagggtgcggggatgcgggggtcgcagacgctccaacggtcaggggacacagcctggctgccgcctcctttcccccgcccctcctagacgccgctaccggaaaccgttaaccctttccttcgggggcggagtcagcagccccacccaccctgttgtcgctcccaggcgtcatttccctcgctccgtccccaggtttccggcaggcttccgcactcacagccttggcaccgcccccaagccgaagtgttggaagcactcacagccttggcaccgcccccaagccgaagtgtttttgagctggggtcggttgaagccctacgggtcctcatcagggccactcctcctcttgaaaactctgctatggctgagttacccagaggaatcttagtcctgctagcgctgcgatgcccattgcccagtgtgtcagtcctcattctggggcgccaaatggggcagcattttttt

SEQ ID NO: 49240 - DNA, 1565 bp, Homo sapiens
gctatgattgtgccacttcactccagtctgggtgacagagcgagaccctgtctctaaaaataaataaataagccaggcgcaatggctcatgcttgtaatctcagtactttggaaggccaaggcgggaggatcacttgagcccagaagttggagaccaggctgggcaacatagaaagaccccatctctaccaaaaatttaaaaaattatctgggtgtgatggtgcacacttatagtcccagctactcaggaggctgaggtgggaggatcacttgagcccaggtcaaggctacagtgagttatgatcacaccacggcactccagcccgggcaaaaagcgagactgtctctaaacaaataaataaataaaaagccatttttttcacatatgaatggactcctgggaatgcaagcttggaaatggggaggccgaagcccttgcctctctgcctcctcgcagccctggcccgtctctcgtctgtctccctgggtttcagtcccagctccagtgcctactgaccatgtgacctggggatcattccctttcctctgagagcccccctcttcctcatctgaacactgaggaaatgactggcctcatatggttgccagagctcagttggggccctcagaaggtcgagtcattgtttttcaggagctgatgagatcatggcacgtgtgccattgacctctgtccttcctccctccccacctttgactcagcctgtcctctcctcctctggacgacctctgggacatcctgcccttttcccgtgttcattgtttctgcagcagatgagcaggatgtcggggatgctgggaaatgaaaggcccctggtctctctgccggtaggctctgaggcagggggttcagaccctctcgcctcgggctcctgctggctggccccacacgtgccccctccagccccagccctgctcagtggagaaaacagataaggcaggaaatgtggccccagttctaggaagctcagagtcccaggaggcagaagacatgcctctcacccgctcactgacacctgctatttgctggggcctgggagtggcatggacagctctgagtggggccagctttcaccctcccagggtgcagcatgaactctaacatccaggccaggccaggctccaggaaagaggatgcaaaacttcatgcagcctgtgcagattaaacaccagccccagctctgtgaagggtaggtcagctcagcctggaggatgggaaggcttcctggaggaagaagcccttgaaggaagtaggtggaacagaaacttgctgttctcctctctgggagtctgagactgccctttctttttttttgagacagagtctcactgtgtctcccaggctagagtgctggagtgcagtggcacaatctcagctcactgcaacctctgcttcccagttcaagtgattcttctgccccagtctcccaagtagctgggactatataggtgtacgccaccacacctagttaatttatgtatttttattagagacagggtttcgccaagttggccaggctggtcttgaactcctgacctcaggtgat

SEQ ID NO: 49241 - DNA, 1020 bp, Homo sapiens
gagcaagactccgtctcaaaaaaaaaaaaaaaagcgacagatggggtctcactatattgcccaggctggtcttgaactcctgggctcaagcagttctccctaccttggcctcccgaaatgtcaggattacagacatgagccatcatgcgcagtggagaagctgttttcactagaaactaaccgtcccgtggaagcagtgtcaccagtgcccattttatgctctggagaccctttagtgtttaagaatccatccgctaatgtcggctcccccatcggctaatgtcgtaggggtgctgggaggagcggcagagcccgcggtcagggtctccgggggctcacatagggaggtctctctgttcccggctatggcctagagcccctctagcagttcctccaccacccccattaggccgtaggggcttccccagccagaggccaagggcgacgcgaccttaacgccggtccgcgcaccgcggcgccacctggaggtcaggaccaagacgagacaggctgttcaagtcccccagcttcgccgcggccgccacgcccgaccacccggcccccgctggcgtccctagctggccccctacaggtcttacccgcgcttgttgcccccagacccaggcttctccccacctgcacccaccagactgggaaggtggccagactagaccgagggctgaggcgggagagactccgcccccgaggccccgcccccttctgacagcagacgaggctgacgtcactggattgggcaggtgtccaggtgtcctctctccagctgcatctcccctcctccacccaaggggagtcctcagtcccccaggccagagtctccaataccccaaggtgccttctgtgatctccccgcagtgcagcctccggggcaccccccaccccaataaaactcatctccggttaaaatatcgattccagcgggcgtggtggctcatgcctgtaatcccaacactttgggaggccgaagtggtcagatcacccgaggtcaagagttcgagacca

SEQ ID NO: 49242 - DNA, 1540 bp, Homo sapiens
gggggagcaggggcaggtttttcctgctgctgttgctgctgaactccagagctgagtttgcaaactggaaaaagagggggagagagagagagagagagagagagagagtgtgtgtgtgtgtgtgtgtgtgtgtgtgtgtgtgtgtgtgtgtgtgtgtgaaaccagtgggcaggccacctccggggcttcctctccggggagcagagtgggggaaggggaaaccgtcagagacccagagacaggcaagagatgacagagaccagggcagaggggactggatccaagaaggcactcagagtagaaagaggcagatgagtcccagagttgggcatttctcgcctgggattctgactcagggggcccgtattgtcccaagagctcggactccagggcctgggagaaccaggctgaagcagctccccagcctggcccggccactcagagagacctctcctgggcctcgagcccccaccctcaccccagctcccacatctctggggcaggccctgcccggctaccccccagcgccccacccagccctgaaccctacctctggggcctcggccactgatctgagcctgagggtcccggcgcctaagaggtcgggctgtccgttccctggggcctcctggccatgggcagtggcggggcacgcaggcggcgatcagaggctgtcccgtcctctccgggggccgcggctcatcctgccaggcatctccgaggaaagtttgctctccggaaaagaagaaacccgcgcctcctccgaggagcctaggagcggcctctgaagccccaagggtctggagactgatgtgggagggggcggccgagcccccctctgctcccggtggcagccagcgagtgggtgtcccgagtctcctcccgcgtgaccctgctgggtccgtgtctccgctcctcggctcccctgggtctctgcctctccgtctttctctttctgggctgttgacaacccccacaccaggaagtcctgcctcctcgggcctgctgactgctcctctcctcctcctcctcctccttcccctcttcctccccttcctcctccctccctccctcctggggcttcccgccagctggcccggggccaggcctgccacagccgctgctgttgcagttgctgcagccactgcttaggctgctgctcctgggggccccaaacagactcccttaaccccacacctgccgggccctagccccactcttgcagggaggggctgcagggggcggggctcggggagaaaggggaggagcttgcagggaggcgagggattcccttacttgtagtcaattgctgccattggcctagagacacacagaagagacggaaggcacaggccgggaggtgtgctgcatgcccacccagaagttcccagtccctgctgtggggcagctgtggctgttactgtcattctcctttggttttcacagcaactgcattattccccccattccttatttttaaaagtggattattgccggatcccggtggtggctcatgcctgtaatctccgcactttgggag

SEQ ID NO: 49243 - DNA, 1035 bp, Homo sapiens
gtggaaggtacaaccgaggtcttctcgagctgatttacccccgctgcagagctgtgagcccaagggatttcagagggagttatttctaggggagataatgagaaaagaaaagataaatgagaaaaggggaggtcgaggtcacgtcccgtagcggccccccgacagtgccagggtggtagccgcggtggccacactcaggtcgaccctggtcgttgcgagcggcgccgggggagtcaaaggtcacgagaggaggactcgggccacgggggcggatagctttgagcccagacggtggaacgagatccgggcacccccgggaggctgcagggggaggcagccgattcccccgcgagccaactcaggtgctctcctggcacctgggggcggtggggaaagggggcgcggccgccggagcacgccccctgctgggctgagccgccgcccgtcccgttccccaccctcggagcccctcggcccggaaagcggcaccccctggcggccccagcgcctcactgcaccccgggccccgcagccgcagcctcggccccggaccgacgctgggtgcggacccggggcgcgccgggcgtacgggttgcacggggtgcacggggtacacggtgcgggggcgtgggccccaggctgccgctggggggcgccgccgcacgccgctccgccggggccggggagaccgaactcagcaccgaccggccgggcagggggcgaggggcggcgaggagcggacgcccaaagaccgcgacgggctggcgccgggcccccagcgccccacgaccttcctccgaatctgcccccgcaggctccgcggctcccccgccccgcgccccagccccacggccccgcgccgcacggccgctcccgttccgtccttggagggtgtggaagggtgggtttggggccgggggcgggtctgggggcggacccggaggcggggctgtctctgcggcagggcccagcttcgctccccccggtctgtctctgtctctcctcctccctcctcctgctccgggcggagcccgg

SEQ ID NO: 49244 - DNA, 518 bp, Homo sapiens
ctcctgagtagctgggattacaggcatgcgccaccatgcccagctaattttgtgtattttttagtagaaacggggtttcaccatgttagccaggctggtctcaaattcctgacctcaggtgatccacccccctcggcctcccaaagtgctgggattacaggcatgagccactgcacccggtctggtgttgcctttttttagggatgttgaaatgcatgtggctgtgataactggagaaaaggaacaaagtacacattgggtgcctagggtttacttctgggcctgcttctagtctctctctacatgctgtacctaagcaaccagtcccatggctctaagcgatgactcctaaacctacatttccagctctggcctggcctggaaatccagtctatacatatccacctgcctgcttatcagcccactggatgcctcacaaggatctcaaatcaacatgtccaaaaccaagctactgatttctgcctatcagcaccccctaacccagcagtccccaaccg

SEQ ID NO: 49245 - DNA, 2240 bp, Homo sapiens
ttgttgaacctaagggtgtaaaatggggattccacctctgggataggcggagcgaatgaaatgacatttataaagcactcccttcgctctgtggctcaggaattagagcactggtctagtaaagcactcttgctccctctccctctctcccttaagcgctctcttctttccccctcctgctcagcccctcacatggccacttctcttcggctttgcatgacactctacacagtctagagtaagcctttgaaatttgccgggaattaacgtcatcagtcgggaggacgacagctacgcacgcgcggggcacctcctctgtctcgcgcgctaactttgcagccccgccagccaatcaaaattagcgtcggagcccgagtgccgaggactcaccaatcggaactaggaggcgggccacggtggaggcagcggcgagagggggcggggacaaggagagggcacgcacggttctcgctgctggggtctctgccggccaataggagaggcctgaggcctgaaggcggtggggcggggcattggcggctccagcaaccggaggccgtcccagggagggccaatcggagtaaggaggtgggagaaacctagccaatcagtgtgcaggacgggcaaggagggtggtggacggcgaagtctcctgcggatgccgcccgctcccgagcttctgtcaggggagccgggcgtgcggaggcggctgaggaggcgggaaggcggcagtggttgaaggggtgattgctgactagcggggagggagtgggcagcgatggtgatggcggcgaagaagggcccgggcccgggcggcggggtcagcgggggcaaggcggaggcggaggcggcctcggaggtgtggtgccgtcgggtgcgggagctgggtggctgcagccaggccgggaaccgccactgcttcgagtgcgcccagcgcggggtcacctacgtggatatcaccgtgggcagcttcgtgtgcaccacctgctccggcctcctgtgagtgaccgggagggagtggccgaggtcggcgtggggggacccgggggcggggtggggaggccggggctccggggcgcgagggaagggggccgaggtgaggggcggaggggaggtcagggaacgcgccggctgtggggacggggtcgtctgctgcagcggtgtggtggggaggggaaagggcaggggagaggaagcaaggccggagtcgctctgcggagagaagggtacgggtgcagaaagacgcccggagagggaccgagaaactccccgagggggtcgaggcaaactgcaagtggggagggagaaagtgcggaggatggaagggaactcggagtgggatggggtgtcgggacttaaagggccagaaaatgacatgcacctttagagggaacttcatgcaggtggaaagcaaaaaggaaaaaggtggggaaagccggcctggagatggacgggcacctttcttccttcgggcttgtgtccctgctggagtgtgagatgcagaagccagctgaaacttggttgaaattcctatgattagagtacaggattaaaaaaaaaaaaaaaagcgaattaaccccgattgacagcctagagatagtggctggaagggagccatggtccagagttcaggtgtagatactaatcttagcagggctttgaaatgttacccagaaggtaaaactcttacgaaatctaagagatgagagccaatgggttaccctggtagagagcttagctttttcaaacgtttgcacgtctaggtgagccatcctgaaggttaatcatttacacctttaagatccctgttgccatgactggatcctggtggtagcatccaggaaactctagattttgggggggctttggtgcatcatctgagtgctactcttggcattggtactgttcggtcatgccagagtgaatttacagccacaattctagcctagatttctggttatatagtaaagccccctccactcccctctgcactcctcctactcccaaattaagatattatttggttagatgcatgattaacatctgatatcaggcctggatctctgttttttaataagtttgtcaagggatttattttgacaattttttagtcttattttaagacactgttgtttttgttttgttttttaaaaaatgctttccagccaggcgctgtggctcacgcctgtaatcctagcactttgggaggccgaggcaggcagatcatgaggtcaagagat

SEQ ID NO: 49246 - DNA, 4678 bp, Homo sapiens
ttcttccagtacctaatttccttaacctagatgtggatctgtttaatttccccaacatacacatatgcttgtttgtttagttacatttctaattcttggaggatgaatctgtcatttgaatcttaagacgtggtaaaaattgctgctaaaaagcatctatttgcaaagcagtgctttaaatgttctttcttgttctggtttgcctgaatgcgtctgtgaatgaaccactgttcctcagaaagaaaatggatgttgaggcctgagatctcattgacacaaggatggacgctaactttgacacccagttttttcagcaaagtatgacatatttccttgatgtggctgtttgggtccatcttcaatccatcgttcttcaggtgtttgtaatagacacttatctcttctatttctgcccaactttactgtgatcacaggagtcagaattaaggtgggcagagctctgggctgggtgtcaagaatgcacttgacagctctttatttgtgacaagttcctgccctccttgtgccttactttccctgtcgggcttgctggtggttcttagttgaagcattttaatctccatgggaggaaaggtacagtatgttcttcaataattcagtacttttccatctgtctgggttggagaggtacacatgtaccttgcccctgttttagtcccatccctccatcccctcctctgtcacctttcatgttgacctctgctgggcagaggtggacagagtctctcactaaattacagatgtaggtgctgtttcataaggggtgcatgaaccacttgaaaagccccgaaggaagtgataaattactaaagggatgagaaaaagctcgacgtggggtggtgggcgggggggtggggatgagagaggtgagggcagagggagacatgtaaaaaagattgaggttgagcctaaagggaagggcggctggatgctatcaggagtctacctggctctaatcaacaggacagctgtttatcattgctgctgaggaggaacaaaggaaatgggttgaagcagaatttagatcaggaagagggttcctaaaattagtgaaattgaccctggagcagggtaataggagagccttcctcttagggactattaaaagttcctaacagggactcttcatggtgatgtttgcatccaagataagagctaaactggtttagttgtatcctgttcagaagcagaggagtgaaatcccagagcaaagaaacacgatctggggtgtatgaatctgaacacaattgttcaaaggcaaggatttcccaagtccaaatttggcacaaatgaaaaagaacttgggtgctgggtggaactggtttttttccattgttgacctggcagaactttcttatctgagcagctgagcaggtttgatgcttttatgaagcaagatagaagcaaaaatatgggccagcatgagggtgatgatcacagaaaaacaaaaggtgtggtatttgtggaaatagtactatgcctaatggaatcagagaggagacgggagggagggaaagagagaggactgggcagttgttagcagctacacatacaagtggcttcagctgccaaataattcagaatacttcatatgccctttaggtgccctgtgaaaaagaaactgaagtggataaagacaacctgactggctggaggcttgagtcctagtaataatgtactttccattggaaaaacttactctattctgagaaaataaattgatctctgttcctccccagcacttcctggttagaaataccagaatgaatttgctgtgattacctcttttgggaggaacctgagagttatgttggggagctgggtgcaagtgggagagctgggcctgtttaattccaggccagtgactcacatctggtccgctgcatgaccctggtgtgtacccagtgaaatgcagcacacctaggccacatggttttagctaccaggaggaagggggctctcgtttctaaattgcttcttttggccagcagtggcctctctgtgattcagaaagaaaaactctgactcataggccatgtaactaggcccccttcctaggctgcagtgttgccttgtagagaattctccctgcccccagactgtggctctggttgtacaaaatccagtctacagacatcaaggtcagagcaatgctttttgtactgtgctatggaaacatcctgttccatcagattcatttggcccaaagcacctaaatcatttcttattttctctgccttcccatcatcctgtcacgtctgccgccccccccgcccgccacccccaccaaaaataaactcttttagtccaggctcaaccataagttctgttctaagcatcccattttgattgatgcctgggttgagtcctgcctcctccccctaacaaggaagcatacctccctgtttacagttcgctaacagttcctggttatccattcaggaaatgtcaatgacctttttgtgataggcttagaatctgtttttctagtgtaaacataatacattttaccttccccatgactgtttctcttccttccgcaactgctgcatcctggagtcacgttctccctgatccatcagtgcctgactgaatagcaccctactgcagtaagaagtacctttgtccaggcttcctgggttcttcttgtgagctcctggtgataagataactctgtcctataatttttgtatcccccacagtgcctcccataatgccttgtgttttggcaaagtaaattttgtttgtaggaggtgaaggagaagacctttgagatcacagggacaatgaggtctggctagacttcagaaagccctgacattctgaaggggaagggcctagtggttaaggtgagaaagtctaaaagcaggctggctagaattaaaagcaaaaccaaaccaagccattagcaagagaggccttaggagagagaatggactatctctgaaatgtgatcggaagacagtcttcggggcagaccaagcttaagagctattgtttgatatgtagtaacaaagccttgctttcgtttttccctgagcttatctttccttgggggcatcagtcctctttgatattgcttgtcttttataagagcatttttgagaccctttatacctaaaggtctagcagcagaattgctgcaaacagcgtcaactggagcctccagtgtcctgtcctttgttaaaatcccataatgagtaatttatcatccgcagggtggccgcccttactgttcactctgtactgagtccgcccactccctgccccccacccccaccaccgctgcttttgcttacacctcgctgctgttctcccagacttggcaggagcacttggattctgtgtgtgcacctgttagtgtgaatgtatgttttccccaccttctttgtgaattttcaggattttcatctgttaaatatttttgtctctttttccccctttgcgcttcctgaggatgtcagccaggaccctattctggatttttatttgagcaactcgatttggccattttttttttttccatgagagtaaaagtctgaagaggcctcatctgctgagactgcttccctcctgtcccaggatctagcttgttttggtttgggcagttttgtttaatccagtgagggtagtagacctagaccagaataatacttaaggtgcaaggacaggggaacctatgaagccctgcctggcttagccccaagtttcctgtattagaacactcctgagaccagttgagtggggacaaggaagccttctcttctcttataatctccacagggttcctggaggcagaactggattcccagggagttaacagaacatacagaggaggcacaaaagcattgccacaggttacatattcctcgcccatgccagccttatagctcatggttgaacttgacttcttcctgctttattgagagatacagaaataagaaaatcaaatatttcttttcctagagatggcttcctgaaagagagggaccctctccatcccaccaccactccacccttctttgtagacacaaggaggaccagctgggctagagactgttttttgtcaccatatcctgtttttgttagtgttatcaagaatagtactgggccttcatttttgccttccctcatgcttgaaggatttgtgtttttgtgggccctgggaccttggggatgggctgtaggtctaaaacaatgataaagtaggaagtgggaagtggtcacgtgtctgagttcccagaagtacccccctcggcctacaggctgaacactgaaactactgggatctgagccaggctagaggaggcttctggatgggcaggctctacctttcctctccagaactactgggatcacaggatgttcctgactctctcttccctgtctctttggagattcttttttttgggggttggaggggggtggtgggagtggggacagagtcttgctgttgcccaggatggagtgcagtggggtgattttggctcactgtagcctctgcctcccaggttcaagcgatacttgtgccttagcctcctgagtagctgagattacaggcgtgcactaccatgcccggctaatttttgtatttttagtagagacaggttttcaccatattggccaggctggtctcgaactcctggcctcaagtgag

SEQ ID NO: 49247 - DNA, 1441 bp, Homo sapiens
tggtagctgcagattcaaacccaccacacacaccacggggctagagtgactcacctgggctcacaccaacttctggccaatgcagggaccatgctctgcagacagcagtcctctagcatggccccagcattcagccagtcggtcacctgtgggccatccccatgtgtgaggaagcaggagtcagccaccaagtgtctccacatcggagcttgcgggtcagacctgtgggccaggggatgggagcagggctgagggtaggggctgaatgtgtggctctgtccctgtgttgccttccacagaggagcaaggcctcaggctgaggaaggaggggcacgctggaacagcctagtctcctccccgtggattcccccaaacccataacattcttccataggggctgagaacgcagtgccccgtccctgacagggatgaaaagtgaacccctcaggtcaggagaggcagagttgaggttctgccacttcctgtccctggggagccactcaagttaccagggctaccggctgaaataaatcttttccgggtagggtcaagggcagtgtgttgccaaggcaactgatgtaggccagttgcgtgactccaggtttgtcctggtactcagtgggtccaatcacctggcattgatcacctggcattgatcagcacccaccccacccctgaggcttgcccagcccccaggccctcagatccctgctcttcctgcctttcctgcccatgtgtcacccagcacccaaggttcagtgacacagggtggtttggagctggtcactgtcatagcagctgtgatttcacaaggaagggtgctgcagggggacctggttgatggggagtgggaaggggaaggaataaagagatcttcctcaggtatcttcaagcctcagggagtaaaaaagactcctgggcccggagtgcagcagggacaggggccctttggtggcctctttgaggcagcagcaggactgggagggggaggggtgtgcacatgtcctttgtgtccctgcccctttgcacatggtgcctgtatcaaggcccttggccacgtggggctatggccttgaacacagtccggttttgttggccacttacggagccattgcctctgtggccaacacccaacactgggcagttgccgagccccgccccacggcccccccgccccacaccacaccacctgtgcttcgagcctctcctgcaccccagtggggctttggcttaccagaggtcacctggagcaggccctgggtcccacctgcctgctggctgggtgctggttggttccctgcatctccctctcaatgtgaccttggaataggtgtgtgaggaccccagctccatgcacacagcacttgcctcccatattcccactcacgtggggccccttccccaggaagcaggaagtgtggcgggaagccctgcccaccct

SEQ ID NO: 49248 - DNA, 2705 bp, Homo sapiens
ccgaaggggtcttcctgagagatggcctcttcctccgaggtctccttcagtggccacttgactgggttccagcgggtatggtctgtgcacagggactaccccctgagcttacttagcccaagtcacctcctatcaccccaaactttcaagaaactcaatctccagctcagaaataatccagcgcagtgctcagtggcggtggctcctttggttacttggaagggcacaaaaccactcctggatgggaagggggtacacacaggaaggacacctacaggccgagcggggcgtggcaggagccagcagggtgcatggaggccccgttccaaagccctctaatcgccagcgccaccaccgctgccacaagtccgatcactggcctcacaccgaggctttctcggttgccccgacgacgtgtccggaccgcagtcagctgatcggtagagacgcccccacgctctctgcccctataaaggctcagtcttggggtcgaggccgcctctcttggacttccctactcaaactccagttcctgggcgacgtgaggattagtctcgtggggtgggggttccggagcggtcggcggagggagggaggtagtggggagcccaggccaggggcaacagtcaccgggacactcgctgtgcgcagagtccttgccccaaacttccagtcgggagcccgggagagacgctgggcatcaagacgggtggcagcctgcccggccgctgctcccggcccgccgagttcgccacctcacccccacccctgctggcctctccccgtgctcaagacacgagacccagccgtctctgcctcttctgcagccactttattgccttcgcccctgaatgaagcccgcaggcggcggccccggggagagccgggaatggccgccgtgcccctcagccagccgctgccctgggcctgccctgccgacgtgcggttctgcggccacctgcgcgcagacccgccgcgtcccgagtgttccgagagcgagcagaagtttcgcgcgtgccgagcgcggctccagcgcagcctgagcctggcgggtgcgtgcaccaccagcaagtgcgcagatgcgcgccagcaccacctgatcgtcctctacacccgcgacagcagcctgcgcgtggcggcggcaggcgaggcggagcagcaggcgtgatacaacaccctgctcgaggagcgcggtgatgccggtgaggcccgagccccgggcttccgggggcctcgggggcttctggctgtggtttctccgtggctcgcccctcccccaggtcgccgaaagttcaaacattaaaggggcaggtttagagttctccgggcacaggcccggcccggtggctcacgcctataatcccattagtttgggaggccaacgcgggcgtatcacctgaggtcaggagttcgagaccagcctggccaacatggtgaaaccccatctctactaaaaatacaaaaattagccgggcgtggtggcacatgcctgtaatcccagctactcaggagactgaggcaggagaatcgcttgaaccggggaagcggaggttgcagtgagccaagatcaaccactgcactcctaggtaacagagctagactctgtctcaaaaaaaaaaaaaaaaaaaaaaaaaaaaaaaaaaaaaaagagttctccaggcacaatgacgaggcccaggtgctcagggaccctcctatgagcaccttcagactccctgttccccatccctgagaccccagcttctgcggaccagtcaagtggcctgagccgtccagggtgtctgggagaggggatcgagcaagcagcccttaagaccttggcgaggctggggacagcagccttctaccctaaggggctgggtgggggctacataaccaagggagcagggagtgactatgagcccattcctacaagtctgggttcaggagcctggacacaggcccaggagtgcccatcgcgatgtgggggctggctggggatgggtagggactcagcgctgctcctgcccccctcagagctggctagggagtgaagtgtgcaccaagttatcggccccagagagcctcggaaccggcaccgccaggccagagcccctgacgagctgcctcagctacgtcgatctggacctggtcctttctctgggggcacttggtgacgtccccagggcccacacgctccgcccacatagctatgcggtgaggagacctgagacccaggcagctctctcctgctgactgatgggggggtggttgagggagggactggagggaatggcattgtaacgcccccgccctgcctcctaactccccaccgtgtgaggggctttaaggcccagatgccacctcggacaagtgacctgcagggcaacaagctggggtcctgccccctgtgtcccttccagctgtggcacctaagtcttgagtagaaggttctccaagaagttgggctattttatgggagaaaattctagaacctatccccgcccaaaccaccgagactacacacttctgggctttctcagctgaaaccctgatcctgtttctctacagagttcgtgcaagaatctctagagtctcaggtaggctgcggcagggccacctttctgccagtggtgacatttacatggaccggcaccctcccccacacacctgcagtgcattctttgtgtctcctctgagccagacaactaccccacccagcccag

SEQ ID NO: 49249 - DNA, 2083 bp, Homo sapiens
aggtcataggctgcctcctgagtagctgaggcttgactcacctgtcacagttaagtcccccaccccctaccatccacagacaccagggtggagggtgcatggttggacagatcctgcgggtggaggcgtggaaggacagtctctagctggccagcactcccagctaggagataagatttccttccctccagcaacggcctcaagtccctcccccgggggaaagcagaaactgaaatgggaattctaagatccctatgaggtcacaggctccacagtgacctcacaggcttaggaaggaggaggaggaatctcagataagccggttggggataataggcggaagagctcagggagaaaagagtgaggggaggtagagatttgtttctttcccataggctggagagctgcgtggacagtggagagggccaggaccttagggggcggggttgcggcacagaaagcagaaacctcgggcttaggggccagtcactgggaagggggtgcccggggctgctcggatctcggtgggacgggggttaagaggtgtagatgaagagggagagaaagcagttattagaggagctcgtggggactgcttcatagaccgattggagctgaggttaagagatcatgtaaataagccaaccaggtgaggggcgggaccatcctacaggtgcgcagatatgcaaataaagagaaaggaggaatctctcccaacgctcggaggcgcagggcgttctgtgcaaacgagaagcacgttcattgtctagggggttctcaaagatgggagaggatggctgcaggtttagggcaatcaggaggggcagcaaccctggccgccaggtgaaggggcgggcccgactcccgggccgggcggggcccggggtggggctatgcaaatgagggacccggttgggcccggggcccggctgcactcaccagcctgggtgatgtctgacaggtcgtagctacgggccgcgccccgggggaagtgcttcaagcgccggttagacaggttcagggtcccggtggccacggcctcctctagggcccgctctgcactgcgtctccccggcagacctggagacccgggcacggaggtcgtggctgccgcctcctcacccccggcggcgagtggagccgctacggccgccgccatccgctcccggcggctcccgctgcctgactgacgggaccggccgtccctccttcccccaccccctccttggagccgccgtagttgcctcaagggggagggagcggtgtccgggaccggacggaccaatcgtggccccgagacgcgtcagaagcggccaatcagaacccgtcagtgggggtggagctccggcgccggagtctgacgagagaagggaggggaacaaggatagagcgctcgccaacggccgacgctccaggccgtcccgcccagcgcagctgcacccaatcacaatgctcagatcgggaggtggagccaatcaggtccaaccaagaggaggggacaccggcactccactagcaggaaaacgggccgagggaccgcaagcagggggtgcctagtcctcgtcccccaaagaccaatcgtaagccagatacaggcgagtgactgtcaagaaggccaattagagcctccgaagggaatctggacctgcctcttctctgagggacggctctacctaccaatagcatgggcgagaaggcggtccctttgctaaggaggaggcgggtgagctagaactttaagactgaggttaagaatgaacgcggagcccctggccggccgggaacgcagttcgccgctgcagtggcgagtgcgagctggacgtgttagggggctagccggcgtccagggcttgaggggattcgggcgactgcttgaggccagtgcactggcggttgtcgcagctgaaggggcagcggggggacctccgactgtgaagcctctggcaggggtctcgggacccccgggctgggggcgggcggggggcttcccagagcctggagatgcccagctcgaggagggagggtgtaggtgcagcgttgcacggtctgccgtctcacccgaggagctcccctggacaggaat

SEQ ID NO: 49250 - DNA, 306 bp, Homo sapiens
aggggtggtcaggcagggggtgagcaatgagggctcctgagctgaggaagcaggggcggggggaggatgggggctagggagtcctcagaagttcccggagatactccctcactggacagagtggggttcccgatgacgttacttgaggcctgggagacggcctctgcccctcactgctcctccccctcctaaggtcaacatttatgtgtcctagacctagagaggtcccaggacacgccactgtcccgccttccccattgcccgccccactggccagtccccacgcccacacacccaaggctgccc

SEQ ID NO: 49251 - DNA, 1031 bp, Homo sapiens
gtgtccctctcattccgagtcttcgacctggagctgcaccccgcctgccgctacgatgctctggaggtcttcgctgggtctgggacttccggccagcggctcggacgcttttgtgggaccttccggcctgcgcccctagtcgcccccggcaaccaggtgaccctgaggatgacgacggatgagggcacaggaggacgaggcttcctgctctggtacagcgggcgggccacctcgggcactggtgagaactccctcacctccgccttccccccctccaggccccgccccggccgcagccccgcccccagccctaacctccgccccgcccaccccgcgccccagtgcctagggccccctacctccctgacccattttcctcactaaccgccccttcagtccctcctccccgtcttctctcccctcctcccgcacccacccatccctcttccagggccccccccaggcgcgaggcggaaatgggtcaccgacccgcgggtggaatgggcggcctggggttactgggacggtgagtaactgccggcccccgtccgcaatcgggctccctccgtcgggcgcgagggggcaccccagggctggggggactaggttcctccaaccccggggggcccctacacccagccctgggctcccgattgcggtcccatcaccccctcctggcggcagaagtctcccttgcaatgtttcaggcggggacctccctaaaggggtcctcgggggctgtgccccaagtcgaggacaccctctccagcctgaaaggggactctgctgcagggccggggagatgggatctcctaggggaagaggcgcggtgcggccgcgggtcggggaggggccagaagggggcgtccagccagttcctcctcccgcttccaccgcccgccagtgcgccctgcggccccagacttccccgagccgcgctcctcccggccgctctctgttaacctgcccccatcttacctccccttcttctcgtcccctcatcctgagccccagacatccgagctgcctgc

SEQ ID NO: 49252 - DNA, 790 bp, Homo sapiens
gcgccctccagcttgcagccagcagagatttattgaagatctgctgtgtcccgagcactgcgcttgcgctggtgggcacccaaaacagccccaacccctgcatgcacgcaaacaaaaatgtaaaaattacaactgagacaagtctcaggagagcgaggtacagggtcctggtataacacgcgggcctgtcacttgtgagtgcgccaggacttgaccttgccaaccacgacgaccgacacccctgcagggtcccatgggtgtgtgtggtcctccgtgctgtggtgtgaacgccttcaggaggggggcccagaggacgcgggaggtgggagtgggagctgctgcaggcacccagtaggagatgaggtgcaggcgcccaggggtgtcccgccgcgcagtccccgcctccgcccgccgccaggtcatcgcgctgaccttcgagaagtttgacctggagccggacacctactgccgctatgactcggtcagcgtgttcaacggagccgtgagcgacgactcccggaggctggggaagttctgcggcgacgcagtcccggggtgaggggcgggacctgggcgagtccgggagagagtcggcggaccgcacgcacgcggctgtttggaggggcggggttcagctaaagggacgggatctgaaccccagggctccaaaccggcgaggggagcaggttggaggccaggcaaagaggagatttggccccgggtctggggtccgcggatagagaggcgactggggctctgcgaagttgggacgaagttaaaaggccacctg

SEQ ID NO: 49253 - DNA, 1419 bp, Homo sapiens
ttcgtctcaaaaaaaaaaaaaaaaaagcaaagaaaacaggcttggttcctgcagaggcttctagagcctggaatgaagaggaggaaaagggcttcccggtgggagattgacttggaccatctcaagaatagggaggaaagaacaaagcccagttcgaaaccccgcccccggttctctgagttacttcagggctcgagttcgagccagtacaactgttacgtcaccggaatccagccaatcgcagacgacagaaggagggcgttgtttggtctttcagcacaccaatcggcgtatagttacggcagaaacaaagacgtcctagccaatgacagaggccgtacggcggaagtatagaaaaggactctctggaacatggcaacattaatctgaccacaagctgactggcaggtgctttaaccacaaggtgggcatcctaacgcgagcgaccgttttgaggcagaagcccgatggggcccgtgtccgagcttagggaggggccggagacgcaaacacaggtctcccaggaagcaggcggcgtcacaggtcgctctgcaggcgcccgctgcagcgggcggagtctggctggagagaggaggcgggcgtccgggaacgcccggaaggggcgaggccagcggcggggcggggcttatggagatcgtgagctgggcgtgaggagaaggccgggttgggagctgcgaggggccgggtttagcggggtgggcgtggccgtcgaggtggggctcggcgggtccgaaggaacctggggcagagctggaagaggaaaggtcttgggggccctgggcctgggtctgcgggagccccatctagcggggttccaaggcggcggcggcatcagtcgaggccctgctccgggagctcatcttgtcccctttcgcccctcacgccccccagctctgactccaggccctgtcccctgagctctgccctcggatgtccgaccgcccagagcctgcatgcgccgtggggcgccccaggaccaggagctggtgggtccggggccccctgggcgggggtcccggggcgcccctcctcccttgggacccgttgtcccggtcctggtctttcccccggatctagtattcagggcggaccagcggagcggaccccgacagctgctgaccctctataaccccacaggaactgcgcttcgcttccgaggtaaagggatcggcgcctcgtgggggctggtggccggacactggggggttgtgttggctggaggagtcagatgggtagggttgcacgtccagctttggtggactgggaaagtcatgtccagcctccggggcagaaggcagaggggacttaaatgacccacatggcagggcttgtctgtgtgtgtctctatcccccagtcctgtgcacagcacctgccaaatacacggtgtttgacgcaga

SEQ ID NO: 49254 - DNA, 931 bp, Homo sapiens
ctcccaaagtgctgggattacaggtgtgagccaccacgctaggcctccccttctatctctagaacccctaagcctgcatgtagttctcccgagtcttccttcctcacccattcagtgaatgctcaaagcctcaaagaacaatctatcgccctgctgttcccttcttaacaccacacctccccacaccgagtcattctccacccccaccaatgtccacagcccagagacgaaggtcaaggggacagtccagtcctcatgaaaagcctggctttcctccctctgacgcagctgctgttccgtctttcctgagacggccttgctcctgacctaatctcctccctcctttctgccagcctctcctagtttcctagcctctcctagccccatctctggtttgttctgcttccacccgtgggcaggtctcaaagttccacctccctcttctctgtacctattaaattatcattgcctgggcaccgccccagtaaaatcagaatctctagggggtgatctcagatgctcacatcttttatttttagagacagggtctcactgtcacccaggctggagtgcagtggtgcaatcacagctcactgcaacccaaaccccagaggtcaagtgatcttcccgccttagcctcctgagtagttgggagtgcaggcacgtgccaccatacccagctgattttcagatgctcacatctttttaaggcctccatcattcactcacagagctcatctgtgcccctgatgtcaaccaggacctctgtggggacagatgccaaatctccccacccagtgacccactggaatcctgccctccagccatctggacctccccactgggtttgggagcacctggacatatcagtaccgatctcttcccaaacctgggcgttgggcccacactcatgtggcccatggctttctgc

SEQ ID NO: 49255 - DNA, 2426 bp, Homo sapiens
tccctgctccaaatctaggcgcctgggtgaggcattcaaggcttttctgggtctgtccagtctgatactggatgctgcacccctctgatctcagacagtcagctccctcacctcccaaatatgccaccctcagagcctcagtcccctggaacctcagctccgaatgcctgccatccttcccaggaccgctgaacaggggggccaggaaggcagatgggaggactcaggagggggacccagacaccagaggcctgggccaggaggcagggaggcccagtctgagcggatgaggggagggacactcgagaacaggatggggcagggccatccctacctgatggtgtcctccaggcgcccctcccccaggaactgcaggaacatggcctggaggtcgctccagtagagtctgccctggtggaaatccaggtcaggctcatagttgacatcctcactgaccaccaacacagagtctccgcacgcctggcaggaccctcggaaggcgacgtagcccagtaggaaggctggcgggtggcaagatggggattctctttatgcccacctctggaccccagaaatctcccccagcccaagcccttcacttctggggagggggacggctctcacccccagtgaagatcagcagggccgtcaggaccaggtagggggcagccctccgtcctgctgccgcccagggaatgaggtttggctgcctgggtctagagcccaggggctcagggcccctcagctccatggggcagaagtgggccaatgtctccgccccctcctccccgtcttcctcttcctcctccaggtgccctttccgggggccttccacacgctggtagacggtctgagaggatcttggggacagttgttgctgtgcaggcgaggtgggcatgagattggggcaagaggcctggggggtggggaggcatctggcaataatgaggtcagtgacttgggggtgtcaaatgagcatggtggtgggggcgtgggggaggggcaggggtgggaagaagcgaggtcaggacacggtccaggaggggccagcctcaggggcttgggagggggctgagggacttagagagaaggcctaaggggtcttcccaatcccactagtcttaccgctctctggaatagaccccaaagccgctccatgcttgtgtcccctcctgaagcctgcaggctgtcccccagcgataaaccgataaaccgtttgtgggagccctaggagggccccttatcagtcctggcaggcagcctgaaccaaggctgctcctcaccacccccaagggtgggggcacagtcctggcctcagtccagccttccagacgtggcccccgggtccaggccagagcacaaggggctgtgctctcccctgccaatctctccacagccccacgcctgcctcctccctgcaaaacaatcaattttttgaccttggggcggactttggcctcctagttcccatcaggggtgggggaagggggccgatagtgggggagggcagagacatgggtgccccctcccctctcctgcttttacccctccctggatcctggggaccccttcctaagccccgccatgcccaggtggaagattcacccctaagacatctgccccttcctcatctggccttcagagtcccccagtgccccggtcctgtgacatatcagctgtcctccctgtcctgacacttgccccagtggcattctaagctggaggcaccacagtggtgtgacttgggggtctggtctggtggtgtgcatgtgtgtctcttttgaaaggtcgttctcagactcctgctggctgctggagaaggaggggcacaggtgggagcacatggtcagatgagaccagcgagagctcccagataggggtcctggggtcagggatatgtgggtcagtggggaggagtgatcagagtccccgccaaggtgtgggcagagctgggtgaccctggacaagtcatggtcctccctgggcaccggcccgtttggtcaccgaaggacttggatcacatgggtttctacctctttgggttctgaggctgatgaaaggccagttagcctcaccccagaaacatgtcacaggcataaactgctaaacaggcagggggcgcaggtccccaaacccttccgagggccccaagacaagtagctctgaagaggagggctcagggtcccaccaagtttccctttcgggtttcccctgggaaacatcagctcctactcaggtccagagaagttccgagctgctgggatgcaccagcgccctagtccccgccccatgtctgtcaccaccaagagccccaggaaggaaggcatagcgcatctcacctgagcgcaggtcctggggtgctcaggcgtgctgctcccctgagacctaaggcctacgctgaggccccgcccaccaggccccacctc

SEQ ID NO: 49256 - DNA, 3817 bp, Homo sapiens
acccgggcggcggaggttgcagtgagttgagatagcactccagcctgggcgacagagagagactccgtctcaaaaaaaaaaagtgtggctctcaataaatgagttgttatttcagtggcaagccctgaaagggggtctacaaaggcccagtgggcgaggctgaggaaatgcctggacacgacccttctcatggcattcccggggcgcccgcatcagcccctacccactcccgctcggggactttctcggaatcgcgcttcttcttccagcagcctcgaggccggccccgtccaggtctctttagctccgccccctggtgaggggcgtggcctcctcagggccggggcgtggcccaaccgggaactggggcgtcgaactccccttcccagtctggagccacccattccaggcggggcgggaggctgatcacgtgaccagcgagcggtctcaccctcctcatatgccagtaccacctcctccagtcccagaggggggatgtcttactcctttccgtgaagcaaaccctttgagtacggtttgcgtccacaaagcgtagggtgagaaccttgggagcgactgggcccgtctttgctccctcggtggggttttgtctcctggcttcccccaagtgcgaggcagttggtctcgcccagccgggtcctgggcgcggcggcggcagccgcgtcactggcgggcgggatccctccgctctggggaggcagcgctggcggcggggctggggccactgaggaaatccatccgcgccgccgccgccgccgccgccgccgccgccgccgcctccgccgcggaggaagacagcgccgcccgcgcaccgccagcgacctccgccgcagagtcccaccgccacaggtaccttcgctggcaaaaggagtcctctcgccccccagccccaatttcccccaggggaacctctcttccttcggtctcccggggctggcctcctgggagcggacgtaactccccagacctccgctcccttcccctcttgcccggtcgctcccaaacccggaaggggaactggggaaccctcgccccccaccgtgcgtgcgcttccccgcaccatcagcgaagtttttgcccgaccccagaccccagcccagccccgactgcctcttgctccctcggaagttggggggctaaattccgggcttcctctaggccccgccccgccccctttccccaccgccaccctcccgcctgcccccggggagcacccctcgtgtcctccactgtcgcacccctgccggccctcgccttgcacaactccaaaatcggggagaagcaggcaaggccgcgcgccacccttcctttcgtctccaccctacccacgatttgggtgctgcccgtggtttctggccccactcgccgaaactggagccctcggcgccctattccctttacagatcctcaccccaagcccagctcccaggcgcccgccccccgcccagctttcttttaggcaaaatggaggtcgtaggggctggagggccaggcccactgcgcttcgcagcgccgcaccagcccgcgccttccagctgccagatccagggaccctcccgtcactctcctgagccccgccagacctgcggaggcggttgcaccctcatttctctatggagcgccggctgctatatccctagagtctgggggctgctgagggccctggggggtgatggggaccgagggctgagaacgtcgcccccgcccccagtttcttcctccagccgtgcttccttctgccctgggcctccggcggtgccgccaggcctgggctgctagtaggtggaagaggctttgtgcgggcctgggggttgggtagagtaaggagttctgcccgcaccccccatcccccgattttgagggtcaccccttggcactggcgtagaaagctgaacttacaaggaggggaaatgtcagtggggaagaggaacgccctgcgcctgggggaagtgggagctgggtgggggacgcctgggccggccaagtgcagtgtgtacggccggatcgcacaggtgtcccgcgggcggggaaggactcaggctcccggagcggagccagccgggcccctggggcccgggcgccgagcctgcgggctgggccccccgggtgtccagggcgccgcggccaggccgcctggggccgcccgcccgcgcctgggagagagcacctccgcgcctcggggccggggacctcgttgcggagccgtaattactcgagagcggctcccacgggctttctgcgggcgcggcggggcgggcggtccctgcgctggagggagcagcggctcggggctgccttccccgccgctgtcacccccacccgcggcggacggctaatggggcgcagccggaccggggattatccggggtgagccgtccagaacctattagcgcccaatcggcttttcccaaatcctgtaaacagccacccgggccggttctggggagggcgggaggctgggtcgggcgggggcgatggggccgggggtggggtcacccaccctacaggtctctgccgtggatgcggttgccttggcaacggggctagggtgggggcatttcaccaatgaggtgctctcggtccgggtgacggttgcctaggcaaccccacgaacagcccagctttcccctctggtctctccccccacccgccaccatcgaagctgggggtgtgtgtggagggtgtgcgccttgtggggtgaatttcaagaggcaccgccccttttaaaattaggtgcttggagggcggtgcctgtgcgggctggggcagaagccaggtctgttttcgaagggacacccccgccccccccgccccagttcctgccgcgggtgtcctgcccgggctgtgtccgagggaggggtttcccctgcgcttcctcttgcacttcccgctccgtttccggggggcgggaggaagattggggaagtcggctcttactcggcgacgtctctggtgccggagaccctggttgtgcccggggacggcggccgcgccgccccttccccctccccttgcttaccccttccgggccgcgctgcaaccccgcctttctccccacttccccggcggcctcgggcctgacgtcagccctgcatcccccaggcctcgggccagcggccaggagctgcctcccccagcccccgtcccgcggcccccagccgcccccaaccctgccccacgggcccggcgccatgagtgagctggagcaactgagacaggaggccgagcagctccggaaccagatccgggtgagggcctggtgcggggcgggcgattcatgtgtacaccgcccggtgccctggaccgggttgggtgagggtgttggtgggggaagggggagggagggccccttaatggctcagaatctgaccctgtccactcctgtcttctgttctcttctctccctttcctccccaacctgtcttctctcgcgtctctctggctctgccatcccttacaggatgcccgaaaagcatgtggggactcaacactgacccaggtgagggcacttggtggccagagcgtaactaggggttgaaggggcaaggatcagaggccgctgccctctgcagtcctgctgcctgggcctccccgagcgcattctgtctctacctccagatcacagctgggctggacccagtggggagaatccagatgaggacccggaggaccctccgtgggcacctggcaaagatctatgccatgcactgggggaccgactcaaggtgtgtgtgtgtgcgcgggctggcgctgtgggccgactttctagcaggccgtgggagcagcctcagatctg

SEQ ID NO: 49257 - DNA, 2036 bp, Homo sapiens
aaaatccaatccagctaacaagtctttatgtagcatctcctagttcctagcactaggatgcaacagacctggagtctgaccgggaatgcgagtaatgactgtataacagagaagagagacgaggggcttttaaaaagttactcggaaatttttttgtttttttttttttttaaggcaaagtgtgagagctgtggccagggagctgctgcacggaggggcatgagctgagaagggcctggcctgggacggggaggacaagcagtctctgctaaggaaggtatttcccgcggccgagcaactgggaagaaggagaccccaatgacccagcactaagatcgccggagcgaaaggaaacagaggtgaggaggacccaggcgaggtgcctgggtggagggcaaggcttccatgttggccaaagtcgtggaacgcttggacctggggaaccgcaaggcccagctcgttccgaggggaacccaaaggcgcgctggggagaactccgggaagcgcggggcccggccaccctaggacgctagggtcgggggcccccaggcggcccagggcagggcttggcaggggcccgggggcgaccgttaggagcgcgggggtggaaggcagcgcgccggcccgggaggacggcgtgcccttcagggaggggcgccaggtgcgaggggggcgagcggtcgccccctaagccgggcgccggcctcccggggcctccccgaggctggccggctctgggggagggtcccggcggcggggatgggccggagcgggcgggagagcgggaggacgcaccgggctgcggcggcctcggggaggagacgggggagggtcctcgctggcggcccgcgcgctggctccggcgcttctctagctcgcgggctcggcgcggccgccgcggcgtcgggggcgggcctgccccggggctgggctgcgggccgggggccgcggggccactgggcgcttaccgcgggcggcgcgagggtccggtcccggggcgtgggcggcgcgcggcgggcgggggccggggacggcgacggcggctagcagcgggggagggggcgctggcgctcccgcggcggccgctcctctgtgtttgtgtttgtagcaagatggctgcccgcctcgcaccacgtgacgcggacgcggggccgcggggccgccccttccaccgccgccgccgccgccgccgccgccgccgccgccgccgccgccgccgccgccgccgccgccgccgccgcctccctccgcggctccggcccgcgccacctctcctcgtgcgctgctcgcgtgccgcgcgcgccactgcccggacgcccgtcgcccccgacagccccccccctccccgccccgacacgtgacctgggcgcccggctggtcacgtgacgggggcccccagctgcgggcgggatcggccccagagcggcctcctctcccccacctcccccggccccgcgacgcgcgacctctgggaccgaggccgcggcctccctggcggtccggtttcctccaggaagcccgcctggatgacaggagacaataaaatccagaacccttcatcaggcgtcctgggatgtgtgaaataagtggctcaggcaaataagttgactctcaggagcctctttatttttttaattatttatttaattattgagacagagtgttgctctgtcccccaggttgcagtccagtggcgcgatctcggctcactgcagcctccgcctcccggattcaagtgattctcatgccttggcctcccgagtagctgagattacaagcacacaccaccacgtttggcttatttttgttggccaggctggtctagaactcctgaccactcaagtgatccgcctgtctcgccctcccaaagtgctgggattacaggcgtgagccaccgcgcccggcccctatttatttatttttttgaagcagggtctcactctgttgccccagctgcagtgtactagcccgatctcggcttacggcagcctccaactcccgtgtctcaagcgatcctcccatctcagcctcctgaa

SEQ ID NO: 49258 - DNA, 2120 bp, Homo sapiens
tgtagacagaagctatacagctagccattcaataaaatgcatgtgcaatatggtggagctgttgtgaacatccccatttgaatgctgggcaaacagagtagttcaaggtccccagtgcagcaggtcctactcatttcagaagggaactctgcagaaactatgcccatctgggcagagcccccactccactggcctgagagccacgaatccggcgcgcgtcctccccaccttgcccgccagggggcggcaagtccctgatccggggtcgcctgctgcagagctggtgggagatggttgaggggcgtgggtgggtcagcgttccttggggacccgtgaagcctgggcttagggctcacagcgtgggtccccagcacagacaggaggcggacagcttcccgtgaactgcaggggagtcccgggacgctgtcctccagcgaggtggggaccggctatgtccctcagttccccctcggtcctcgggccacagggacattagactagggggtcagttctgccagccctgcccaggcctcttctgaccagaggagctgcgacggacgcggagttcaggccccttggcgaccgcggtctcctgaactcggccccttccctgctcccatggggaagaaccctgcccctagaacagcctcccctccaggtgtcttccctacgctacccctccgccggccgggaactccgccaggcctagagacgccgacccggccctttctagctcctccccggctcggacctggttcccgccctcggccgcccgccagttcccgaggcgtacacgtgtagatcccgtcacgcccggaagtctcgcgtttctcaaacgcctcgcgcagtcgcccttgcgctcagggaaggggcggggcgaacggaagccgggaaggcgattcatagctcgcggggtacgggcgcgcgtgcgcactccgcagcccgttcaggaccccggcgcgggcagggcgcccacgagctggctggctgcttgcacccacatccttctttctctgggacctggggtcgcggttacttgggctggccggcgaacccttgagtggcctggcggggagcgggcctcgcgcgcctggagggccctgtggaacgaagagagtaagcacgggaggggcggcggaggggcgcgagtttgagggcgacgcgatgaatgaatcggaacggggggtggggagacgcgggatctggaggtgagtgggagaggacgaggggccggaaggaaacagggacatcgagtgtgtcccttctcgggtgcaccctttatttttgtttttgtttttgtttgagacagaggcttgctctgtttcccaagctagagtgcagtggcgggcgcgatcacggctcactgtagcctcgaactcccgatctcaagcgatcctcccccctcggcccgggtaattaaaaaaatttttcttaagacagggtcttgctatgttgcccaggctgatctcaaacacccgggctccagtgatcctcccgcctcgaccttccaaagtgctgaggttacaggcgtgagccactgcccggccaggtgcaccctttgtacaggaaaaggggtaggaaaggcttcgaggtccctctgagccctctgatcgcgtccctttcccacgccagggcacacagcatggcagaaaaccgagagccccgcggtgctgtggaggctgaactggatccagtggaatacacccttaggaaaaggcttcccagccgcctgccccggagacccaatgacatttatgtcaacatgaagacggactttaaggcccagctggcccgctgccagaagctgctggacggaggggcccggggtcagaacgcgtgctctgagatctacattcacggcttgggcctggccatcaaccgcgccatcaacatcgcgctgcagctgcaggcgggcagcttcgggtccttgcaggtggctgccaatacctccaccgtggagcttgttgatgagctggagccagagaccgacacacgggagccactgactcggatccgcaacaactcagccatccacatccgagtcttcagggtcacacccaagtaattgaaaagacactcctccacttatcccctccgtgatatggctcttcgcatgctga

SEQ ID NO: 49259 - DNA, 630 bp, Homo sapiens
gtgcaggccaggaaaggaactttcctctgaactgtgatcatggttataattaacaacacattcaatctgtggcatctgcatgctgcgattctcacccgaactccacgaagcaggaatacaatgagtatcatccccatttgtcagatggggaactaagttctgctggaaagtgacagagccaacacttttgactttctggtggggacaggagccagcaaagcctagttctgagtcaaggggttacataattgtttaaagatgatgccttctgtttgtagagagcttggctatttacatgaaaagcatgtgatttcctggcatgcttttcatttgctctcctaacgccaagaggaaggcagggatgatggagggtccccattttgcagaggaggaaactgaggcccaaagagattatgggccttgcccaggtcataaaacacggagatggggctggacgaagtggctcatactagtaatcccagcactttgggagactgaggcaggaggagggcttgagcacaagagttccagactggccccagaaacatagggagaccctgtctctaaaaaaaattttaaagcagtggggcatgatggtgtgcacctgtaggcccagcagaagcaggaggg

SEQ ID NO: 49260 - DNA, 1580 bp, Homo sapiens
agtggggtagggaggaaaggaaaggcagccaggggcgtatgtaatcagcagtgagagttcggggagcccgggcaggggaatgtcccgggtcgtagccagactccatctctttcccaaacaaaagaaaactccactacccgtcgggcgcctcttccccgcccccctcccgttccagcactatcggtccgaagtgtttgggactgcagtgcccgggtaggggtagtcagaggccggcccctccactccgaggcccagatgttgggggggaggtcccaggagtgacggggtgcgcccccccccgcaaggaaactcaccttccaaagctgcggccaacgaagcccagcagagcagcacccggagctccatggcgccgcctcactcgggtaggatccgaactgagtttggggggccctcgcccccccaggtctgactctccctgggcgggtggacgccgatactccgcgcgggactcctcgtcggggccctcagcgcgggcccatgcgagcgtgcggggcaccgggcggcggcgccaagtgtggccccgcgtctgtgccgcgcgcgcgggcggcgggcccggagcgtgctggcagtggccgcgccgggcgggcgcgcagcaagacgtggctggagttggggtccctccggggcctcggggtcccgccccgggtggcgggggctgagccggccgctcgcggtctccccccctccctggagtggctctgctcgcgccgccgggccgagtgctctcctcgcgggcggggatggtgggagcccgagcggggacggagcgggagggagggagactgcggcgcggagccgggcgggccgggccgggcaggggctgagctgcgctggaactgggccgggcggcgccgggcccgggagggaggggcgcgcggggggcgggggcagctctcccaacgcgggggctccgcgagtgagccccgggcgcgctgattggagctcacgctactgaataattcatgagggaagcggagaggggcaccgagtggagcaggtcgggaagttgagagaaagtttggagaagggggaggggcggcgggtgaggaaccccgggaccgcccagatgtgcgccgtggcggtgcgcgctgtccaggaccgagcatgtcggggctggggcccagggacccccgggacaggcccgaacccggctggcaccagggagcagagaaaacacacacccagcagcaacacggagggccgcccaggcgtgcacgtaaatgttcaccgcgcacacaaagcccgctctgaccttgctgcggactctagatgccgctcttggatgcgcccaccaccctctagtgggcgcagggactgcgttttgggggaaaaggaaggaaaagggagtagaagctttggagaattgacggccgcccagggggcctcaaggagcaatcccagtttggatagccttgcagcgaacgttcacacagtcaccccataaacattcagtgttggggacctactgtgcgcgcaaccaagccctgaaaaatgtccagaggaggcgcgcactaagctgcgctagggagtagagaaaaatcgaggaaacaacggtaaag

SEQ ID NO: 49261 - DNA, 762 bp, Homo sapiens
agccactgcacgtggctcttttttttagagatagggtcttactgtattgcccaggctggagtgcagtggcacggtcatggctcactgcagccttgacctcctgggctcgagcaatctttcctcagcctcctgaggagctgggaccccgcgcggggaccatgcccggctaataagtttactttttcttgtacagattgtgacagttgttttgagtaatcctggagttacagcttttcctattgtaagaaataacaagcagcaaatcacccctttctccgtaaattgttgaacttctcattactctttccacatctcagtctcccctcttctgggccacctaactgtgtcgggtccaaagttcaggtttaccccaaagttcatgaagtttaagcttcagcacctctcacctgcctggcttcttccacggccctggttaataagtgccataatttaaacagttttgaaggtgagtttcagcaggacaacacttgaaatgacctgaaatcttacagctctgttacaaaaggaatttgatagagttttcaacattaccaatagagttgtaaagctcaaataaatttttataaacaatgatgaaaccttaaaaacttagccaggctactcgggaggctgaggcaggagaatcacttgaacttgggaggcggaggttgcagtgagccgagatcgcgccactgcactccagcctggcaacagagcgagactccgtcccactcccaccaaaaaaaaataacttagccaggc

SEQ ID NO: 49262 - DNA, 1075 bp, Homo sapiens
gcggtgcccaagggctcatctgcccctgggacctgggggaggggggcgcagattcaccagacttaatcctggggagtttacagcaggaatggggtgggggagggtgggggtgaggtgggcggatctccaggaaattagcatttaaggcctaattctgagagtgccattagatctccttgtcccgaaggggcagacggggcatgtgtgtgttccaggatctgggatccctagaattgagggctgggggaacactctgaggtcacctaataggttgacaggggcgttgacaccaaggtagaaaatctcagatactgaatcccacgatctcctctatatctatacaccatttttaaaaatagagatgggggctcgctatgttgcccaggctggtctcgaacacctgggctcaagagatactctggccttggccccgcaaagcgctgggattacaggcatgagtcactgggcccagtcccacaatcccgtcttttacacgcctgcgatcctgcggatgccaagaggtggggaggcaggtcagaccaaaccgtctttgagaattattattttttccattaaaaaatggtggagaggacgacccgcccgtagccacacaattcgcgccttcccaggacgcaaccgcagaaaaagcggcggtgtggacgctctggcgggcggcgtcctctcgttggttgccctctctctgaagccatcatagtcgccgccatctttccttcccggccgtcagtcacgtgggcagcacgccccaggcctccgactgctggcgtgcagtggggcggattccggaggattcctgcagccacagtgaatgtttggttattccaggcgcagggcagcagcgaagaaaactgaagctcctgtttcgtggagcttaacttcctttctttttttgagacaggatctctctctgttgcctaggctgagtgcatgggcaaggtcatacctcattgcagcctcgaactcttgacctcaagtgatcctccacacttggcctcccaaagtgttgggattataaacctgagccaattttatttcatctatttatttttaaaacatt

SEQ ID NO: 49263 - DNA, 1330 bp, Homo sapiens
cactccagcctgtgtaatagttcctggatcaaaaaaaaaaaaaaaaaaaaaaggaaatgtatctgaaactttccaagctccaatttcctaatctgaaaaattgaaatagcggtacctacctcacagagtggctaatttaatgcagtgctatttgcaagggataatttatcaaacctttaggcgttgttctaaagtgcccattaaatgctcactgaactcacagccttaggagggaggttcgagtttatgcccattttacatatgaggacgcgttggcaggtggtactgctgttcatgggatctgtaaagagtgaagaaggagtctcagctctcagtagagttcataggctctaggatttctgctggaagtgagaacactgcagggaggcaagaaagcgggcatcagacggtgcaaagcgaccctgggcccagatcggcggccaatggctccctccggtggcggaagcgaagagcgcagctggatcgggcgcgaagggaggatccccgcagcgggtgaggggcgaggctgggacccggtggaggttctagggttttgagaggttggaggactagaactccagaagtccctgaacgaagtgggccggatttcccgtgacgcacctggcccaggtgttgcagccccgcccacctccctgccgctttccgccatcctcacacgccccctttagtggggtggctgctcaccgcacctcggagctcggactggggtccggcccctgcggcgacgattgtttgtacctaagtgaaggaggctccgagacccgcggcccacgtcctgccggagacgcttgtctgcagggctgcattgcatccccgggcgcacgtggagctggagcagcgcaggctggggaagagcagagagggtcgggcttctccgggcgcgccatggggcggggccgaggacggggaccaatagcgcgcgcgtgctggtgggggtggggacaggctccaggcctggcatcccggtagccgcagctgtcttttccggcccccgtgcactctccgcccgagcggagccccccggctcgcggggatcgcccccgagcgctgcgtcctgcgggtgggtgagtgagcgcctcgcggcccccgagctgtggggtgcacctggccggggagaaggatatcttggctcccttgcaccccaacgggcgcaaaggggcaggagcccggattgggggaggaggaggacccggggaccttgtgtcgctcggtgggagccggtctgtgtttctgtttcgctagggtgtgtttgggttggtagagtttgtggggaggggtgcctcgtgtggatgggaggaatcggggaggc

SEQ ID NO: 49264 - DNA, 2533 bp, Homo sapiens
ctgggccccacgctgctggttcatggggtcactccagtcacctgcactgatctgtgatgcccctgcctccagggctaggtagagagggcccaggcaggcggcctatcctgatccttggaggaggaggaagaggaggccactgtggcccgtggccctgcccttgggacgtggagcccaggggaggtttgaaggggatcctgggcttgggcatcacgcccacctcctttggcagagggaccccagcacactaactctgggtggctgtccccaccgtgcaggggagggagtccgcagcctcccttcactggtgccttgatgctaggggccaggcctcctctgtgactctgggctacctcagtttccccattttggccagactcaccggcccactggggtggtgatgttttcgttctgttttatttttctaactctgctgaccatgaataaaagaccaaaacactacaggctggctgagcagtgctggtgggtagctgagagggagggggtgggaatggagagctctgcagaggggtggagatcggagccttcagcctcccgccgcgaggctgccacgtgcagggctggggtgcggggcccggacgcatccgtggacttggaggctggctcgggcccgcacctcccatccccagctgcccgcaacccccagtgactcgggatcccccggagagccctcccctctcggcaggagggggctgactcagggagaaatggcagtttagggcctagggggccacgtgaccctcccccaggaatgtggtgacgtcatcggaggcgtggtcgtccccaaaattagggaggaagaggaaaaaaaaaagccagaaaaagttttcttttctggagtcccaaacgaggtgcgggacggaagagggggtgaaggccagaggctcggggcttcaagaccgctgtctggagtccccctttccaggccatgtcggggcccacctggctgcccccgaagcagccggagcccgccagagcccctcaggggagggcgatcccccgcggcaccccggggccaccaccggcccacggagcaggtaaggcagcccttgtgagacagaagagccacccagctgtggcgctcacctctgtcctaccgctccagcctcccgccctggctgcttcctcctgccccttccccaagccgaggcggggggaacagccgcctgcgctctcttgggaccctagatttgggggaggaggtaacgagaggcggagagggtggctcctcaaatatacacccctcctgtcctccgccaccccacctttgatttctcttccctcaacccagcactccagccccaccccagggtcaatttttgcccccttccatctgagcagtgttaccaggccccagggggaccggaggatcgggggccggcgtgggtggggtcccatggagtactccagcacacgcaggtgagacccgggatcgtggggtgggacatgtgggatcccccagaaccgagtctgagggacccaggacaggagaaggcctatggtgatttgcattcttcctgccctggctccatcctcaggggctccctgcagacagggggggccttcgccctggaagcctggacgccgagatagacttgctgagcagcacgctggccgagctgaatgggggtcggggtcatgcgtcacggcgaccagaccgacaggtgactctgcccctcctccccgtcagcaccctgcccccttctctggactctcagacccagcctgatcgatcccccatgtgtgtaatgtgcaccccagcatggaggaagcgtggctgcaagtaccaacatgtcagccacttgaggacgggaccttgtcaaatgcaaaaagcctgtgcttccccacagccagggtcatttccacaaatgtgggtcttggagtggggtccttgcttacgacttctggcctgcgtttctcctcaggcatatgagcccccgccacctcctgcctaccgcacgggctccctgaagccaaatccagcctcgccgctcccagcgtctccctatgggggccccactccagcctcttacactaccgccagcaccccggctggcccagccttccccgtgcaagtgaaggtggcacagccagtgaggggctgcggcccacccaggcggggagcctctcaggcctctgggcccctcccgggcccccactttcctctcccaggccgaggtgaagtctgggggcctggctataggagccagagagagccagggccaggggccaaagaggaagctgctggggtctctggccctgcaggaagaggaagaggaggcgagcacgggccccaggtgagccctggggaactgggatttcaggccctacagacaatgggacaccgactgggtggggtggctggtggtgttttagggggcttttttgttttttgagacagagttttgctcttgtttgcccaggctggggtgcagtggtgccatcttggctcactgcaacctctgcctcccgggttcaagtgattctcctgcctcagcctcctgaataactg

SEQ ID NO: 49265 - DNA, 1917 bp, Homo sapiens
ctctgttccccaggctagagtgcagtggtgcaatcaaggctcactgcagccctgaactcctgggctcaaacagtcctcctggcttagcctccccagtagctaggaccacaggggcatcccaccaagcccagttattatttttttgtgtgtagatgggatcttgctatgttgcccaggctagtcctgaactcttgggcttaagtcctccctcctcgaccttcccaagtgctgggatcacaggtgtgagccaatgtgcctggccctaaatattctgtaaaggggccttgctatgttgcccaggcaggtctccaactcctgggctcaagtgattctcccacgtcggcctcccaaagcgctgggattgcaggcgtgagccatctcagctggtcttcctattaagtctcacactcaattcactgagaggggccttggtgttactcccgggggtggtaatccattgaatctgggcggtccatactctgtttagggcgttaacttacagcctatttcatccaaatactgagcggggttaagactgagatctgccaattttacttaaagacggggcgtctttgtcgaggaaaagcaggaacggcggactttgcatttagtgcgcactgtggcacccaattttggctggatatttggagcagaaaatggtgggatacgatgctttaaaatggttgcttccaccttccatcccctaagcgcccgcgcttcccaagcccacgccctgcccgaggaggggacgaaatcacccccggtgaggtcaggaggcccgtggggggaacatggctggatgagaaccgtcttaggaccccgacacatctggggtcgcgcgatcctcgacttccgctctcccttcgcgcccagagggcttgttcgcctcccgaggccgcgcttggcccagccgaggtcccgtagttcctaacgctcgagccgttatcgtctcgaaaagccgcgcgagacttgcgagatccccgcccctttcccatcacgccctgctctccccgcccttcgcgctcggtttgttagttccagttccggccgcgagggtggagctttgtgcctcggaggcgtgggtgacgcaggcgcagcgcgggctgcgcgcgctactgcccatccccggttgtcccacttttgttcgcctctcttcggccctctactcaagagctccgtctccgtctcgccctcctcgaagtcctcgtcgcgcgcccgcgacccaggtcgccctgaaatctagcccgtccgagcgcgagtccaacgccgcggccgcaccaaggtgggggaggggaggagcctggggggccccgctggggcgggagaggaaccggggtccacgggggcgggcgcggagaaactcggggcgagtggaggtgttggagccgcgttctcaggcctaggatggtgggggccgcggagggctggccttggcgggagggaagcgggcgagctgcccgcgagggacggtcccttcctccgctcgtccttttgcaccactcctaccgcctctccccggtccccaggccccctcagaccgtgccatgggtgacagtgatgacgagtacgatcgaaggcgcagggacaagttcagaagagagcgcagcgactacgaccgttcccgcgagagagatgaaagacgtcgaggggacgattggaatgacaggtgagccgtttttaacttcatcttgtccccgtttcatgccgtttcactccacccgcgtcgcttttctttctcccccttgtaatttttatgagggcgaatcctatgaaatggctcattggaccgttttctgtggttcagcctatttgctgttggccaaataactagctgtggcttggtttttgaaattctctgcagatcagagctatagagctaagagtttgagtatgaagaagcactgtttatacatgcac

SEQ ID NO: 49266 - DNA, 2709 bp, Homo sapiens
gaagctctgagaattttttgtacgatcagccttactgctaataaaagcacttccacagggctcctgactctcgtgtgttacataactcctccatccttccagagtaactcctgaggtgttgctcagccctgccacttttattattgatgtcaaaagcgccaggctttgcagggacaccagtgggaggtacataggtgcgtgtctgggacccgagaatctcagttctgtaacttcgtcctcagtccaaggtgcgctgctgctgttgggagctaaggctggtcaagcacaggttgtagaaggagttggggtcaaaggctgcactcacctcttgccagcccacccacccagcagcctgtagttcactggggctttttggagtgccccagtagtgagggtccaataccaggacataggcttccgtgcctgaccctacgcagactcccagcaaggccttggacctggcatctgcgtcccccccaaccatgactgggcccccaccccctgcgaagtgcgagtaaagcctctccagctccccgtgcagccccactccccggggtacgtggcagaggcgtccctggggccctccgaagtgagcgaggcagaggctggcctccacgcagccgatccagtcccgggagccccggaagccggggggcttgtcgcccatgtcctccagggccgcctgtacggcggccagtccaggtacgcccgcgggctggccctctggccacgagcacagcgtctgcagagtgcggtagccgcagccccagccgcggtcgtccaggccgtcgcagccgtagtggtagtagaggtagtggcccgagagcagcgccaggcggacagggccgcggctcggcggggacaggcccacgtggacgtccctcagcggctccagggcggtgggcgggagcggaggtcccaggccaggcacagcgtcctcctagcggcgcggagcgacctcaggctccaacacttcctttcggctccgggtcttgggccagctgccgcaggaccggcgcgcagactggggacgcgctccccgggcctcgttgatcaccgcaggccgcaataggcagccaccgaccggcaccgaccgaggagctcccacaatgctccgccgcgccccgccccgccccgcccctcccctcccctcccctcccctcccctcccctctcctcccctccgccgtgccagctagcctgcctgcgggcctcattacgcaggcgcgagctccgcccggcagggcagggctaggggttggcctttgccttgcgcccgcctcggagctcgcctgtttcttgccctccagccccgctcctgcatagactcggcccccgtgattccggcgttctgcctctacccctggctccctagtcgcgcacactcccgtggctgtaacagtttattggcagcccagaggggcgaaggcaccgcgggggagggagctcagcctgagacatgcagaggaccgggagccccgggggacgtcggggtggggtggggatgggcagagtctggggctcgtctgtgttatagcccagccctgaaataaatagtatatacagctagggggccgggcggagcggaggacatgggggtcccgccggggtcacaggtctgagcagcgatcctgcttgctgtagtggtcgaactggttcttccagtgcaccatgtaggagctccagcggtggaactcggccttccactggcgctccgcctcgtcgagcgtgtctgcggccagggcgcccagcgaggcgggaggggaggacggcacgaggaaggtcggggatcggacatttgggcgggttgaagggggggtatgagtgcagggaggacgcacggagaaatgcaggcgaccacgtgggacggtggcaagaggatcaggagaatgtgcgaaagacgagagggaggatgagggcagaggcggggccggagaaggacagcaggaaggagagaggaggagaaaagaatgaccggaagacgggaacagaggggacaggagggggaggttgggggaaaaagaagagacagaaatggttgaccgttatagccccaatggggggtgctaccccgtccggggcctcccacttccccccaatgtcaggctcaggttccaaaagataattttataaaagaatactggcttttccatttccattcaaacaacaaaggcgtgggggtccctgagaagggtgggaggcacggccccctcctcctgccctgtccagtgtgagtctctcggtttgaggaggaagggagcactaggtctgagatccctgagtggggcccttccccacggtccgaccactcattagaggaggggcccctgtggccgtaggggaagaggccgtgttcacagccgccggaggtgggagaggaagaggaggagaagctggtggaggaggaggaggggcagggggaggccgggcctcggagcagcctccccatgggtgaagcctgggcaggtgctgggagcctccgaggctagggggagaagagaggggttacacctggcgggctcccactcccctcctcccagccgctgcccgctggcccctgcataccggtggcgctgagcaatttggggaggaagcggttccagaaggcgcaggcctgggcgcgcagcccccgccgcacctccagcggccgcaggtccagactaacgtactgctgagcccccgccgtgtacgggggccattgtggggcctt

SEQ ID NO: 49267 - DNA, 3360 bp, Homo sapiens
ctcacctcttcccggaactgggccgggcccagctcgtgcagtgagggcaccagaagcctcagtccacgaacaggccacccgacagggcgcggcctcacggacgggcagcgccgctgggggagcttgcggcggcctgaagcgcagccccgctctcctgggtcggccagacccggggccctggggggcggtgggctgggcattcagggtgtggaagcctcaggtcccggggtcccccaaatcctgcctagtccactccccacccaaccctgccccttctcatccaatgtctggcaccgagcgctgatgcccgcgggttcccatcagctgcgcacgctcccagcccagccccagcaaacaggctcgccagcccgcgtcccccaggactcgagagccccccatccgtctgaagctgccgtgcacgccgccgccggcggagggcagtagagaccgagaaaaggtcggcgctccccgccccgagccaggagccgggaacttggggagggggcctgggggctcgagggccttgcagagccgcctgaagggcgagccgggacgcctgcgttcccgggactccggagatccccggctgcaggggcgggggcgctattttgggggcagcagctgctacggttccggcatctccagccaaaggatcaaaattccccgggtgggaactcccccctctcccgccggtcactcctagcccagcccccgccgccctgagcggggggtggtggtgctgctggagattaactaggaaacccgagtggcgctaattataactcggggcttccgccgagcctccccttcccaaaaaatagagatggagtctccgcgggagggggcgtcctgggcctcggagggggcctctgcggggcgctgcgcaggggcgctggcttgtggccctggggatgggggtgcccagcccggcgccgggaacctgcgcagctcgggtaccgccccaattagggggtgtcttccagtggccccggactagggagcgatcggggaaggggtgctcgggggtccccgcgggaatcggagcgcagaggcggcggccgttcccgcgggctcgggctcctgcgtgggcgtcggtgagtgtgaggcggccggggaagagttccggacgagtgcggggcagcggagggcggcgcggggcaggcccggggaagcgggagccgtcccgttaggggggcctggacccctcggggagcgcacggtgccccggacccgggccttaaggagagtcccgggcggggagggagactcacctgaggcggccgagccgggccgggccgggccgcgccgggagctggaggcggccgatgttccccggcgcaggctgagccgactctgacagccgccgcctccggccccccgcacacaccccctccgggcctcacagcgcccccgcccgcccccgcccactgtctccgcccccgcccctccccgctctcccgggtggccacctcccctctctctccctcccttggagccgagacccggagaccccggggcccagacgcactccagtgccagacgccgaccgacgacagagcgcagtgacagacgcgacccaaagacctgcagcggcggagtagacacccacgtgacagacagacggacagaagcccgtggagacagacacgcgcagacggacgacctcatgcagtgacaggcacagacaaacgcagggacgactttcacagacggacggacacacttggacaccctgtcggtctcgctcgaggctggtgaagttagcgcaaggccaaggggtcatgcatccccggccacgacacagacgggtggcatgggaggagaggcatgtgggagtgtggcagagtaccgtccccttaggggtccaggtggcacgggtgcagaaaaggtgacgtgggacactcctggggatgaaaggacacctgtgggaatggagatgtaaaatgggatcgctagtggaaatgaggtgggagggcatggagacaggagacccctgggggaggaaggggtgacttgggacacctgagaaggcaggacagcgtggtagcacgcgcaaggctgctgggcgaggcgcactccgcggcggcagtggaaacttctggaacccccgcgggtgggtctgtgctggttccctgacgggtgacttcggactttcgtcaccagggtccggtcggggcatgacatcaccaggcctagcattcattggccacgcggctggcaggtgggagcggcctggctcgggcgcccccagcctgctccgaggggcctgacccgcgcagattgccccccgccccgccctccaggagttcacccgtgtggacagggctgctgcagcggggtccccacgaccgaggtgcatgcggcaataccgcgcggcgcctgcttcctggaggcggccggctcaggagcccccgagaccccgcgtgggagagcggccggcgcaggccagcgtcgggcgtgcgtgcgcgcgcgcggcggtgcggggcgcggcgtggggtgggcgcgtgcgcacacgctcgctctaaccgccgcgcgccccgcagcgccccgcagcgcctcgggcacgcgggcgccgccgccagggaccgcgggcaccgggttgcggggcctcgcaggggttgaatccggagtcttgccagtccctgggccgcgcggttcccggctctccaagctgggcgggccccacgcccgctcgccccacgggaaccgggtcccgcaggcacggtcacccgcgctccgctcgctggagacggccgccaggtggcgcaaaaagcagccactcgggcctcggagactgggctgggttgggggtgttggggaggtgaacccctcgccatctgtgcccactgtctccggctttccccgccccaatctcaggcaaccccaaatcccctgcctggacaccgaggctccttgtatccggccttcagcgttctggccgcactagttgaaggctcctcactggccagaccatgtgccctagttgagatccctgaagagcagatgtaagggctgtgcatgggggaggggacaggagggtggatggtgggtgttgctgcggggggaatgaatctgaggcaggtttctaagcgtggtaattatgaattattaaaatgatggggccgcgtgtggcccctagtgcggtgcctgtaatcccagcactctgggaggccgagacaggaggatcgcttcagtccaggagttggagactagcctgggcaacatagcgagactcccttctccgcaaaaaaataaaatgatggaaacaaactgtgaacgagtgctctgaggcctgccccagtcctgaggctttagggatttttggccctgctagtgatgaaggcttgcccctgtcaccct

SEQ ID NO: 49268 - DNA, 1053 bp, Homo sapiens
gcgtccccagagaggctgctggttggagacacagggcgcctttcctcttcccactttccctcttgtcagccagagacaaagaactcaggcttcaggtggctcaaaacgtaaaggaagaaaaaaaaagaaaaaaaagaagccgggcacagtggctcacgcctgtaatcccagcattgggaggctgaggtgggcagatcatgaggtcaggagttcgagaccagcctgaccaacatggtgaaaccccgtctctactaaaaatacaaaaattagctgggcatggtggtggaaggtaatcgccattgcacaccaggctgggcagcaagagtgaaactctgtctcaagaaaaaaaaaaaaaaagagagagagagagagactgctgcttcaggaagttagaagtccaagaaaaaaaggagaactttaaactttaagtattgagcaaacaccaggtctagcaaacataatgttatctctagattacttattgattaatgagcaaacctgtaggtacagggagaaaataaaaggtgactaactaaattatatatacatataaaatatacatacataatatatgtgatataatacatatattactgtataatatatacatatgtacacatatgtgtgtatatatattaatatataatacattatatattattatatgtaccatataggtatactacatgtatattctatacacattatatatgtatatataatttatctagtcaccttttattttctccttgtacctagaggtacaatatatatggttaaatatattgtatatattatatacaatatattatatatgtagatatgtataccttatatgtacatatgtatattatatgtaacaatatatatgtagatatgtataccttatatgtacatatgtatattatatgtaatacattatatgtattatacatatataatatacatatgatacatatataatattttaatataaatataaacagataaatttagtatacaatatattttccatagtttgattcaactggaaattcaaaattcatataacaa

SEQ ID NO: 49269 - DNA, 2034 bp, Homo sapiens
gaaccatgatagtgccactgcacttcagcctgggtgacagagggagaccctgcctccaaaaaaaaaaaaaaaaaaaagaaggagccccatcctacataccagatgccagacaacatcaccccaaaatctcactgctgtagatgccatcatctcagacgacatcaccccaacccagggccttgacactagagatgacttcaccccttacgctaaaccttcactccttgggtggtaaacctaggtcacgcccatggattcacctctcctaagacacaaatggacataggacatttttacttttctttctgaactccctgcctgcataggctatgatcttagtacgctgcttgctctctgctcacatccatccctaaaagaaactctggccatgtgcaagccaatctggaagccatgccagtgtgtgacagcatcattacactctgctctaggtccagagttgatctgttcccttggcgccaccctaggcggtggagtgggtggctgtgcatgggatttcaggtcaactgggtgccttcatatgcttcaactgtttacgctcatccaaggccttactcagcatggcacgtagcccagacttctctgatagcctttaatatccacaccattcgaacggtacccgttggaatatgcacaaggtctcacgcctaggtcagtggtattaggaacaacagaccaaaggttgctggctagactttagaagtagatcaccacatccacatgggccaagctggtagccagaatatgaacttaaaggcgcctctctcacccagcaggctgggctccctgcattcccgccacttcctttatttttatttatttatttatttatttatttatttatttatttattttgagatcgagtctcgctctgttgcccaggctggggtgcaatggtgcgatctcagctcactacaacctctgcctcccaggttcaagcgattctcctgcctcagtctcctgagtagctgggactatgggcgcaagtgaccaggcctggctaatttttatatttttagtagagatggggtttcaccaggctggccaggtctcgaactctctacctccacgaggttctttctttctttctttctttgagagagtcttgccctgttgcccaggcctcgaactcctgacctcaagtctcaaactcttctcttcaagtgatccacccgtctcggcctcttggcctcccaaattgctgggattatgggcatgaaccaccgcgcccagcccccaccactttctttaagtggagcatttagacatctgcccttgaacttcaagtgactggcactgtattcccctctctatatatgtactgctagttgccacatgctctctccactcgactctactcctattctctctttctctacttgacctggggatggaggactgttctcctaactcatggtgccctcctgactcatggtgttttcccaactcatggtgccctcctgactcatggtgcccttcctgcctaggaggcccttatttattgtctgtaaaaaatctctggggccaggcacagtggctcatttctttaatcccagcactttgggaggccaaggcaggaggatcacttgagccctggagttcaagaccagcctgggcaacatggtgagactccatctctttttttttttttttttgagatggagtctcactctgtcgcccaggctggcgtgcagtggcacgacctcagctcactgcaagctccacctcctgggttcacaccattctcctgcctcagcctcccgagtagctgggaccacaggcgcccgccaccacacctggctaatttttttgtattttcagtagagacggggtttcactgtgttggccagaatggtctcgatctcctgacctcgtgatccgcccgcctcggcctcccaaagtgctgggattacaggcgtgagccactgcacccggccggtgagactccatctctataaaataataataataaaaagaaatctttgaacttgtttcctattgtgatggtgtcagaag

SEQ ID NO: 49270 - DNA, 467 bp, Homo sapiens
taatatgctaattataatacattagcttgctaaatggcactcccaccagtgctgtgactgtttgcaaatgccatagcaatgcccagaagttaccctatatggtctaaaagggggaggaattctcagttctgggaaattcctacccctcttctggaaaactcatgaataatccaccccttctttagcatacgatcaataaataaccattagaaaatagccaaccaacaaaacaaacaaactaataaaaaaagaagaacaaacaataaaaaacaaaacgaaacaaaaatggccaaccagcagccatcggggctgctctgtctatgaagcagccattctcacgttttttcacttctgtaataaacttgctttcacttcactctgtggactcactccaatttttttatttttttattttttttattttttgacggagtctcgctctgtcacccaggctggagtgcagtggc

SEQ ID NO: 49271 - DNA, 1198 bp, Homo sapiens
aaaatgacttcagatggaattctgtgttaattactcccacggttttttctggcctatggggtcctgcgggggacaggatggagcaggggcagactgagggacagaaggggcttgaaggagagcgaggtgccactgtctccccagcaggaggaattgaaactcaggagaggctgcaggagtaggaccagactccagagtccaagccctcggtcaagggtaccctccacgggtgtcggggaggaagggcagcttccaggcagttccatgtgggccaggcaggctgtggggctgagccaatagcagctcttcctgcctgacacttcctggacttgtcctatctttttcccccgtgtcccgcttcccacagcgctgacgtctgtctgtccgggtgcagggagaagggaggaagaggggagaggtggggcggtgcaaaggtgaggctgtgctcagccctgacgctcagcaaaaccgataaccagcactttcattacgtgcacgccccagggccacgtccctgccgctgtcttggtcctgaagcctgttctgccccagccccctgcccgctgggcccatgcagctgttggggctcctcggcctcctctggatgctcaaggcctccccgtgggccacaggtaagggggagaggcggaagggggttggagaaaagctcctgatgtgatgttccaggaaaggggagggaaaagtggctgtaaggcctggggaggggggataagaaggcaccgcttggggctctgggtgcagggagaaccgaggcacggcctgactgggggagggggcgatgaggagaggtttcttccagagctccaggtgcagggaaaaccccgaggttgggaaagagtgagggagctgggtctctgccactctccaccaagcactgagcaggttgcagcggctgagccccaatctgtatctgcagctggagggtagagggtgggatttacgtcttcccagagcagtgcccttcctgtcttgactccttctgtcacctgcctcatgcccccagcttgagtgtccccttcacactggcctctccctccctgacagccctctaacttctacccctggtctcggtcctctggtttcagcctctctgccttttgtcccccggcggctcctccccagctctgccgtcactctcttaccccggccagggcccatgtgtctgggtacagctgtt

SEQ ID NO: 49272 - DNA, 1010 bp, Homo sapiens
tgtcaccagggccagtgcgttctagagacgagcggtcccgcgtgtcggtaaggccccgctcaccatcagcatcagtcgagccccgcccactcattctaggatgaagcctagcctcacgcgccgccccggctctgcccccaggccctacagtggagcctcgtccccagagtcccgctccaagcccatccccgttgccctacagtggagccctgccctggagctctgctccgtcgccctaaagtgtagccccgcctccttgatggggttgagtccaatcccctggttctgggatagaccccgcccactcattctagggtggggccccgccccttcgttctagggctgaaccttgcccccttcttctggggtggagccccgcccccttgttctagggtggatccccgccccctccttttagggtgaagccctgcccacttgatctaaagtggaatcccgccccctcacctagggtagagccccgccccctcgttctagggtggagacccgtccgcttgttctacggtggattccggccgcttgtctagggtggaaccccccagcttgccctagggtggaacccccccgctgccctaggctggagccccgccccctcacccgcccccgcggggcccaggtgcacgcgtggaccccgagcccggaggtgaagagggtctgaccctgcgatctcccgcagctgctactccaccgacacgcactggttctctggcccgcgctgcgaggtggccgtccactggagggcgctggtcgggggcctgacggccggcgccgcgctgctggtgctgctgctgctggcgctgggcgtccgggcggtgcgctccggatggtggggcggccagcgccgaggccggtgagcgtgcggggggcggggccggggggcgagggcagccaaggggtcccaggcgggccggctctgtctgaccgcgcggcggccccacctaggtcctgggaccaggacaggaaatggttcgagacctgggatgaggaagtcg

SEQ ID NO: 49273 - DNA, 786 bp, Homo sapiens
tagggcatgaggaccccgatctaggaggacgcaggaaaagaggggtcagaggtgcagggagagccccggagtccagagagtgagtggttctgcgggaccaggaagtaagtgatcgctgtgctccgggaggatgctggaagaagattccagacgcagcttttttgcctgctatggttaccgttgctatgaaggagggcggccctgctgacccagagccagccctgtctcccgctccactctgacctcacccctgagtccagggctgaacgcacgctcctccgtggcccccgcttccaccccgtgcatgtggggggcttctgctccgctccctcctgttccggggtccagcgggcggctccccaggcaggctctgcacttacccgcagcccagtgatgcagggtcggaggggtggtcggcagtgggaaagggcgtagggcagatgccgggctgactcttccttttgccagaggaaatcccctctgccccctagtcctccccctaccaaggctcccatcactcatcacggcctctccctacagaccagaatctgagggagagcagattcggccttgagaacgcctacaacaacttccggcccaccctggagactgttgactctggcacagaggtgactcagctgcgagctgcccccaccccctgaggctgctccacttcctctggggttccctcttcccccgggactcccttctccccctgggactcccttctccccctgggactccctcccttccccctgggaccccttccctttcccttccccctgg

SEQ ID NO: 49274 - DNA, 2127 bp, Homo sapiens
ggaggttgctgtgagctaagatcacaccactgcactccagcctgggcgacagagcgaggctttgtctcaaaataaaaattattttttcatgaaatgttgagggaaatctcctgcaatgattcttttgtcttttttgataaaatgcaggcttctctgccaacactctcgtatcctctccacacacatcatcctaaatggggatgtacccttgctgctcccagtacctggaacaggaacattcttctcagtgttctccagccctctatgccctcttactgttttattttttagacagggtcttgctctgtcatccaggctggagtgcagtgtcaccatcatggctcactgcagcctcgacctcccaggttcaagtgattctcctgcctcagtctcctgagtatctgggattacaggtatgcgctaccatgcacggctagcgaattttttatggagactgggtctcaccatattgcccaagctggtcttgaactcctgggctgaagcaatcctcccgccttctttaaactcatctcattgatgccttctccaggaagcctgtgctgttccctcagcaagaggcttcttacctgatcccccacagcctctcctacagctcagcaacggtttatggaatgaaaggcctctcttgaagctttgcaggcacctgcctgcctgaggtgttagcaaatctgcagacccgccctgaggccatgtgtctagttaccctggtctctgaatcacagatgagctctcatttcttcccacaaataaaccctgtgaccctccaccctctactcagagaacccgccctcaggtagttccctgtttgtgacatacacacacttagccctgaggctggactgacaggccgacctggctggtggactccagcccaagcctgccagctgcctgccggggtgggggccttggcgggagaggacggggccgggtggggaggaaggcggggcctgaggctgtgcgaggcgagtcggtgtgtccctggctgggacggaagttgcaccacaagtacaattagtttcagttttgtttcttttccaggcacccagcaacggcggcctccaggcctcaggccccctcaccatcctagaggtcaagatcagctctggctaggtaaggggtggggggcggcacagctataggaaggaccgagcggagggagtagggggaggggagtggagagagagcgcgggaggaggaggaagggaaggaaagggagggcgtgaagaggcacccggaaggcaggaggagagggcaggagggaaactgcactcgcctccctcccgctccgtggccacaggtccccgcaagaaagaccccgtcccactctctgaggtctcctcccagctccagaaaaggggacattccacctagtctgcccaacaagtaggtctcagccactgtgccaggagctcgggactccctccctccagaggtttctggaatgcattcagcaggaaaagctaaaagaacaggactccaggagataagccaaggccaagtctatcagagggtgagccagcagcgggaaggggaccagcccttcccctagcgttttttctgcccgctccagaatccgctttagaaactgttaaatgcagaaagtggggcctccaccacccgcgatgctgccccaggtctagcagaagacaggtgtaaggccaggcgggtgcggtggctcatgcctgtaatcctaatgctttgggaaggccgagacgggaggatagcctgaggccaggagttggagaccagcctgggcaacatagcaagaccccatctctacaaaaagtgataatttttaaaaaatgggctggctgggcccctgggcatggtggctcacgcctataatcccagcactttgggagaccgaggagggcggatcacctgaggtcaggagttcaagaccagcctggccaatagggccaaactccatttctactaaacatacaaaaattagccgggtgtgatggtgcgcacctgtaatcacagctactcgggaggctgaggcaggagaatcacttgaacctggcaggtggaggtggcagtgagccaagatcgcaccactgcactccagcctgggcaacagagtgagactctgtctcaaaaaaa

SEQ ID NO: 49275 - DNA, 6814 bp, Homo sapiens
gggattacaggcgtgagccaccgtacctagccccctttttttattttttattttgttttttgagacagggtctcactttgtcgcccaggctggagggcagtggtgcgatctcggctcactgcagcctcaacctccagggctcaaatgattctcctgtctcagtccctcaagtagctgagattacaggcactcacgaccatacctggctaatttttgtagagatggcattttgccatgttggtcaggctgctctcaaactcctgggctcaagcgatctgtccgcctcggcctcccaaagcactgggattacaggcgtgagccgccgcatccagctgcatctgtgggtactttccagcctgtggcatttggggtcctccctgcagggggggcgggttctaggaacatctacctactggccaaacccactcccctaacctggtatccaagagcccccaaaaaagcttccttcctctcccctccaagttttcccaaagaggaagaggaatgatctcagcctctggcctccccatcaaatacaggagaaccgatagcagtggctgagatcttgccttcgcctgctccccatccattgactcccagaagccttcacattctgttacatatgagaaaaccaaccgaggcttggcgaggcttgctcagaataagtcgatttcaatttagactgagaactgtctgactccaaagctgcccttcctagcacccaatgcccagttctctgccttctcaagcagctcaaatcctggccgagtcacttgagcctatctgtatctctgtttcctcatttataagatgagtgagtggatgaaataagatctgagatgctaagccgggtacagtggctcacgcctgtaatcccggcactttgggaggccaaggtgggcagatcacctgagattgggagttgaagaccagcctgaccaacatggtgaaaccccgtctctactaaaaatacaaaattagccaggtgtggtgtcgcatgcctttaatcccagctacttgggaggctgaggtaggagaattgcttgaacccgggaggcagaggttgcagtgagccaagatggcacctttgcactccagcctgggtaacaacagtgaaactccatctcaaaaaaaaaaaaaaaaaagatctgagatgctgccccgtgctaataaaccaggccctggtccctattaggagaggtctggaattttgacctaaggggggtgctcagagacacaccatgcaccctgctggcatcctgttcaaggcccccaagacggagatggagagacacaatgacaagcggggagggaatgctttgaatggcttggcgggggagagggccctcggctgccggtgacagcctgaataagaattctgcaattcatcctctgatgactcagctagttggaccggcgcctctgccaaccctggggagcatgagtcagcagctgagggggccgatggcaggagagatcgctgtggtccatgtgagcagtgactgtagggagaacggcctgttcccagctcctaaccccaaggcggagcatctgcctctgcggtcggacacacacgggcctcaggttcttagccatgtggccaagcctcctccctcagacccgatctctcctcctttgcactagtgcagtcacagccccagaaacgcaggggtcacgtctgctccccacagccttggtgagcagccgtatctgcaacaagagactctgctcctccctcctcttcactctttccgtggggttagattgacctcccaagcacagcaacgaagcccatgccggagaagaggagaaggagggacgtggcgcaggccaggtacatggctgggcagatggccacggcgtccttccctgcttctgggggttggggaatgggtttctcgggggttgatatttttgctcaggggccaactcagaaaaccttccttcacacttggaaacagccgtatctatgttgcctcccgtgatcgtaggttagggacggtccatccacttattcacttattagaagaaaacagccaaagcaagccaaggtgcagcagacccccgagtccagagagctgctggtggcacaaggccgcagagtgaggcgcacacgcagacctcaccccctccagcaatgcctgcctgccatgcctggcagctctgatcatcatctaacttttttttttttttttttgagacagagtctctgtcacccaggctggaatgcagtagtgcaatctcagctcactgcaacctctatctcccaggtccaagtgattctcctgcctcagcctcctgagcagctggaattacaggcacccgccaccatgcccagctatttcttctatttttagtagagacggggtttcactatgttggccaggctggtctggaactcctgacctttagtgatctgcccgcctcagcctcccagagtactgggatcacaggcatgagccaccgcacccggcttcactgcctaacttagattgttcacatgcagctccttccctgcctacaaaacccttcaggaggacaagggcttctaattcatagtgggcactccataatcaggtattttggagatatctattggttgaaataacgaatgagtgaatgtatgctaaagcctagtcactttcgttcagatcgcatatacactccagggcaggtggcaactctattgagggggtgagacccttctgcaaaagagatttattaattattcctttccttggaagggaggcatgagtaagaatgaagttatttaagctcagtggctcatgcctgtcatcccagagctttgggaggcgaaggaaggaggattgcttgaacccaggagctcgagaccaacctgagcactatagcgagacaccatctctacaaaaagtttaaaaattggctgggtgtggttgtgtgcacttataatcccagctacttgggaggctgagagcaggaggatcgcttgatcctggtaggtggaggttgcagtaaactgagattgtaccactgtactccagcctgggtgacagagcgagaccctgtctcaaaacaaaacaaacagaaagataataacccctccctgctgggctttttatttttccatacctctctaaccttctaacatactctaccctttcattatgtattctgcttattgttaccgattttcaacccctgtagaatgcaagccccatgaggacgggggactttgttttgttcactgataggtccggaatagtgcctgggctatagtacatgcagaatgagtgaatgagtgaatgtatgcaggaatgagagtgggatgcagtgtacatttcctcccagccaggctcctttctgcctgccatgcataccacatggattctcttttggtcctctcaggaattctatgtggggggggtatcactcccatccccattttattttttttatttttttatttttgagatggagttttgctctttcgcccaggctggagtgcagtggtgcgatctctgctcactgcaacctctgcccctccaggttcaagcgattgtcctgcctcagccttccgagtagctgggattacaggcatgtgccaccacacccggctaatttttgtatttttagtacagacgggatttcaccatgttggtcaggctgctctcaaactcctgatcagcctcaagtgatccacccgcctcagcttcccaaagtgccgggattacaggcgtgagccaccactcctgaccatcctcgttttaaagatgaggaaggtagccgggtgtggtggctcatgcctataatcccagcactttgggagccgtagcctgtgtatcgcttgagcccaggagtttgagaccagcctggggaacatggtgaaatcccatctctacaaaaaatacaaaaaattagccaggtgttgtggcgtgtacctgtagtctcagctacttgggaggccgaattgggaggatcatctgagtccgggaggttgaggctgcggtgagccatgattataccactgcactccatcctgggctacagagctagaccctgtctcaaaaacaaacaaccaaagaaataggcagcgtgcggtggttcacgcctgtaaacccagcactttaggaggccaaggcgggaggatcacaaggtcaggagttcgagaccagcctggccaatatggtgaaaccccgtctctactaaaaatacaaaaaaaagttagctggacttggtggcagacgcttgtaatcccaactactcgggaggctgaggcaggagaattgcttgaacccgggaggtggagattgcagtgaactgagatcacgccactgcactccagcctggtgacagagcaagactctgtctcgaaaacaaacaaacaaaaaaaccatgaggaaggtgaggctagagagattatgcaacaaggtcaccagtagttaggcagaggtgaaagtccacatggccactcctgggccaacttcaccacaccctgggggtctgcacgagagaccttctgggaatgccacaccccacttaatctgcccagggtatttctctatctccctgcccaccaatttcatatgtgatcccattccatcccacaaaatatatctgtgccctgaggtacagtttcccctcagctaagattttttcctggtaggaaaacagggagttcatggagacatagaggcagcctaggactgggcaggtgaggtgtaaggagagtgggtctgggttcaagctggcccgaggctcccaggcctggcaccccctgccttccacctgcagaacaggtcttcagagggaggtatgtcttggagcagagggtttttggggtgggcagagctgtccctacaagttcagctccaggcagcaggaaatccacagaaatgtgaacaggggttgggtgcggtggctcacgcctataatcccagcactttgggagggccaggcgggcagatcatttgaggtcaggagttgaagaccaacctggtcaacatggtaaaacgtcatctctactaaaaatacaaaaatcaggctgggcgcagtggctcatgcctgtaattccagcactttaggaggccatggcgggtggatcacttgaggtcaggaccagcctggccaacatggtgaaaccccatttctactaaaaacagaaaaattagccgggcctggtggcacacgcctgtaatccccgctactcggggggctgaggctcaagaattgcttgaaccgggaggtgaagtttgcagcaaactgagatcgcgccattgcactctagcctgggcggcagagtgagactctatctcaagaaaaaacaaaaaacagaaaaacaaaaacaaacaaacaaaaaattggccagattaagtggggtgtggcttccccggaagccttcatgcgcaggctttgccagggctgacaaagttgtcccaggctggccacgtgggctttgatctctccccaactatttgctcccgtgtgatccctggagagaggaatggagacacttgaatatcagcaacagggggcaggatgcagatcctccctgctcaggaagacacgcgtgggtgtctccacccacgggagagcctgttgcaggcgccggagagagctcctggtgcctcctgtgggggctcctgcacttggccagggaagggcctcctctttggtgttttttttttttttacgtttatgtttatgtttatttttcgagatagggtcttgctctgttgcccaggctggagtgcagcggtgcgatctcagctcactgcaacctctgcctcccgggttcaagcgattatcctgcctcagcctccagactagctgggactacaggcccctgccaccatgcccggctaagctttgtatttttagtagattttagattttaccatgttgcccaggctggtctcaaactcctgacctcaggtgatccgcccacctcagtctcccaaagtgttgggattacaggcttgagccaccacacccggcctccttggtgtttagatggggaagggggtgtatctctgtgatctgtcagggtgttcccaggcagggcactaggccagctcctgcctcatcaaaggatcaagactggaatttccctccatttcctatcattttagtcctcatctgaggaccacagctgccaagtctgtctctcacgagcacatgctgggcataggtgaggggcagagccctacataagcacccctatgccctgtccaacctccctccagaagcccctgtcctcagacagaaggtgcatcctctccactttgggtccttctccccttccaagaaaggggttcagggcaaggagagcttaacgcagctccaccactcactaactgggtgacgtctgcagaggttacttagcctctctgaacctctgttcttcgtctgtaaaatgatcacagtaagatatgccacggggttcctggaataaatgagattaataacataaacaaaccaggtgcagtgacttgtgcctgtaattccagctactcaggaggtcgaggcaggaggatcacttgagtccaggagttcaagaccagcctgggcaacatagtgagaccctgtctctacaaaatacttttttcttttttgagacaggatctcgctctgtcagccaggctggagtgcagtggcgcaatctagggtcactgcaacctctgcctcctgggttcaagccattctcctgcctcagcctcctgagtagctgagattacaggtgcctgccaccatatccagctaatttttgtatttttagtagagacggggtttcaccatgttggccagattggtctcaaacttctgactttaagtg

SEQ ID NO: 49276 - DNA, 1235 bp, Homo sapiens
tgcactccagcctgggcgacagggcaagactctgtctcaaaaaaaaaaaaaaaaaaaaaaagaggcactgggtttgttgggaaacgtggggagccctggggaggccctgcaattaccacagccctggcagacgcccattacaaaagcacaaacacacacacacacacgcacgcacgctcattcatccagccagcggaactaacggtctactggacaggaaagccctgttggagagagagggtggggaatcccgcccaggccaagggggacagccctgctgccttccacctgctgcagagctgctgaccggctctgattcaacccggaaaaccagcccggtgttttggacacaacatgaccttttacctgtgggcctctcgggattctcagaaacagcaacaggtggggggttggggggttcccgagcctggggctttccttctgggctcagcccccacctccgcccccacttccctgatgagctgctaccaaagatagacaagagcaaatggagtttggcatgtcatttcctgaaaggatggggacttgaagacaaggtcccctgggcccagttcccggagtttaggttcaagaacgagatgcttgatccacccaaagcagaacggcttctgctagctctaaatcggtggctcagaaagagaagggggctcccaaacctcctagaccctaaagctcctctgttggtctctctaatttccctggtgtcccctgtccaggagcaaggccgtggacacacaacaactgcctctgcttcctgagatgctgatccttggaccaagctggccagtccagggctgaagggctcaggaggagggagaggtctctgcctgcagggccccaagcatctgctgtccctggcacgacccgggttgtctgggtctggggccagtctcctaggggaatgagctggcaggctgggttgtacccagggagtgtgcctggagggagacagccgtcgtggttcaggctgtgaataacaggagcctcatctctgccccagagcttcagggaagggagcacctggcacagaagtgactaagagagcaggtctgggcgggtagctgacgtgcagcaaacaagggaataggaggttcccccaggttcccacacacggagcaaatcccacggcctgccctttggggtcctccatgtccagaccctccaacctggtttctgcacacaactgcttctccaggctgagaagtcctcccgac

SEQ ID NO: 49277 - DNA, 2761 bp, Homo sapiens
agagccactgcccccggccaccatttttgcaacctactaacgactttctatggatggatgcagttggtcatttcattcataccatccgctgaaatcctaatgccactgttatggaattggcatcattatctctactttacaggaaagaaaattaagactcaggggagaaatgggagttgcccagaatttcctgcttgtacatgtgccctgtcggcttctttctccagagactggggctctagaaggtaaaggacctgttcacgatcgcccagctcactggagccagagctgtctggttatagcaatggccatgggagaagtctgcgtccagagcaaacacaaagggctcagtagcaggttggatttgaatcctttttttttttctttttttttggagatggagtctcgctctgtccaagcaggaagaggccaggcgaggtggctcacccctgtaatcccagcactttgtgaaactaaggcgggcagatcacttgagatcaggagttcgagaccagcctggccaacatggcaaaaccccatctctactaaaaatataaaaattagccaggcgtgttagcatgggcctgtaatcccagctactcgagaggctgaggcaggaaaatcgcttgaacccgggaggggattgcgccattgcactccaacctgggtgatagagcaagactgtctcaaaaaaaaggaggaggaagccaagtgtgggcagcctcgggaaagtcctcctacgtggcattcggtctgcactggagtagagggcgttgctcaggacagagactacctcacaagctcctgagacaaggacagtgttggtcctatgcatctgcgaaggtcccataacaaccaccccagaaaagaccctaagatgccactccatgctctcactggctgtgttggaggaaagcaggaggcagccatcccatgtcccacacccccggccaggtcaggctccctgctcccctcctctcctacacctcactgctctccagccctccagccacaaacctacacaagggggtctgggatgggctctgggcccagacagatccaagcaagccagcagcccagctgcatgacagtggtgaggagagctgagggggcccagggtgactcagatgaagagacatgcaagaagcctgctcccatatggaggggaagctgggcagataagaatggccagtgactctgggcatgctggcatcccatggtgaattccatctgcactgtatcacccagacggcttcatccctgggacctccacccccacccatcccccactgaccttgggtcaccgtctctctggacacctgcccagctcagtgggagctcagtctttatagtcacatccagagccagaatggagactagcaaaagaacgtctgtgtccaagccaggcgtggtgttgcgagcctatagttccagcgactcaggaggcagaggtgagaggatcacttgagcccaggagttcaagaccagcctgggcaacatagtgagacccaatttctttgttttctttcttttttttttttgagatggagtcttgctatattgcccaggctggagtgcagtagcatgatctcggctcactacaacctccacctcccaggttcaagcaattctcctgcctcagccctcctgagtagctgggactacaggtgtgcatcaccacacccggctaatttttgtatttttagtagagacggggtttcatcatattggccaggctggtcttgaactcctgacctcgtgatccgcccgcctcagcctcccgaagtgctgggattacaggcttgagccactgttcccagccgagtgagaccccatttctacaaaaatgttttaaattagccaggcctggtggtgtgcgcctgcagtcccagctactcaggaggctgaggcaggaggatggcttgagcccaggaggtagtggctgcagcgagccatgatcgtgccactgcactccagcctgggcaacagagcaagaccctttctcaaaacaaacaggaacaacaacaaagaacagaatgtgtccagagaaaggcgtaaagagagacacaagaatgtagagaatgaggaacgagttctggtaaagatgaacgaaagtgaatcagagtcagataagccacatatgtgggtaaagagaagtggatggagggatggaatctggccagtggcctggaggcaccctgcaggcctgcactacctcatcagcctgacgtaatcagctccatgttcacatctaccccaggagcccggtgctccaccattccctgccattgaaattccccttggtgaccacactgggggcacattccttttctcttttttttttttttttttttgagacagagtctcactctgttgcccaggctggagtgcagcaatgcaattacggctcactgcagcctcaaactcctggactcaagtgactctcctgtcttagcctcccaagaagctgggactacaggcacatgccaccatgcttgactcatttatttattttttgtagaggttgggggggggggtctccctgtgttgcccaggctggtctcgaactcctggcctcaagcaatcctgccaccttggcttcctaaagtgttgggattacaggcatgagccactgtgcccggccaggaaggctcattcttgcctgatggtgaaaggacatttggaatacccacattacaaaagacccagcactaagtgccctcaggaaataagacactttgatggccacataagtttaaat

SEQ ID NO: 49278 - DNA, 12188 bp, Homo sapiens
cagctgggcgtgatggcagatgcctgtaatcccagctacttgggaggctgaagcactataattgcttgagcctgggaggtagaggttgcagtgaactgagaccacaccattgcactccagcctgggcaagaagagcgaaactttgtctcaaaaaaaaaaaaaaaaaaaaaaaaaaattggcggggcatggtggtgcacacctgtagtcccaactagcaactcctcaggaggctgagatgggaggatctcttgagcctgggaggtcgaaatgcagtgagtcatgactgtgccaaggctgggagccatgattgtgccactgcactcccacctgggcaacagaacgtggcccccactcaaaaaaaaaatgcaattgtggacaagcaagggctacattgggtaaggcagcaccagttagagtgttagggagtttaaagagaaatgaccggccaggggctggcaggggagaggggatacagcaggagaggagggggaagtcagtcacagagccagggtaaggaagggcccctggacaggctgtcccagagccacgatcttaaataaaaggcagtggagggccaggcgcagtggctcacgcctataatcccagcactttggaaggccgaggtgggtggatcatgaggtcaggagatcgagaccagcctggacaacatggggaaactagtctctactaaaaatacaaaaattagccaggcatggtggcgcatgactataatcccagctactcgggaggctggggcaggagaatcgcttgaacctgggaggcggaggatgcagtgagccaagatcacacctccgcactccagcctgggcaacagagcaagactccatctcaaaaaaaaaaaaaaaaaaggcggtggagacacccagcactggttccctcctagagaaggggagagagccgagcccaaacacaggctatttttggagttgtgttgtttggagagcaaccaagccagaaatagtgctgttagcaagaccctgccttctccaacccccggctctcccagtgaaatcaccaggaatcagggaggctgggccccacattccagggagcctgtgtaacaggcagtgctctcttccccaccggaagggcttgggagctgagcatttgactgtaaaagggattctgggattccagagggacagagggactgagtcagagagagagagagagagagagtggaaatggggggcaacctcctgcagcggaggagaggggacaggagggaaggctcggggaagaaagggtaggcaggaggtcagagagaagggagcaggaagcgggaggctcagagagagaaagggaaagtgaaaaagaaagcggggaagacagaagcaaagaggaagagcagagatcgggccagaaggcgggaggtcagggggcgatgggtggtgggaaggccagtgtccacccagggcccaccagtgggtgggggacagagggacagtcatggaaaatctgagtgtgatctacagtcacgaaccacctgctcagggacagatggagacatctttcccagtagctggaatcagaactttcccctgaaatccacagcccggtaactcactctcttatctctgaccctccggaagccagagatctagctatttcatcagcatggacttttctttctgtgcccgtgtgaccccttacaaaagagctcaagctggaaagagaggattggatcaagaaagagagaacttaggattcaggggaaaaggggaaagtgataaccccttgagtcagattctgagaagagggtttctctgagaggtcggtggggagcagcccgcaggcagctggaccctggtatggaagggctcggctcctaaggcaggtaagagaaggcagggccacgtgcatgaagtagaggcaggggtcatggccaagtctgggttctttttatttatttatttttttgagacaatcttgctctttcgctcaagctggagtgcagtggtgcaatctcagctctctgcaacctccacctcttgggttcaagagattctcccacctcaggctcctgagtagctgggactacaggtacgtgccgccatgcctggctaatttctgtacttttttttttttagtagagacggggtttcactccaagtctgggttctagagtagctaggcagccccagctcatcagagtcaatggagaaatcggaaacttcacatggacccgataacacaggttttgcctcagtttctaatacacatcttccctatgcctacaagtttccaccgatttgggaaaagacctcttagtaagtcagccacttctgagtccaaagtaaaacgctccccaccctccaccccaatcaggactagagctgctccccagctctcccgtgcccaaggatggaatgtcctttttgctctttgctttgtcctttgagacagggtctctctttgtcacccaggctggagtgcagtgttgcaatcatagctcactccagccttgagctcctaggctcaagcgatcctcctacctcagcttcccatgtagctgggaccataggcacacgccaccacactgggctaattttttttttttttttggtagagatgggatctcactgtgttgcccaggctggctcaaattcctgggctcaagtgatcttcctgcctcagcctccccaaagactgggattacaggtgtgagccaccacacccagcaggggtgtctattttggattggcatcaggatcatccacccaatctatgagtggggactaaattggtgactgctcctgcagagctctggctgtccacagaaaacagcagagacctggcaaggtatgggacaatggctcctggtatgacaggcagaggaagggatggaggctaagctgcagcctggagaggctggcgtcagacacctgaggaggccacatctagctatgtctagacccattgaactttcaagtcttcgaggcttggtactgcctgatccctgttcccctctgatccttaaggtcagagagcaaagccttgcggggtactttttttttttttttttttgagacagattcttgctctgtcacccaggctggagtgcaatagcatgatctcggctcactgcaacctccacctcccaggttcaagcgattctcctgcctcagcctcccaagcagctaggattacaggcacgcaccaccatgcctagctgatttttatatttttagtagagatggggtttcatcatattggccgggctggtcttgaactcctggcctcaagtgatccacctgccttggcctcccgaagtgctaggattacaggtgtgagccaccatgccctgtcttggggtacttttgaggacaagagttaagttcgggactgggcatgttggcttatacactttgggaggcaaaggtgagaggattgttccagcccaggaatttgagaccagcctggtcaacatagcaagactctgtctctataagaaaaaataataattagctgggcgtggtggtgcttgcctgtagtccccgatacttgcttgagcccaggagttcaagtctgcagtgagctatgatcacatgactgcactccagccttggtgacagagtgagaccctgtctccaaaaaaaaaaaaaaaaagagatgggtttggggctggacttgtcttcttccaagaggtcagggcagttgcttcttcctcaccgctaaccacactctcagggactccaaaccacaactaagaaaaggaaaaagacataaacaagaggcagtttcacaggaagagttctcctaatgtgtctgtgagcctaactttccgactgtggttctcctctctttccctgccagctgtgagaaaacaaagcctaaggcagattaaaaagcaggagggctgctcagtgtggttgcccttggtatctgtttactgaaaaaatccaaaacaaacatccgacgcttccacccactgaaacttcctgtgactctgctatcagctgttgccatggattctcccaactgaaccccaccacatacactaaacccaacagtccgtggaccccaagtatgccatctctccaatacaggaccccctgggcagcaccctggccacccttccatccacaacatccagaccacacggccaagggcacctgaccctgtcaaaaccccaaatccagctgggcgcggtggctcatgcctgtaatcccagcatttgggaggccgaggcagccggatcacgaagtcaggagttcgagaccagcctgaccaacatggtgaaaccccgtctctactaaaatacaaaaattagccgggcgtggtggtgcacacctgtaatcccagctactcgggaggctgaggcaggagaaccacttgaacctgggaggcggagattgcagtgagccaagatagtgctactgcactcagcctgggcaacaaaataagactccgtctcaaaacagaaaaacaaaaaaaacaaaaaacaacaacaacaacaaaatccactagtctagccctacatgctcacccactgctagccagtttccaccctctacagcagaggtacccaacctctgggccaggggcccgtactggtccatagcctgttaggaaccaggctgcataacaggaggtgagtggcaggtgagtgaaatttcatctgtagttacagccactcctcatcactcgcattaccaccagagctccactccctgtcagatcagcggcggcattagattctcataggagctcgaaccctattctaaactgttcatgtgagggatctaggttgcaagctccctatgagaatctaatgcctgatgatctgtcacggtctcccatcacccctagatgggaccatctagttgcaggaaaacaagctcagggctcccactgattctacacgatggtgaattgtggaattatttcattatatatattacaatgtaataataatagaaataaagcacacaataaatgtaatgtgcttgaatcatcccgaaaccatcccaccctggtctgtgaaaaaattgtcttccatgaaaccagtccctggtgccaaaaacgttgaggaccactgctccacagaatctatcggtcactcttcctcccctcacccccttgccctaaaagcacaccctgcaaacctgccatgaattgacactctgtttctatcccttttccccttgtgtctgtgtctggaggaagaggataaaggacaagctgccccaagtcctagcgggcagctcgaagaagtgaaacttacacgttggtctcctgtttccttaccaagcttttaccatggtaacccctggtcccgttcagccaccaccaccccacccagcacacctccaacctcagccagacaaggttgttgacacaagagagccctcaggggcacagagagagtctggacacgtggggagtcagccgtgtatcatcggaggcggccgggcacatggcagggatgagggaaagaccaagagtcctctgttgggcccaagtcctagacagacaaaacctagacaatcacgtggctggctgcatgccctgtggctgttgggctgggcccaggaggagggaggggcgctctttcctggaggtggtccagagcaccgggtggacagccctgggggaaaacttccacgttttgatggaggttatctttgataactccacagtgacctggttcgccaaaggaaaagcaggcaacgtgagctgttttttttttctccaagctgaacactaggggtcctaggctttttgggtcacccggcatggcagacagtcaacctggcaggacatccgggagagacagacacaggcagagggcagaaaggtcaagggaggttctcaggccaaggctattggggtttgctcaattgttcctgaatgctcttacacacgtacacacacagagcagcacacacacacacacacacatgcctcagcaagtcccagagagggaggtgtcgagggggacccgctggctgttcagacggactcccagagccagtgagtgggtggggctggaacatgagttcatctatttcctgcccacatctggtataaaaggaggcagtggcccacagaggagcacagctgtgtttggctgcagggccaagagcgctgtcaagaagacccacacgcccccctccagcagctgaattcctgcagctcagcagccgccgccagagcaggacgaaccgccaatcgcaaggcacctctgagaacttcaggtaggagaaaagcaaactccctccaacctcttacttcgggcttaaggcagagaactcgcctccccagaatctcctccctccatgatcccccgctattcctctattttcttttcctcggacctgcagccttgggtcgaccctgccctaggggtgactgcaggagagcagggaggatggtcaggcgtcaccaacaaccccatcacccagtaacaagaaccttgactctctcagtccctctgcatcaagacacttacccatttcccacctcatgcctgctaacttgaatgaaacaatcgctgggaaagcattaagagaattaaggctgggcactgtggctcatgcctgtaatcccagcactttgtgaggctgaggcaggcagataacttgagcccaggagtttgagaccagcctgggcaacatggcaaaaccctgctctcccaaaaaaatacaaaaattagctgggcgtgctggtgtgcctgtattcccagctacttgggaggctgaggtgggaggattgcttcagctggggaggcggaggctgcagggagccaagactgagccattgcacccagcctgggtgacagagcaagaccctgtctctaaaaatgaatgaaaggaaggaagaaagagagagaaagagagagaggaaagaaggaaggaagtaaagaagaaagaaagaaagaaagaggaaagaggaagaaagaaagaaaagaaagaaaagaaaagaaagcaaatttaaagcttatgcaaatcaaagatgttgtgataattgataattgagtctgggctaaattccccctgggctgcaaaggcagagagtggtaatgacttctcacctgcttttcttctaaggcttttttacgggacacagagggaagggagatggactggattccaagattcccacagggcaagatgggcgaagactccctgccactgcccggggataagtcagtctgagtgagacggagtgggatgggcttagaacctgaacatgtcatggtctcttcctgcaccttgccctagtgttcacttaccacctgcttgcaggaaacaagaagagcagggcccacagctggccagctcccctcccctcccgcctgtcttccagaacgattccttcaccagccctctttccattgctctaggatgcagatgtctccagccctcacctgcctagtcctgggcctggcccttgtctttggtgaagggtctgctgtgcaccatcccccatcctacgtggcccacctggcctcagacttcggggtgagggtgtttcagcaggtggcgcaggcctccaaggaccgcaacgtggttttctcaccctatggggtggcctcggtgttggccatgctccagctgacaacaggaggagaaacccagcagcagattcaagcagctatgggattcaagattgatggtgagccacgggacaccaggggaggtgggtggcatgcagaacagacctaccagaagccaaggaaaggctggctctggcttagccgagccaagccccatacagctgtgctgcaggggccaccccatcttcttcccactacactccaagtcactggacccttgaatctccaagggtgtctgaccagtagatttaccgcttattcaccaccgtgtgatcttaacctcgttaagtttgcccatctacaaaatgaggattatttgctgtcctaaagaattcatgagccgggcgcggtggctcaaacgcctgtaatcccagcactttgggaggccaaggcgggcggatcatgaggtcaggagatcaagaccatcctggctaacacagtgaaactccatctctactaaaaatacaaaaaaaattagccaggcgtggtggcaggcgcctgtagtcccagctactcgggaggctgaggcaggagaatggcatgaacccaggaggcagagcttgcagtgagctgagatcgtgccactgcactccagcctgggcgacagagagagactccgtctcaaaaaaaaaaaataaaagaattcatggaattacacttgtgaaatacttagcatagccatcactataggaaaaaaatctaaggccaggcacagtgcctcatgcctgtaatctcagcactttcggagtttgaggcaggaggatcacccaaggctaggagttcaaggccagcctgggcaatacggtgaaaccccgtctctaataaaaatataaaaattagtctgatgaggtggtgcacctgtaatcccagctactcaggaagctgagacacaagaatcactttaacccgggaggtggaggtggcagtgagctgagatcacaccattgcactccagcctgggtgacagagtgagacctgtcaaaaaaaagaaaagaaagagagagagagagagaagagagagaaagaaagaagaagaaagaaagaaagagagagagagaaagaaagaaagaaacaaagaaacaaagaaagaaaggaaaagaaaaaaaaaactaaggccaggcaaggtggcttatgactgtaatttcagcactttggaagattgaggcaggaggatcacttgaggccagaagttcgagacaagactgagcaacagggagacccctgcctctacaaaaaaatttacaaattagccagatgtggtgacacatacctgtagtcccaactactcaggaggctgaggtgggaggatggcttgagcccaggagctggaggctgcagtgagctatgattgtaccactgcacttcagcctgggcaacaaagggaagccctgtctgaaaaaaaaaaaaaaagaaaaagaagaagaaagaaaatatttagggttcatccaggaggcagaggttgcagtaagctgacatcgcgccattgcactccagcctgggagacaagagcaaaactccaactcaaaaaaaaaaaaaaaaaaaaaacaggaagaaaatatttagggttcataatttaagaacagagaaaaatattctagcccaaagaaagggttgggatctgagacttttgaagaaaggaaggagatacagaaaagagatttcatcctggaatgaaatctccctccagagagccctgggaaagcacggtagcccccatccatcagagtggagccccttgtgggggaagtgggctcggctgggaaccctcaattcagcataagcctcacatgtcctctcctctctgtcccggtgcagacaagggcatggcccccgccctccggcatctgtacaaggagctcatggggccatggaacaaggatgagatcagcaccacagacgcgatcttcgtccagcgggatctgaagctggtccagggcttcatgccccacttcttcaggctgttccggagcacggtcaagcaagtggacttttcagaggtggagagagccagattcatcatcaatgactgggtgaagacacacacaaaaggtgagcaggcagggaaaggaaacccatttcctgggcctcaagagaaagggaatttggaaataaatccacatatcccagttgggtgcagtagttcacacctgtaatcccagcccaacactttgggaggtctaggcgagaggaaggcttgaggcctggagtttgagaccagcctggccaacataacaagacctcatctcttcaaaaaatttaaaaaccagccgggcatggtggtgcacacctgtagtcccagctacttgggaggctgaggtgggaggatcacttgagtccagcagttcaaggctgcagtgagctatgtttgcaccaccacactccagcctgggtcacagaacaagacctcatctctaaaaaacaaacaaaaaccaaatccacatatcctaaaaaatgctccttttcagcattctcttctctatggacaaagggctggatgctttaagaaccaaatcttaggctgggcacggtggctcacgcctctaatcctagcactttgagaggccaaggcgggcagattgcctgagcacaggagttcgagaccagcctggccaacatggtgaaaccctgtctctgtcaaaaatacaaaaaattagccaggtgtgttggcgcatgcctataatcccagctgctcgggaggatgaggttcaaagaatcacttgaacccgggaggcagaggctgcagtgagctgagatcatgccactgcactccagcctgggtgacagagcaagactttgtctccaaaaaaaggaactagacgggttcatttaaacccctgactgcagccctttgacatacatccaattgaggactggggactccgggaaacatctaaaaggcttaaaaactttgtctaacttcagccgggcatggtggctcacacctgtaatcccagcactttgggaggctaaggcaggtggatcaaaaggtcaggagtttgagacgagcctgaccaacatggtgaaaccccgtctctactaaaaatacaaaaattagccaggcatggtggcaggcgcctgtaatcccagctattcgggaggctgaggcaggagaattgcttgaaccccggagacagaggttgcagcgagccgagatcgcgccactgcactccagcctggcaatagagtgagactccatctcaaaacaacaacaacaacaacaacaaaatcgtctaacttcctgatcttcctgatcattgattttcccataggtatgatcagcaacttgcttgggaaaggagccgtggaccagctgacacggctggtgctggtgaatgccctctacttcaacggccagtggaagactcccttccccgactccagcacccaccgccgcctcttccacaaatcagacggcagcactgtctctgtgcccatgatggctcagaccaacaagttcaactatagtaagtccaagagccccttccccacagcccacagcaactgcatctcattcctggggtctcccaaggaatacccaaaatgtcaccctctgagggaggaagaccacagggaatgctcccctttaagggaggagagaccctagaatatactccagctttgacaaagatttcccaagcaggagacatcaggataatgggaacagaagacaggaggtttatcccatgaaggatgaagaagctgaaatccagagattccctcagggccacatttgtccacctgactccagggtctcatcttcgtgtgttgctagtgtgattacctggggatgagaaatcctgctgggggagttgaggttaagaggatgaggactccaggtgctgtggctcacgcctgtaatcccagcactttgggaggccaaggcaggtggatcaggagtttgaggtcaggagtttgagaccagcctggccaacatggtgaaaccctgtctctactaaaaatgcaaaaattagccaggtgtggtggcaggcgcctgtaatcccagctactcgggaggctgaggcaggagaatcacttgagcccgggaggtggaggttgcagtgagccgaacgaaattgagccacttcaccccagcctgggcaaaagagtgaaattccattcaaaaaaaaaaaaaaaaaaaaaaggatgaggactgggatgaactggtggctgggtgtggggaaaatggaagtgaaggaaggccaaaagagacagagaaggcctggcgcggcgactcacgcctataatcccagcactttgggaggctgagaagggggattgcttgaggccagaagttgaataccagtctgggcagcatagcaagaccctgcctctacaaaaaaaaaattttttttaattagccaggcttggtgacatgcatctgtagtctactcaagaagctgaggtgaggccaggcacggtggctcacgcctgtattcccagcactttgggaggtcaaggcgggtggatgacctgaggtcaggagttcaagaccagcctggccaacatggtgaaaccccatctgtataaaaatacaaaaattagctgggcatgatagcaggtgcctgtaattccagctactcaggaggctgaggtgggagaatctat

SEQ ID NO: 49279 - DNA, 1772 bp, Homo sapiens
aaacaaacaaacaaacaaacaaaatacagaagctgaggcgggaggaacatttgaaccggattcggaggctgcagtgagctatgattgcaccactgcgctccagtctgtgtgacagtgagaccctgtctcttacacacacacacacacacacacacatgcacacacacagagagagagaaattagaagatactgaattggcagaagagaagggaaatagaaattaaaatactgaataggggagcagtgaacaggggatacccaaaagccaagagcgagagagagcctggcttccagaaatagtggagaagccaggagaactaggtgaaaacccagtgctgggttgccatcagcgagagctggagccatttccaacgaaccatcttgtcgtcttcacagctgagttcaccacgcccgatggccattactacgacatcctggaactgccctaccacggggacaccctcagcatgttcattgctgccccttatgaaaaagaggtgcctctctctgccctcaccaacattctgagtgcccagctcatcagccactggaaaggcaacatgaccaggctgccccgcctcctggttctgcccaagtaagccaccccgctatctccccgacctaccaacccctctctcctggctccctaaagtcaccgcccccaggttgaatttcccagatctgtgatgcttgcaggacatgcatgtgtgggaggctgatgggaaactgtggcctgggtttgattatgagtcttgcaatcatccctccccctgtttctgctggagggcaggggacagctcttcctgaccacacccccacattgactatccccagaatacccagcaaaagcccccaaaaggagagtcagagaaatgagggaggtgggggcccaatcagtccacatctacttagggtcgccccatcagcacttccatccccaaccctttcaagtcaacatccaaacaaaagaaatcacttccaaggacggagcagctcaaagcgcagcttctagctggggttccaagaaagcagatttttcgaaatccttctgcagaaggaagcaaagagattttttgaaatctttctgcagaaggagaaggctggagctggggaactccagaattatagggaagcctcccaccacgctcatcccaaatttccggatgctataatgccaggcttggggaaagaggagaatttagttggttagctggtgcgtgctctcacttgcatcctctctcttcctcttttttttttttctcctctctctctggctcataaaaatggaggtaattagttgtgccctggtgagaagcagagagtgcacaaaggccccctgcttgagtcctcttcagggttagctctcagaaacacaatctgcagaacagatttttgttccaacatccttgcaggagaatttgcccttagcttcccccaccccagccaggctgaataaaattatgctgaaactactgtcttatttgaggaaagtaattagtcataggtgggagggggtggggagattgcagaagaatgttcatgaatattaggattttcagctctaaggggggactttgtaaacagctttagaagaagaaccaggccggctgggtgtggtggctcatgcctgtaatctcagcatttggggaggccaaggcgggcggatcacttgaggtcaggagtttgagaccagcctggccaacatggtgaaaccctgtctctattaaaaatacaaaaattagccagccgtggtagcgagcgcctatgatcc

SEQ ID NO: 49280 - DNA, 987 bp, Homo sapiens
gaaaggaaagaagagagagagaaagaaagagagagagagaaagaaagaaagaaagaaagaaagaaagaaagaaagaaagaaagaaagaaagaaagaaagaaaaagaaaggaaagaaagaacgaacgaaccaggcctccctctccaaccttcacctccgtccctattctggccacttgattcgggggacacctggtaggggatggggaaaggtgggagctgccagccagaggggaccccggcttgagcagcctcttgctgctatctgcaggttctccctggagactgaagtcgacctcaggaagcccctagagaacctgggaatgaccgacatgttcagacagtttcaggctgacttcacgagtctttcaggtaagaagactttcctttgcattttctcaccccagtggactgcgggggcccctaagaggaaaaaggaacctctccttgagagcggcagctgatctaatcctgtatccacatctgtttcagaccaagagcctctccacgtcgcgcaggcgctgcagaaagtgaagatcgaggtgaacgagagtggcacggtggcctcctcatccacaggtgagtctggctcaggtgaggctccacgggtgtcgcctccatcgcccttcaggataactggtccccagacccggaaaggaccccgcagccctctcggcacagagcagctctgtctgtgctcagccatcacccactccccacctgtttctcagcctggaaaacgggcttgggaccatggaaccctgtttcctcgcctgatggctcctaagttccctgactgtgaaaaggcctcctaaagaaaaacccaagttgttcccacagtgggaagtaaacttaagaaacatgcttatcaggctgggcatggtggctcccacctgtaatcccagcgctttgggggaccaaggcaggtggatcacttgaggtcaggaattcgagaccagcctgggcaacatggcaaaaccctatctcta

SEQ ID NO: 49281 - DNA, 5064 bp, Homo sapiens
cctgggcgacagagggagaccctgtctctaagaaaaacggcgggggtgggggtggtgccagtgccagcatccctctgttctaagacattgtcccttctcttgcagctgtcatagtctcagcccgcatggcccccgaggagatcatcatggacagacccttcctctttgtggtccggcacaaccccacaggtgagcctggaacccatcacgttccacatcctcccacccattctttctctcaggaactagtcccgacagatgcagacatccctctatccctgagagggctctgggcagggaacccataaccctaccctgcttcctgtcccaagaggaggctaccttctatcacccacagacagtgccgggtccccgctctgtgactcaggcagctgcgactccagacagctcactcatctgcctagatctcagtccttccacccacatccagcctgatgagctgtcccactccttctgcttctcaacccccatggttcttccaccctcaggaacagtccttttcatgggccaagtgatggaaccctgaccctggggaaagacgccttcatctgggacaaaactggagatgcatcgggaaagaagaaactccgaagaaaagaattttagtgttaatgactctttctgaaggaagagaagacatttgccttttgttaaaagatggtaaaccagatctgtctccaagaccttggcctctccttggaggacctttaggtcaaactccctagtctccacctgagaccctgggagagaagtttgaagcacaactcccttaaggtctccaaaccagacggtgacgcctgcgggaccatctggggcacctgcttccacccgtctctctgcccactcgggtctgcagacctggttcccactgaggccctttgcaggatggaactacggggcttacaggagcttttgtgtgcctggtagaaactatttctgttccagtcacattgccatcactcttgtactgcctgccaccgcggaggaggctggtgacaggccaaaggccagtggaagaaacaccctttcatctcagagtccactgtggcactggccacccctccccagtacaggggtgctgcaggtggcagagtgaatgtcccccatcatgtggcccaactctcctggcctggccatctccctccccagaaacagtgtgcatgggttattttggagtgtaggtgacttgtttactcattgaagcagatttctgcttccttttatttttataggaatagaggaagaaatgtcagatgcgtgcccagctcttcaccccccaatctcttggtggggaggggtgtacctaaatatttatcatatccttgcccttgagtgcttgttagagagaaagagaactactaaggaaaataatattatttaaactcgctcctagtgtttctttgtggtctgtgtcaccgtatctcaggaagtccagccacttgactggcacacacccctccggacatccagcgtgacggagcccacactgccaccttgtggccgcctgagaccctcgcgccccccgcgcccctctttttccccttgatggaaattgaccatacaatttcatcctccttcaggggatcaaaaggacggagtggggggacagagactcagatgaggacagagtggtttccaatgtgttcaatagatttaggagcagaaatgcaaggggctgcatgacctaccaggacagaactttccccaattacagggtgactcacagccgcattggtgactcacttcaatgtgtcatttccggctgctgtgtgtgagcagtggacacgtgaggggggggtgggtgagagagacaggcagctcggattcaactaccttagataatatttctgaaaacctaccagccagagggtagggcacaaagatggatgtaatgcactttgggaggccaaggcgggaggattgcttgagcccaggagttcaagaccagcctgggcaacataccaagacccccgtctctttaaaaatatatatattttaaatatacttaaatatatatttctaatatctttaaatatatatatatattttaaagaccaatttatgggagaattgcacacagatgtgaaatgaatgtaatctaatagaagcctaatcagcccaccatgttctccactgaaaaatcctctttctttggggtttttctttctttcttttttgattttgcactggacggtgacgtcagccatgtacaggatccacaggggtggtgtcaaatgctattgaaattgtgttgaattgtatgctttttcacttttgataaataaacatgtaaaaatgtttcaaaaaaataataaaataaataaatacgaagaatatgtcaggacagtcactgccttcaccttctccatttcacaccggtggtacaagaaatcagaagcctaggccaggtgtggtggttcatgcctgtaatcccagcactttgggaagccgaggtgggtggatcacctaaggtcaggagtttgagaccagcctggacaacatggtgaaaccccgtctctactaaaaatacaaaaattagccgggcgtggtggctggcgcctgtaatcccagctactcgggaggctgaggcaggagaatcacttgaagccaggaggcagaggttgcagtgagctgagattgcatcactgaactccaggctgggtggcagagcgagactccctctcaaaaaacaacaactacaaagacaacaacaaacccagaatcaaaatcctgttggtccatagacctcatgggtggaagagaccttcctacatccaggttggcccaacatgggggagtccatgaaatggtcacctcagctctgccacaagccccaaggataagttgattctgcccctgggaatcatcctcaaaaaggaaaaaaatgttcccctgccataaactttccacttatgcagatgggcctgctcgtaagtcactgtcactgtgggttcccaactctgttcatgacacttccttccagcaccaaatgcttcccacccctctactcccactccccattcttcaaacccagctcaagttccagttcctccacctaggacttcccatggatccagccaatatcactctcaggtccggcgcagtggcccacgcctgtaatctcagcactttgggaggccggggcaggaagattgcttgaggccaggagtttcagaccagcctggacaacatagtgagactcttcctctaagaaaagaaagagagaaagagagagagaaagacagaggaaagagagagaaaaataaagaaagagagaaagaaagaaagaaaaagaaaaagaaagaaagaacgaaagaaagaaagaaagaaagaaagaaagaaagaaagaaagaaagaaagaaagaaagaaagaaagaaagaaagaaaaagaaaggaaggaaggaaggaaaggagggagggagggagggaaggaaggaaggaaggaaggaaggggatcaaaacatcatcactctcaactcgacactgactgagttttcttctccctggtctgtaacagtgcttggattctcgagtgttccttagctttgtgtgtgtgtgtcttaccctccccaagcccatcaaggtatcaggtttcttgaaaacaaggctctcttgttatatatactctagcatcttcttgaaaatggcttcctgaaaagtcttttattatctttctccagcatctcgaaggcttttggcagagggcacacttccctccattagtttctgttcaaatattcaaaaataattttttaaactgaaaaaagaccaataaccatctgttgaacttgtatactgtctaactccagaaccctgaagataggattcagagatgcagccccctgaacacccagctcatttctattgctttttaaacaattttttgtagagacggggttgcaccatgttttgaacttttgggctcaaacaatcctcctgcctcggcctcccaaattgctgggattacagttgtgagccaccatgcccagcttggctcaggtgtacctttcaacctccttataccctgaaagtatgactaattccaggccccaggctagtggctgaaaagttacctgtctctaacagatttgcttggaaagctaaacagcctctttttgcacaaaatgcttcaaaaagcagaacaaattagccctaactctgcagtatacagttcaaaaactgctcatccatgctgagatggctctagaggaaaaagagttcttcaaaaagccccctcaccacagaggaggcttgttccaggaaatgccccatttaacagactctcagctattgtgaggacaaaaatgatgtagactcacagcacgagacctgcccagccctgtttgactttgcctggccctgtcccttgcctgttctaagtttgtcttcccttctctatttttttttttcttttaagacagggtctcgctttgttgctgaggcaaaagtgcagtggcacaatcttagcttattacagcctccatctcctgggcccaaagccatcctcgcacctcagcctcccgagtagctgggaccacaggtgtgcgccgccaagccctgctaatatttgcattttttggagagatggtgtctcactatattgcccaggctggtctcgaattcctaggctcaagcaatccacctgtctcggcctcccaaagtactgtgatcacaaagtgctgggccaccatgcctggcccgctgttctttagggatgaaaaattaacaagatctgcctccagctaccgttattgtacatttcttgtaaacctcaaacagtggaattatttatctgctcatctgtgggcaaagagtatgaatgttgtaaatcccttaatggtaaaaatattcagtcaaaagcaaatttgtcaaggagacaccatctttttttgaaatcatttttttaggtggtttctcaagtaagctttgttgaaataatagtagcaagcggctgggcgtggtggctcaggcctgtaatcccagcactttaggaggccaaggtgggcggatcacctgaggtcaggagtttgagaccagcctggc

SEQ ID NO: 49282 - DNA, 874 bp, Homo sapiens
ggaaggccgaggcaagtgaatcacctgagtccaggagttcgagaccagcctgggcaacatggcaaaacctcgtctccacaaaaaaaaatacaaaaatgagctgggcgtggtggcgggcgccagtagtcccagctactctggaggctgaggtgggaggattgcctgagccaaggaggtcgaggttgcagtgagccaagatcacgccactacactccagcctggggtgacagagcaagaccccggctcaaaaaaaaaaaaaaaaaaagtgctgccctcacgtgccagtcatcagcagcttgtgtgttgccaccagccgcggggccagcctgaacacttgcttcctgaaccaggtctttgatctcctcgccaccagaggtcgctttcgctccagtggaaagctcttccctgaagcaaagcagctgtggcttccaccaaaatcttgccaagttggaactccattcaatttaacgagtatttatttaaaagctgacctttagactgggtactgtgaagcattaaaaagaaagtgtcagctattcttaatagcagatatctaatgacaagggacatcaaaaagctggggaaaaaaagctatgctgaccaggtgcagtggctcatgcctgtaatcccaacattttgagaggccaaggtgggaggatcacttgaggcagccaggagtttgggaccagcctggacaacatggcgaaacactcaactaaaaataaaaaaacttagccaggcgtggtggtgcatgccagttactctggaggctgaggccggaggatcacttgagccctgggaagtcgaggctgcagtaagctgtgattgcaccactacattcaagctggggcaacaaagtgagaccctgtcttga

SEQ ID NO: 49283 - DNA, 1327 bp, Homo sapiens
ctcccccatcctccaaccagcccacaggacagccgcgttaccatgacgaccgggctcctagaagctgcagtcaaggacctggttgccatggtttccgcttctccgcctccagccccgcccgcgctccccgcggcgtcggcgcctgcgcagtgcgtggcgcgccgggagtcagagcctgggcgggacggggcggggcttcgggcgagagggagggcagcaggagaaaggataagaaagggagtgggactggcgcctacggtggccgaagtgggacgcgccgagccggaggctgcaggatggtaggctgtgcgaagagggaggggagggggaagcgaggggcgtgggctgcacctgcgggggtcctcgggggccgccctcggggtgaaccgccctgtcttccctctggtcctcagaggcctcccttgcctcggcgggtgggcgagccgggctcgggaggaagagggggaggtggcattcgggagaggggcggggagggggcgcatttgcagggcgagcgggggctgacgaaggggcggcggggccgtcccgagccgggaggggcgctctggtcttggcccctggggtccctcgatccccgctgcagggaagccgcccgaagcagagggttgcgggagtctctttgctgagggagggagcgggggtcaccagtcaccgagacccccttcccgggctgcacaggcgggagcggggacccgggtggggagaggggtgtgggaggggagtttccgggtcggaaaagggagcgccctactgcgttcgtggccgtgcttgcctagaggctgggcccaggtagggaagcgaagtggactcgtggtttttctccgagggacccaggctttgggatcccgggctccggggctctctgccccccttcccattctctttccggaatccaggccttccgtcttcctgcttgctccccacccccctatttgagcgccgcacgaggctccccagcgcccctcttttcccctccaccaaaaaaatcagttctcctgaattctgatttttcacttactaagctagtacagtgccacacacccagggattccaagcctgggcatgtccatgaatagaagagctactggggtaaggagaagactccaggatgtggcccagaccccccggaactgggaagctggggtacactgggcagtgagggttctgtcttccatcccacttgacccagcttgctgtctgttctgcagacattcttttaggggaaccccctgggtggcggggccctaactgagggaaattggtcacctggtgtctggggaggagtgggcgcttagcaggaggcacc

SEQ ID NO: 49284 - DNA, 1000 bp, Homo sapiens
agacaagaagggagaagaaagggcctgggggaagggagagaaagaaaagagttcacttctgaaactccatcattccctccagctgctcccttcccttcctccccttcagaacaaccagctctctcctctggccctctcccagaccagtcacctggtcactgtcctcaggcatgcaagccagcagcccagccactctccctccaagccctactcccctggcagaccccaggcacccacgcctccccagctctcacccatgaagaggaaagtgagcacatattggtaggcgcccactgcttctagatgctgcttctgcaaggttttggaagtggttgggggctgcagggttgtggcaactcccattgcagaagctcccctcttccagcaggatcccagaacccggaggacaaacgatgaaggcttggatgtggacctgggcagactttctccctacaggagcccagctttgggggcctggctaagtcgcaaatcacctcccagagtagcgtgtgtccgtaggtgtgtgagtggggagatctttggatccagagccccagatgtctctgggttttttctcagcctgatctttgaacttcctgtcagtcaccagtctgggctggctgctgggtggggctgggaggcgtaaggggtgtgcaagggagaggtgacacccgagtgcctcaggaattgatgttggagtggacaagagtgatctggctagccccacccactgggtcccaggtgctggaaggggccagaagccctgctgagactatttgacctccagtcggggtgggggcagggcctggtccggggcatctccaggaatgtcaaggtcaccacccctgcctggacctcccccgccatgcacaaacacacacaggctgcaggtctgtttcccactttaatttttttctttttcttttcttttcttttttttctttttttttcacacgtctcggtcacccaggctggagagcagtggcacgatctcggctca

SEQ ID NO: 49285 - DNA, 2994 bp, Homo sapiens
gaattgaggaagcgcttccccgtgcccacctcagggtactgctccgccagcccccactcgggccagcagaagctctctgcagagaagagcaggcggctgccactctggacgaacttcttcagcagctctgtggggctgccggccagaatcacgtcgtagctgggtgaggaaggggaggatgggcaggggtccactgggaacctcagcatccttaccccgctccctatccccagccccgttacctatccacaaacatgatgatcatatcctcccggtcagcgtatttctccatttccttctttaaccaccggaccttctgtcctccaccaactgttcgagccacatcaccccctcgccactcctctcccaggcccagggtctgtggagaagattgccccgtgccaggcaaggggtggggagttgtggggggaactcctgaccaggcttaccgtggggacctgggcatccagacttcagcccacccctcctgctgggaccccctcccaggggcctttccctctcctcacccgcacagtgtagttgaagaactccgcagagcgcaggaaacgcaggtacccctcggtttcagctgtggccacagtgatcaccagcagcttctctgttaccagagggaaatggcacttgagatccaccgcccagctccgggcctcacgtgctttgctgtcctccctctcactcgacttccctccctttcttccttcccattcttaaactcttctcacccaggaacactctgaccccaaggagggcagggtgggagtggtgcccaggaattccgagtccctttgcatagggaggctggaaaccccagttcagggtagtgatgggcgaggggcttggcgcgactcagcctcaagagcacgctgggcgggggacgggccagacacctcctcgagcctccgaccctctccgggccaggctggcaggcacgccagcctctgccccctcggccgtgccgggcctccccgggatctcacctgggttgaccgggtctcggccccggggccggtcggaggctgaggccgcagggggcagcagcagcggcagcagcagcaggaaccggggtccaggccccgaggaggtcatggtggggagcgggcccagacagcacccaggatcctgggatctccgctacgcgcctggatcccagctccggaggggagctctggaaagggggcgctcgggctgctgtgcggccgccgcggggagcagcttggctggggctacgccctgaaaaaaaggcgtatccggaggctacagaaagctccagatgccggcgccacagacaaggcgaggattgtcccgggcgcacgggaggcgggggaggggcggcggctcgggccggcgggcgggagacagggactctgggctgagccagccgcttgacacatgtggaagctgaaacctggacaggggaagtgacccctggcggagggtcgggcgggacgcgggggcgggtcctggccgcagccctgcccagagagtgcgggcggaagacggggagagcgagaggctggcggcgacagggagggaggaagcctaggagtccgccgcgggacggaggcctgggggaactgggagttcagctttctgcagagggccactaggaacctcggattgcccacggaagccagccactttctttgacagtccagcccacctcctcttctgcccggagaagctccaggggctgcctttgtgatcacagcatcttcacaaggaccaaaggaaaataagatttcttgtaagaacaccgtgaccacatctttaaaatgacccatttcgtggctcccacaagatttacacctccacactgaggccggaagtggttttgcccctataaaacatggcgaaaagctttcttgtctccaaggaaacgccacgtaatgagtcaaagctgtggcgcacgcgcagaagtacaagctaccggaagtgatggcgcccctactaaagccttggggttagtacgcgtgcgcagcagtttcttccgacagttgtgttgtgccaatggtggagaagaaaacttcgggtatgtgagcccccgcggttcgcccccttccccttcccaagtcagtcctagaattttcttacctagtcattcctcttttttggtctcgctctttcgcctaggctggagtgcagtggcatagtcatagctcactgcagcctcgatttcctgggatcaaaccatcctcccacctcagcctccggagtggctggaactgcaagcatgaggccccacgcctggttaatttttaatttgttatgtggtgacgggctctcgctatgttgcccaggttggtctccaactcttggcctcaaagcgatcctcctgcgtgggccttccaaagtgctgggattacaggcgtgagctgccgcgcccggccccagctattcctcgtaaatcccttcctcagccctcgggtcctggcgttgacccttcattcacgttttattggtgcctgctccaagccgggcgctggggatgaagaggagaaagacccctcttatccaagcattggctttttctggaaggggggcagaaacgcagacctaacactgtattttactgtgatttgtgatttgtgctatggcagagggaagcacagcgcctgggaacagggagacgtggcatctagcccaggttctgggaggcaggggactgtgaaagcttgaaggaaaaatgaaaaagcttgaattgagtcttgaaagtctagttagggtttctctcagtgggaacctcacgtgcaaaggcagtgaagcaagaaaaagcaagtcgcttaggaagccaagttcacagtttggatcttacagagtaataagaaaggatcgaaggctggggaaaggttacattttgaaaggcattatacacactgcccaggagtttgaactctgtagggaaacactggagagccagcaaagactttttttttttagacagagtcttgctctgtcacccaggctggaatgcag

SEQ ID NO: 49286 - DNA, 912 bp, Homo sapiens
tatttttttttgtttggttggttttgggtttttttttttttttttttttttttgaaacagggtcttgctctgtcacccaggctggagtgcagtggcacaaacacagctcactgcagccttgagctcctgggctcaagcaatccttgcgcctcagcctcctgaatagctgggactacaggtgtgtcccactacacctggctaatttttgtattttttttgtagaaacatggttttgccatgttgcccaggctggcctcgaactcccgcgctcaaacaatccacccaccttggcctcccaaagtgctgagataacaggcatgagccactgcgcctggcaaggtcatgctttttgatgctgggtagttctttgactcctgacctggccacttgttagctatgtgaactttggacacatttcttaatctctgaatgttggtaaattggggatgatgatactgtcccatacagctgttgtaagggttaaatggttcaagtgttgcaaagagctgagcacgtgcctggctcatagtaagtgtccaacaagtgatagctactggggctgctgctgttattattatgcttaacaggtggttaatgaataaagagatatattatgcaaaattatcagaatctggcaaacagctgataaggcaatgaggaaagaggttttttgttttttgtttttgagacagggtctctctctgttgcccaggctggaatgcaatggcgcgatctcagctcgctgcaacctccacctcccgggttcaagcgattcttgtgcctcagcctcccgcgtagctgggattacaggcatgtgccaccacaccctgctaatttttgtatttttagtagagacatggtttcaccacgttggtcaggctggtctcgaactcctgacctgaagtgatgagc

SEQ ID NO: 49287 - DNA, 534 bp, Homo sapiens
gacatggtgggatgcaggaccctggggggctggtgccccagagagggggaggggcagaacccctagggaactggaaggggctgcggctaaggagggttgtccaggcaggctggggtggaatcagcctcagcctctgcctgcctcttcctcgggctcaggtccgtctccactttctgcctccctcctgctctgtgggtctctctgcttcctggcaggtcagaggaatgagctaagcctgcgcgcggcagctgttgacgagatggagggaataaccgaaacgggccaaaagtccaccccctccccccagcctctgggctgccccgggctccccgccccacgagggtggggggggcagacttaccctggagccactgacggatacagccaaggaggggcccccaagggaggcactgggaactgaggggaagcgtctgtctctgactcagctttcattgggggccaaagaacggagtaagagggacaaggagtgaaaagatgacagagacagacgtgagagcaataagggacagagac

SEQ ID NO: 49288 - DNA, 1756 bp, Homo sapiens
gtcctctgtacctcttccatgccacaaaagattctcaatagctgctaagcaacacggtggtggtgttggggggaagggcatgggcctaggtctcacaaaacaggagcttctagtcccaattcagccattaactgattagttgggtgacctcaagtcactttcccagatcaagacagtcctgggggaactgacatgctacactctgtctggcaaaacaatggtgggcggtaagtagccaaaagttcactgggagacgtcaagctaagtatagcccttggtgcagtaaatctaccggagacaactcagaggtgcctggactacggggcccacatcgcagagcagcccagatggcagcgggaaagggagagtacagcgcctcaccctcgagcagcacgatgcctttacggatgtcatcattgtacttgctccgcaccaggcaccaggcgtactcaaactgcgtgctcttggacaccgagcctgctgccttctcagactgaaatttcttttcaaacttctgccacaggggaggaaaggaatcatttagaaatgtagggcgtcaaccattctctatctggacatgccatctccctggctctgcccctttccctcgcaggtctcggtatctggcaccccagcttctgctatctccatgcccgggacccaggctttcggctcctccgggcctgcgggccagctcttgggacagaggcccccggtctcccctccccgcggcggtaccgagcggagatgccacctggtggcagctccaggcaccgctcccggagcagctgaccccggcggccgaacagtaaacacgctgtcagaactgctcaacagcccacgcggtcctcatttgaggctgctggccccatcctgccccaccctgccgggcctggaccttttattgtccaggaatagaagtagtgcctacctcctagagctacaaagactgagatctggcatgcgatgccttagcaccgtgccggacgcagtaataggtgacaccttatgatggtcactgtattcctccaccgctggaggagcgccctgagctcacagctcctgcatgatcccagatcccgtcagtctaaccacggtcgggctccaggcccgtagtctgaggtgtggggggctcaggacactacaactcccaggagcctctgcggcatagcaggccctccgggcaggagccaggcgctgtggaggctgccgggagccgtagttcggcttccctcggccaagccgatgccgggaggagggttcggcccctacctgactctcctcaggacccgccctccgaccttccctttccctctgtccgggccaggcctcaccagcaggtcctccacagacaccagctcgttcagcacggcctccatggccactgcccccgcgagcctcacactacagtctactgtgccacagtctccatggcccagtggcaggggcggagaaccacttccggcgtccggcggatgctggcacgacctggcgacgccccgccccttcctctcagttcagcagcgccggcggggcgctagtgcgcaggctcggccggtccctccagcccgcagactgcgcgcagggagaccttccccaggttggtcttcccaggtgcctcagccggtgccttcctctgtggaggcttccctagggaaactggaggccatgtcttggcggttagcccccaggatgaaaacagcaaaaagagggtgggtagctgaccagagatcacagtacattagggtgccaagct

SEQ ID NO: 49289 - DNA, 1251 bp, Homo sapiens
cgaggcgggaagatcactggaggtcaggagttcgagaccagcctggcaaacatggcgaaaccccgtctctactaaaaatacaaaaatttgctagttgtggtggcgcgcgcctgtaatcccagctactcgggaggctgaggcaggagaatcgcttgaacccggaaggcggaggctgcagtgagccaagatctagccactgcactccaacctgggtgacagagctagaatctgtctcacaaaaaaacaaaaacaaaaaaagcccctaaaataccgtctaggctactcaggatcctgtttaaatttcttaccacgcacacgaagccctccaggcccgcccctgctcacctttccagcttcatctccaggcacccacgcaccccgcacacgcagatgtcttcacgacagccacttttcttctgctcggagcgttccttctacccaccatgcccggtcaacagatcctcaaccactagacaccagaggtgtctacaccgcaggctcggcgaggctcggggacggtcccctcctctacgcggcctcccgtcccttcggctcctaggaggcgcggcatcctgtaccttggaaaacaacgctcttccagtcctactgtcctttagctggacacggaccgtgcctcgttcatctctctgacaaaggccgggaactcaagaaatcatttcttgagtgaatgaaagagtaacggtaggaggtccgaacagaacgctcagaacctccgggcgactaggcttccgggtgtcggtttcgttggctcccgagagggaggaggaagcgcttcttctggggccgctctaggaggaggactcggtgggctggaggactcggagcaacgctcaaggcatctgcgcaggagccaccctaggcggggaggcggggccgagcgaagcccggtgcggggcacggggaccccactggccaatgaacgactcagctctgcaggaggggcgcggcgccacgccacctggaagtgaaagagaatgtccatcgcttttatcagattattttattttcagaagttgtcatctcgggtactaggcttagtacctgggtgacgaaaccatctgtacaacaaactcccgtggcacaagtttatctatataacaaacctgtacgtgtaccctgaacctaaaagtttttaaaaagtactgatcggccgggcgcggtggctcactcctgtaatcccagcattttgggaagccgaggcgggcggatcacgaggtcaagagttcgaga

SEQ ID NO: 49290 - DNA, 1712 bp, Homo sapiens
agggcgagactctgtctcaaaaaaacaaaacaaaacaaaaacaacaaatttagtcgggcgtggtggtgcacgcctgtagtcccaggtactcaggaggctgaggcaggaggactgcttgagcccagggaagtcgaggctgcagtgagctatgatcacaccactgcactccagcctggacgacacagcgacaacctgtctcaaacaaaagtccagacccacagacgcattcattagggggatcccgggggcaaaagaaagagtcacgaaacctaggctatggttccaatgatgccactcagtaccttgggccttcggggctcattaacaccgggctcgcctccactacctcctccgggcagtggttggaatcaaggtctgaaagcaccgagttcacggaaagggcaggggcgccagtcgggatgggcgcggtgggcccgggttcccgcctccgggagcaagccgcagatcagacgggtggggacctgcgctcgcccaggccccgaggcctgctccccgctccctctgccgcgccgggccaggacttacctcgcaaggccccacgaagaggatcttggctttcagcatagttgtccgccgcggcttagccggccggagcccacgggaggcggcgcgtcaggacggagctctacttggccgctttcgtttccatggcgacggagagaggcccgcagggccgacgggactcggccacttccggcgcgcggggcggaaagcgggcgcgtctgcgactgggagggggtcggagagaagccacaaagcccgggctgcagacgcggttctgcagggttggcctgtatttcttttagagacagggtctcactctgtcgcccaggctggagcgcagtggcgcgatctcgggtcactgcaacctccaacttttgggctcaaacgatctttctgcctcagcctcccgagtagctggcactacaggcatgtgccatcacgtccgactaatttttaaaatttttttatttgtaagactgggttttgctatgttgcccaggctgttttcgaactcctgggctgaaatgatcctcccatctccacctcccaaaattctgggactgcaggcccgttccaccagtctcggtagagacgcggaaagcaagactccaggagggggcggaatggccgtttccaaacctttgtttctcccaataatcccgagagctcagacaggccatacaagtgccaagctggccttggaaccaggccttgactcctttatcactgtggcatgatatcactgtggccgtccacctgggagccgatttatcactgccgtggcacagctcagaaaaaatcaggtgaaagtctggtttctgtaaaaggattcaccactcactatcattcgtctgacctaggagaaaccaaagagatgatgactggaatcgtttagtcagtgcaggtgtctagaaacattgctgctaaattcaatcagttaggtcagtctgaaaatacagagtcaagtcagaattttggataagccatgatattaaatgtctatgtgccgagagtgccggtacaaaatatgctagcccataaaagggctgaaatgacaaaaatttctagtcaaccccgtatcaaatctttaaccttcggtaacatagttacatagtctttgtattgaaaagaactacttggctggccgcggtggcccaggcctgtaatcccagcactttgggaggccg

SEQ ID NO: 49291 - DNA, 899 bp, Homo sapiens
agtagggaacacttgcagcaaagcaaagaaatcttttgttttgactcccctgctcccttgagttaactccagcccattcctgcgttgttttgggatccagaacagctgggagcacagactgctggagaaatcaggatgaaaacaattctgttcctaccagcaccttcctgaacttctgagagaattgcagaatccatgttctatagggcaatgggtgtggtggggcggatctctgttttagattaacaggaggatttatcatgccaagaggtcaatatttacattggctttagcatcatgagtatttacttctctgttcagtggctctccctgctgacttcagcagaagcaagatctgctttttgtctgctgaagaggatgctgactgattacgttcttatcagaaaggtctggaaacaaaactgtcacggagcccacttccttggtgaagcttgtcttctttcatctagaaatctgatctggccaggcatggtgactcacgcatgtcatctcagcactgtagaaggccaaggcgggcgggtcacctgaggtcagaagttcaagaccagcctgaccaacatggtgaaaccccgtctctactaaaaaaaaaaaaaaaaaaaaaagaaattagctaggtgtggtgttatgtgcctgtaatctcagatacttgggaggctgaggcaggagaactgcttgaactgaggaggcagaggttgcagtgaggagagatcgtgccattgcactccagcctgggtgacagagtgagacttggtctcaaaaataaaaaaaaaatctactccagccttggggacagtctcatgctctataactaatctctctaactaatctccttctactttttatctctgtagatttgtgtattctggacacttcacata

SEQ ID NO: 49292 - DNA, 1450 bp, Homo sapiens
gctcccggccggtgccgcgggttcggtccgggcgccggtgcgctcctgccggtcctcgtgcccgggactccgggtccccgcgggctgctgcgcacgatgaagctggccctgctcctgccctgggcgtgttgctgcctctgcgggtcggcgctggccaccggcttcctctatcccttctcggccgcagctctgcagcagcacggctaccccgagcccggcgccggctcccctggcagcggctacgcgagccgccggtgagtagctcggggccgaggggccggggggtggggggagggagcggacagcgggggccctggccactgggtggctggagcgaggcttgggggctggagagcggggcgatccgggacttgggggcgcagggcagcggggactgggggctgcagacaccgggcagctggaacgagagctggagggggttggggtgcggggcgattcgggcctgggggcgcggggtggcggatgccaggggcaggggacacggggcaactgggacgaaatggcggtggctgggggttggggtcacggggggaaagaccgaagggccttgggtgcagggcgattgggggctggggcgcggggcggcgggggttgggggctgcagacggggcagctggaacgagcgatggaggaggctgggggttggggccgcggggctgcggggctgcggggttgcgggggctgaaggttcgggtccggctccggggctgcggtggtctctggccgcgcccaccctgtcccttcctttcttcgcttccccaaccttcgccccctcgttccgggctccgagtagaggtggttccgaccgccgtggctggggctggggctctgcccggggcgttcggccgctcacgtggctctgccgctcacctgcgcggctgcggctttgtgtcgcggagcaggttctcgggtggccaaggcctcgcgtcccgggcacccctctcctatcagcggccccaggacaccagaggggtcattcccgcccagtctttggggctgaggccgcggaggatcctcggctgcgactccccagccaccccgggacgtggaaccggctgggatcgggtggctccgtggcggggttggagagggcgcagggtcaccgggcccgggcgccgggacccgccaggcgtctccttcctctcggccggcaggtggcgccatggccacccccgggacgctcagggctgcggctccggagcccgcatttgaatttccccagaaaaccataagcatgcaagtaaaagttgccaaacgcctcgtttgcataactcgcttgaatttagcttttctcatttagtgataactacaacctacacagctatgacagcgctctggaatgcactacctgtgtctgttccctccgtctcttttttatattttaattttttttttttgcagaggcagaatctcaactctgttgcccagg

SEQ ID NO: 49293 - DNA, 682 bp, Homo sapiens
ggcttgctttgttctcgtttcacgcacttcatctgcagctgaaccgcaggcccctgggggtcaggagccctgtcccagaaggttatgtctgtcacgacaggtaatccagcactgagcacaggatgtgaattaaaacaatcccttattgaatcaacggcagctggacccactgggacagcgctgtgttgactttttgggctgcaaagtccaactcacgcaggagctcacaaggctggagttggattctgacccgaagtgaaccaggagtgaacagggagcacggtggacccagacccaatgtgagggtccaggctgttgcctgagtaaggagtttggcaggaaagctcaatattctgtactggaagggggtggtagcattgcaagttgtctgcctgctaggcctaggtccgggacagctgcttgtggggacagctgtctcagcgtcggacagagcatctgccctagattaatcccagaacctggccacgcccctggggagcagagccggggtagggttaccgcacaccaggaaacgcgcctgctttgctgacagcgggtgggtagcttgcaggatggatgggctctgggggcggccaggggtgccactgggaaaggcagactcactgctggctgagccaaagccacccccacgggatgcaagctgacactcccaagagctgct

SEQ ID NO: 49294 - DNA, 2506 bp, Homo sapiens
cagcctgatggacattttcctagtaccggaagcctctgtgtggtttggcacagagcagcagccctggcctcagcccagtattgtgggtgttaaaagtcgcagctctagggtaggatggccacattgccagctgtcccccacccacctggcccacatcctcccatcatgagcaattcctccctgtggtcttcccggccctgacaccctctccaccaagggccccagctccatggcctccagcagcaggcccggggcagagctttgtcctgtgaccctgagtgagaggactgtgtcctctctgtgtgcctcgagggctggagggagggacagcagtgcgtgggaggagcccaggccaagattcccacccttcctccactccatcttggccagcccttccctctggatctcagtcggatggcctggaaaatggaaattggagtcacttcgttttgaggctggtccagagtggggaagctcaggcagctctcgagtggggagctggggttggtagcttgggcctggagtgtgcagagatggggtagctctgcagcccccgtccttttgacagttgtctgcatttctaagtaggggctgggagactcctatcttagctcccccgtcttgtctggagcaccttctggccgcccacctgcccactccatgcccacgtatgttgagagggcctctaggaggtttttttagacaaggtctcgtgctatctcagtgtggtggcgtgatctcagctcactgcaacctctgcctcctgggacaggttcaagtgattctcccgcctcagcctcctgagtagttgggattacaggtgtgatccaccacatccggctaatttttgtatttttagtagagacggggtttccctatgttggccaggctggtctcaaactcctgacctcaagtgatctgctcgccttggcctcccagtgttgggactacaggcatgagccactgtgcctggccccactggcagctttgatggcccagatcagagggccctgagaggcagcggcctggagaggggaagggaacaccagctgggctagttgccaagacagcccagcggcaccagaggccatgccgaggtcaggcgagtctgcaggagccaggacacggagctgggttttcagcttagatcagaggctaggggtcagccagggcagaggctgggatcctagcagggtgaaggcagagccaggacaggagccaggcaggcagatcccagacagggaagcagaaatcagatggcttgcataaaacagcagcaacccagagcctggacactggggcttctgctcccttagacaagaagtctgctttggtatgtcgggaaggaggcaaatgagagaaacctggccaatggtagcttattccataaggacatttattgtttattccacaagaagtccaggagcagaggtggtctcgggattggtttggtgtccaaagaagccaggctcttcgctgacttcttagtgagctggttgatgcctcatgattataaagtggctgctgcagctccaggcatcacatcctcaccttgtatgtaaaggcaggaagtggagggtgaggtgaagcacccaaacagactccttacgtttcatgagcctgtgctggggcaatgtgaccacctcctggttgcaagggagctgggaaactgagtacctggccaaacagaaagggatggctctgcctggctcaggctggtcctgattcctttcctgggtcacatgtacagagtcacaagagggagttctggggcaagagaagaaggggcattgggggccaggcaacccacagagtctgctccatctgctctcccactggtgcagacctagaagctggtccaggatttctgccaccctctattcctgggacaggctggcaggcagaaggccagcagggtaccggggaagattcctgcttgccctcccctctcctgccccgggctttactctctgacctcatggaccacaaacagtacacaagagtcacagaagcctcagagtcccagcagtctctggtgcagagggcagtgtcccggctagtctgccaggccacaatgacatcatcagggccactgcccccgaaggccgtggcctggttttcttggccccacgcccatggctgcccacccgggtgagctcatgcctggacagaaatgggatcagtttctccaggtcagacacagccaggccaggagggctgagacgctggcaggggcagattccaaccagggctcctctgcccaggtctgcaggctctgtgggcaggggtgtcccagtgggaggtgccccatgaaggagagagctaggccttttgtactggctggcaggtcacttcgggggaagccagagctttgcccagaatggggaacactagaggttgcctgtaggaggccaaggcgggacccctccccagatctctccaggcttcaccctgctccctcctcctccaccctagcctccccacaccatccctgcctcctctcatg

SEQ ID NO: 49295 - DNA, 494 bp, Homo sapiens
ctgggctcaagtgatcctcctacctcagctttccaaagtgctaggattgcaggcatgagccaccgtgcctagccaaagacaccctgtaatcaagcagtcctggtggaagggctggggtggcccagggcagcaggtgtctggccaacagtttctagtgttttgtgactgctacttactgacacacataaaagagacagtcatactggtgtgtactggtggaatgtcgactcttatcttcaacagtgccaaagttcagggtttagtaaaagtatttaaacagggcgtggtggctcacatctgtaatcccagaactttgggaggctgaggcaggtggatcatgaggtcaggagattgagatcagcatggttaatactgtgaaaccctatctctactaaaaatacaaaaaattagctgggtgtggtggcacatgcctgtagtcccagctactagggagctgaggcaggagaatcgcttgaacctgggaggcagaggtt

SEQ ID NO: 49296 - DNA, 1043 bp, Homo sapiens
gggacctcctacttgtaaggaaccagggtggggtcctattgggtggacaggagaccctgcagccctggcctcactgccttctgggatcctctgccacaggtcccaccccgcagcccatcctgggcctgcgacccacagcctgtgcctcctgtcccctgtccctcccagtgcaccctgagcccaccctacccagcccccgccacccccctgctgcactcccagggctgaccttcttccctgcccaggctggacatccctcctctcttgcctcccccttgacctccctgatgggactaagtggaggcttctgttcatggaaactggggttaaggaagcaaactacagggcctggggtcaaggtcaggtccaaggtcagggctgagtcagccctgacttcgttcctcccgcctcttcccccgggcatccaggcccttaggtgtcaggagttacagccttgccctcgcctcctgctcctctggccgaggccagggcggccccttcctgtcccccctgcccgtcgttcgctccccgagggcgcagcagaagcacggggaactccggaccccacgaggcgctctggacgaggtcgagccgccgcttcccccgggcgccgctaggtggcgccgcgctaacgaggatcgggatagaccggaggggccgcgctgccaccaaccgggtctccactccccaggtcctcactccccgggccccagcctcgccccaaagctcaaacacgcacccgggaacccttccaccaccctccctccccacccctggcatccttagccctcggcagctcccgtggtcccaggggcctctccggtccctcagcaggagacctggagtgcacggcctgtccatgcctctgggacgcaggacaaagtggacgaataggaatcaaccgtggggagggaggggccacccaggagaatcccagtccacggagtaagggagggtggcatgctgagtgccaggcagaaggcctggcccaggcggtgctccctaagtgagggtgcaccctcacttacatccttccaggatag

SEQ ID NO: 49297 - DNA, 1061 bp, Homo sapiens
ccaccacgcccggctaattttttgtatttttagtagagacagggtttcaccatgttagccaggatggtctcgatctcctgacctcgtgatccgccctgccttggcctcccaaagggctgggattacaggcatgagccactgggcccggccccttccttccttccttctttctcttttcctttctctttcatgcttttttttttctttctttctttttttcttttgagagccagttgtaaatcatttacctgcaaaggctgagagagcagcctcttcctcctccagcccaggaagccagccagcagcacatccaagcagcaagcctccctccctgggtgtcgctgccgcccacccggctgcacagggaaagcttgcgacgtctgttcttcctcttgctttatttcttcgtttccttgcctaagcctgggaacctgcactgaccctgccctccctaccccctcttgacctctgccccatggatgtctggccccagagtgttcctggaggacatcctctctgatattttcagagtcacctctgggcctcccggggactatccacacgagggggtgatggtttctgaggttggaccccgggagaacacagcagcaagccctgagcctccaggacaatctccgcaccactcagcaagagcccgtgctgatcaatcagtgaaacgggaaggcagggccatcgctaattcaggcagcaccggcatggagttggcctaatttggaagtggcctctgctaaagctggccttcgaaccctccaaggggggaaaaaaaaagaaaagaaaagctttactaagctataagcagaagcaggactgcaatcgagctgcttcacctatttaaggaaagtgatcattttcaaatgcgtttaatgcatgaattcgggtacaccaaaaactgatatcctgattatgatctgccctttgtcccctaaaggtggtgacactctccttagcactaccagcagtcagaattgctgccagcactgagcattaaactccccatcttgtgttttgtttttgtttttgtttgtttttttttttttttt

SEQ ID NO: 49298 - DNA, 487 bp, Homo sapiens
acagctgcacccatgcccccttctgcctgttctcacatccttccaatcctagaccacccctcaccctgttctcttgggaaccccagctgccctcagccccagaccccccgaaccatactcccactgggacctgggctgccttaatccgagccccctccctccctgcaaaaggctgcgaacgcttttgagggctggaacatctggctaatggtggggaaagtgctgagacgacaggttatttcaacactgtcatcatctgttgggtatttcaacactcagtgcttgtgcaagagacttaatgggacctgtcataaactcacgctgtctcaaagctcgggcacgtcgcggcggggctgatggggagttgtcagggtttagcaataggccctgtcttggggcccgtagcctccttaagggttatttgtctccactgtggaaggctcagagagaaatctcaagatgtcagagaaaatcccgagcaattacc

SEQ ID NO: 49299 - DNA, 869 bp, Homo sapiens
gggcaacagagcaagactcatctttaaaaaaaaaaaaaaaaaaaaaagatgtgaactggagcaaagttacagccaatgggtgctggtcacatgccagcaggggttttttcattttgcctctctgggaaccctcatattccctgtacccctgccccctaacaacagagtgagctccatgacagcaggaagaagagacaggactggggaatggatcaaacagggtcctgctgaataactagccaggcagtggaaatgcttctgaacagtaaaatttcaacagaaacaccagagaaaggagatgccggccaagtgggcagagaaagcttggcccggaacacagcttcccgttccagcttccgcagggggattaaagacagattcggccgctcacatccagcccttgtgaggggcccgccgctgccccaggcattaacacacacctcctgattcattttgtcctgaccacagcccttcggcatgcccattttaccggtggtggcactgagtctctgagaaacgtaatgattgcatagggaagccaggctctctgccggccgggccggcgcagggctgttttcaagggaaactgaaacctgaaacctgacctccctgccctggctctcagcacagcctcctgccaccctcccactatccccaccctcaccccccgccccccgccactcccatcccccttctcacccatctgcctgcaggctggtggctggccactactggaagacttccaggcgctctcccctctccagtccctgaaacattttggaagaagggagaggccgggaactttgggtccaacatgaaggacattagtaggtgttagaaaaaatagtcaagtgtgaaataaattcctg

SEQ ID NO: 49300 - DNA, 619 bp, Homo sapiens
gttgaatatcgttgcatgctgttctgacaaaggaggggaaaactccctgtctgaatttccatgttccctcctcctacacacatacacatcctgcgccacaacagactttttctttcccaaaaggaaggttcttttttttgttttgttttcactttgaactcctgagattcgtttctggcaaggttcctttcctctctctctaccaaacggttttgaaacagtcatcatttccctgagatgataaacagtgagagattgcttttacttttgaaggcaatgaaaacacgtctatggtttcactttgaaacacatcaggaaaaacactcctatcacatttagcacgtgtaaaggaattctccattcatgggccacctgtgtgtctgatgatcgtttaatactgcttcccaagtttcagcaatcgctggaagccactcaatcacatccagcctcgcgatgtgagacccgatatgttttcagcagttacccagcgtcctgcgggtctctccgccactcccgttacatgtgtttttgggtaatcgccagtcttttcacagatgaatgccagaacatggaacaaaggcttgaatgcaacgaaagcacgtcgcggtttttttatttt

SEQ ID NO: 49301 - DNA, 2545 bp, Homo sapiens
ctgccaccgcagaaatagacatgccaggggaaggcggaagcacccccccccccacccccgccgcctccccgagtgtgcaggcatccttagaagtcgcatttccccgggacaggaatgtccctcggtggcaatgccgcttcccgccagaagcctgactccgggacagggcgtggcaggcgcgggggcctgggcgcgccggtgggcacgtgcgcggggacccgaggacccgaggacccgagtgtcggggcgccgctgccctctaccgggcggcgcggtcggagctacagcgcggcggccggccgactgagcgcgcgggccggggcgccccacacggaggcagcccttggccacccgagatccacagtgccctgctgtgcgcggcgtcaccgcatctagggtggaggctcgcaacgtgccccccgacgccagcgcgctcccacccaccggcgagtcaaggttgcgttggggagacagtgaaccccgttcccgacatcaggggcctccccttggggaaactgaggcccctggccagctgcgcaagacctggggacacgcgtgttctctaaatcttgggactttcatttccagcctcttcctccaaaaatgccgaattcactgcgccaaccctcgaactcacttgaaaagcaattgttttccacttgcgcgttttattttgtatcctatgcagattctatttacatatgcattttgagattaaggaatttggggacttgttttaactaattactcgttcagtgaagtacgggagagtcaaagaacagtattcctactggaaactccaagtcacacgtgtgtataatcaatgaaagatgacgatcataaaacgtgtgctttcgccagctttccgcgaggagagaaatcaaaagagaatttattttttggtttgcattttagcatttctgtaaacttgggaccacgctttccgttttcagtgagtgcacccacactttccaactttctgcgcccaaagttgcaacaaaccaaggtgtctgaaccacaggaagtttcttgggctgttccgctgaagcggcgcggggggacacagaactgggctcccagacttttcctgtcgtggcctaaactggaacggcttgggcgaatgggggctgccgggacccccagcgctaccgccgttggggtgcgttcgggtgcgacgctggcaccgccgctgtccgggtgtggggcatccacgcgcgcggccccctgagagggtcagggctgtttccccctcaactccactcctccaaacatgccacgctgttcctggtcgtgtcggtgtcccggtcctcgctgggcgcagagggatcagagtgttgccgtccaccgtcggggcgcctcccacgcacgctgctgcggggggcctgggccacgcaggggtcgggtgtggggggtcccgggcaggtggtagcggcgtctccgcgctctgtacactaaccactacaggggcgctccgacgttccccccaaccggagtcttgaaggcgctgcgctcggccaccgcgggcgatcgcgatcccagcgggagaccccccccacccccgcagccctccccaggtgcgcggtgccgggggaccccgggcgctgccctccagcgccccctcggggccgggtctgtggccggcgcgaccgcggactttggggggggttgtcccgaggggcgggggtcgccggtcggcccgcggaggggagggggagggcggcggtgggggggttgggggagcaggggccggggccgcgcgcgcgaggccgggccgcggccgccgcgccctggggctgcgactccggctccggctcgggctcgccatggctgcggcggtgccgtgaggaggagtccgcgtcctcggtggcggcggcggcggccggctccaggccgggttttggcgccgcccgcctgctgcctcctggcggctcctgaactccagccccctctctatcagccgctcactccgtctcaatatgtctcaagatggcggccaatgtgggatcgatgtttcaatattggaagcgctttgatttacagcagctgcaggtcaggctcctccgcgctcggcctcgcgcccgggggtgggggctgcgggcggtcgcggcctccgccgggggccccgggctggcccagccgccggggggcccgcggcggcggggaggaggggggtgccgggcaccgcggggccgagtcggggccgagtccctcccgctccccggcccccattgatcactcgcttgatcggaaattgatcctctttgttcaattcatcgatcagcccaagatggcgccgggagccgccgccgccaccactgcccccggtgtctgcccccaccccgggcgcccccccgggccccgcgccgccgccgccgccagcgccgccgccgccgttgccgccgcgggaccggggagggggcggccccggcggcccgcggggtgcgcgcgcgagcggggagcggggagcgggcggcggggggcgggcggcggcgggcgccgggagggggccgcggcccggcggtggcgcccgcccgcccgctcgccc

SEQ ID NO: 49302 - DNA, 1759 bp, Homo sapiens
cgcccccggcccgccgtattcccggggaaagtttgtggggagttgctgcggggggtgaagcgcctgcctctccaggaggagccgccgccactgccgccggcgcggcggagctggggctggtggcgctgtggtgccgccggctcgggggagggtcagagcggccaccggcggcggcggcggcggcgcggcccggctccggccaggcgggcgggtggccgggcaggcgcccgcgctcgctacccccggccggccccggccgccgcccccggctgtcaccggcccgggccgcgccgccgctccggcaccccgcgtgtggctcccggcgcggacccccgggtttgtttacgtcccggggagcgccccggggccacccgcgcacctcgcggccgccgcgctcttttgtgtgcctgtgtcggtgacgcggacctgttcctccgtggcggacccccgcgggggctctttggggaaacttggcgaggggcggcgggggtgccccgcgcgcagtgtcgctgggtcccggtgtcccggaccgccgggtgcgggcgcgggaggaggaggctgcaactttcccctaggcaggccccaagctgttcccccgggtgcccgggcagtgtacgctgcctccccgccgccggtccgagccgcgatcgccgcgcgcctgggggctccggcggcccccggtgacctgcggcgccgggtcccttccttgcgtcccctcggggcttctgccctctctgcagggcccgccatggagcgcgcggcgggtgcgctcggagatgccttctcgggccgggttctcgaaagcagagccccgggggcccgttgggaccgtggcatgccgggcggtggtccgcgcgcggagtccccggcgccgcggggggaccgtgccggggctccccggcccgcgcccgagtcgccgccgtgcccaaggggcgagtgcctgcctgccaccccccgcccggaggagcggcgcacccttagggtccgccccgcacgtgccagctcggcgcccgcggcgccgggacagccccgggactctgccaggtggatgttgtgcgtagccggagccaggttgaaggtgagcggcgtgtgggccagaagtcccgaggttgcaggcgcggagggaaccggggatgtcggggggtgcccgggtcccgcggcttagaatgctctagggcggcctggtgctctgggaggggataggagggttcctcagggcccctggggaactgcagctactcccaactgctaaggtgtgcgtgaagataaacttggctgaactttcctaacctggaggactggtgacagtgacctaccgcaatacctttgggagcaaagctcgagatgcaggcttgtatcaaacgaagcgggttggattaaaacatatttaaatggaatctgacaactttaattgtatatgcttgttttctgctcttgcctactaagaacgataaagccgagtcatagtcgttatgaaatttcctgaaatttctcgcttaactaggaagaagactatgcgaaatatgtatttccgataagattaaaacttaaaggagtttaagtatttattgactaaaatagattactccaaagtgtctattgtgtaaattagattcctggatgtaatgaacacagccgaatggcatttttgataaattggtctaccctgttttagtaaaaatagctcccttttaccataatttaattcctgtgcttactgtaaaacccgttgtggagttttaaggacaaacattattat

SEQ ID NO: 49303 - DNA, 549 bp, Homo sapiens
ggtagaggttgcagtgagccgagattgtgccattgcactccagctttggcaacaaaagtaaaacgctgtctcaaaaaaaaaaaatccaccttcagaattgacctgtgttaatctgtccagactgccgtaacagaataccatagatggggtggcttcacatatttacacaacacatatttatctctcatagttctggaggctggaaagtccatgatccgggtacgggccaacgtggttcctggtgcgggcccttttcctggcttgcagatggcctcgtttttgctgtgttgccacatagcagagagtgtgcgcaggcaggcaagccagctctctggtatctcttgttttaagtacactaatcccatcatgagggctttaccctagtgacctcatctcatccttacgaccttccaaaggccacacctccaagtaccatcatattggaggctggggcttcaatgtatgaatttgaggggggtggacaacacagttcagtccgtagcagcaccctagctcacacgtccatttccctggggctggtcaccctcg

SEQ ID NO: 49304 - DNA, 1036 bp, Homo sapiens
ttatccaagttagtgttttccattctttcactgaaggctctaaaaatggtcccatcaagaagtctggtagataatggaagacgaagtggactttacagaaagatgaattttcttccctagagctggaaaacccttcagcgtgtcatgcgttccccagccaggacagacaaagccacgcaatctgtttcctgcaggcccagaggggaaggcttcctccttgtggttagtgacttcaaaagctgtcctcactagagcaagtccaactcttcctctagttctgatgacttcacggcagccaactgagctgctgaacgctgtttttttctacgcagaaaccctcccgactttcacgaggagttgacaggttttcctcttcactcgggctcccttgtcatcgttaaactgaaactgctttcttgtagccaaattctgtggtcccttttcggcctcggcctccttgacctctctgtgtccccaccttggctctcccacgcctgccagccgtaccacaggccccgggtgtgaaccctccctccgcggtcatgcagccacgcctctgctcaagctgtgcctcctcctgggcgcaccctccctctcccatccttcagcctctgaagtcctgcccagctccggttcctgtttctgttaggacgaggcccttcagatcctctccagcaggtggactctgtcctgccccgtaccacccgccgcgggccacttttgggcctgcgccatgttcctgcccttaccccgcccggtgttagcgtcacgtgggtcctgatgtcctccctctcccaggcctctgcttatctgattgggggctgtgcttgactctgaaacccgggcacctcctacagggcattttgcctgtcacaggcctagcattcaatacctatcatatttttgaaatatctgcagaaataaaaagaaataactattttcttcttcaggagttaagatgcgtggccaccaagtacttttcaatacataaaatatgttttcagcacagaaaggcctttcaccgctcttacttaca

SEQ ID NO: 49305 - DNA, 1781 bp, Homo sapiens
gtgcagtggcacgatcttagctcactgcaacctccgcctcccaggttcgagagattctcctgcttcagcctcctgagtagctgggattacacacactcgctaccatgctcggctaatttttatatttttagtagagactaggtttcgccatgttggccaggctggactcaaactcctgacctcaggtgatccgcttccctcggtctcccagggaatggctgtttaatcacaagaaagtcttcccttcatgcgttgtgaaaaccagcagtattttaattgaagaaatccggtattgtttggctttctagatttggaagtaggtcaggtggctaatgattgaaaatggaccggcaaccagagggcctttggaaactctagctcgacttcaggctatagttttgtttatgcccttgtcactaaaggcactgcccatgagagctgggtttgcagtccctgctgagcctggggttgagagcagagccctagagtaactcagcaaaggcatccctccctgcacctgagctgggggagaggcggcttatgattaactcagcgatgtctcaaatgccatttctagaggctgaacacattaacttttaaaaaatgatttaaaaattaccaattgaccgtatccggggctgaacctgcgtgattcagcttcttttaaaaatatcttttctcaacaaattgcttccttaacattttaatttgttgatcatcaaggaagcttgccaaatattagctgttcttttccatttcctaccgcctcaagcttcccgtatttggcctatttcagtggagctgtaaggtcactccctatttttcttcccaaataactgtatttattactgtcaggtattggcgggtttgatccagctgtcatcagaacgtttggaaataccgttttttgccagaatgctgatttaatgatctcatactgacatggcttgttctctctgcagacttgataacttgttgaatatgttccctcttcttattgagcaatggtgctttttgaaaatttttcccagccagaaggcttcatgggtagtatctttaagatcctagcagaaggttgcttttctctctctctctctctcagtcctttctttttctcttttctttgcttctttccttctttcctttttctttcttttctttcttctctttctttctcttttcttggcttatttccttctttcctttgtctttctttgctccttccttccttccttttcttccttcccctttctttttccttccctccctccctccctaccttcctcccttccttccttcctctctctttctgtctctctgtctctgcctgctttttcctctctctctctgtctctccccccttctcccctctcctatcctcttcttccttttttctttttttggaaggcccagattagtagcagagactctccttgaaggggatagatgcattgtcgctgtttggtattttgaacagattcttaagaaaatgttttcctggtggaagatttcagacacacatgaggtgagaataatgaaccctgtgtgctgcccccagcatgatcagttccaaactattggcctgtctagtttcatctccgcccctgcctactcctggaattttgaaaaggacatcatattattttctccataaatatttcagtatgtatctctaaaagataatgtcacttcgaaaaaaatacctaataccacgatcacacctaaaacataaatgaacaatatgaaggatgagtttctgctgtgtggcatggcagaatgat

SEQ ID NO: 49306 - DNA, 2481 bp, Homo sapiens
tgtcctttttcagggaagaaatctgttcccgtccaatatgaatgccctggtgggcttgtcagtaaattacatggtatttgggaattgattttctgacgccaccgatttgtcaagaacttatcctgccttttcagcgatttgacagcacctgttaggctgtagggccatgtgattgggcagttctcctgccgagaaaaaggggactgatgactttctgtcacttgggcatccagaaacctccttgaaggtggaggttattgagggaggaggcaggagtggaaaaatgctattggtttattcctgtgcttttatagaacagccgaaccattctatggcaataaaacagaatcacagggcaaggtgcagtggctcacacctgtcatcccagtattttgggaggctgaggcaggaggatcgcttgagcccaggagtttgagaccaaccttggcaacatagtgagaccttgtctctacccaaaaataaaaaaaaaaaatcagctgggcttggtggtgcacgcctgtagtcccatctcctcgggaggctgaggtgggaggatcgcttgaggctgggaggtgggagcttgcagtgagccatgatcacaccactgcactccagcctgggcaacagagtgagatcctatctcaaaaacaaacaaacaaaaaaggaacttgtttcctagcaagaagcagatgaggctggtgaataagcataccacataagtaagtaatccactaacttagggaatttcgtgaccagtcactcagcacgccctgttgcgaaggggacggctgaccaataggatcatctcagagtcaccctcacacaacttggcttagcctagttggcaaaagtgtctcttcagagacctaccctcctggaattgaaataaaatgaaaatttgtgatgacgatcagctactgtcagtgtgacttaggtgtagaaattaaaaaagaaaaaaagaccactctaaaggcatttgtgcatgaagacacctacagaaataaagccggggtgctgttcttggtcttcattcaggctagcacctctcgtcaccttttcactttggagctcagggcctggttcactcagcaagtgagcggctcacacagtagatgctctgcacatagtagtaggtactcagaatatagcagctgttgatgtacatgtttccagaggggccaacacaggaatctgcacgtgggtccttgctttaagcccagcccctctctgtgggcgtgggatggagtcttcctttcttggtgaccggcgccctctggggtcactggaggcctggacttccccactggcccagtgaccttgtttccttgttccctgtctcgcccagccttggctgtcctgggatttgaaaatctgggataaagcctttttcgggcctctaaggccctgctggttctgcgtgttccagagagctgcacctctgggtggtgagctggcctttttggcatttgatttatgtatagccctgagtcactgggagcggatctagagtccaggccagtgactgatttcaaacgctaacactcttggctcgggctcaggtttcaagtcagcctccaaaggggatgtttgctcatttcgtcatcttcctatcacagcaattttcgtcatatggaggggtggcactcatgtaccttgatgattattattcttttaaaaaatgaagttatttatgttatggggtgagttcgtcacacagtccgaatgtggaatgttgccatccttttcatcccaatcctgccagtgatttctgtttacaatagaactattgacattgtatggggatgaaactagcatgagatagtaattgttggcttgcctgagattttcatcatatgtacacatagacaaaacctggctttagttcctaaagctattgctgtttattgtacttttattagccaatgttacagatccccgtagcatgccagaggctattaagaaatacaggggtcgggggcaggaacgaagtccctggccatggatcatgcaattgatctatagttatttttttttctttttctttaatttttttttgaaattttaaattattattattactgttttttgcgatggagtttcactcttgttgcccaggctggagtgcaatggcatgatctccccctcccaggttcaagcgattttcctgcctcagcttccggagtagctgggattataggcgcctgctaccatacctggctaatttttgtatttttagtagagatggggtttcaccatgttggccaggctggtcttgaactcttgacctcaagtgatccaccgacctcgacctcccaaagtgctgggattacaggtgtgagccaccatgcccggcccaaattattattattttttataagataggatcttatcacacaggctggactgcagtggtgcaatcatagctcactacaacttccaacttttgggctcaggtgatcctcccacctcagcctcctgagt

SEQ ID NO: 49307 - DNA, 674 bp, Homo sapiens
tgctgctagcctgccagcttcccatgacctgggacctgggaccaggggcccgcaggtgtttctagctggagaggagttctagatagttctgagcggataccctcctctgtcttcctcgggagagttctggcttggtttggtggtgttttctgtgaccagcagtggccaccgccaccaccaacccctcttccccctcccctcttcctccccctcccccctccctcctcctcctctatctccatacgccctgagactggccagtgggcagcatattgtgcaagaaacagctgttgttttgacaaaggacataactcgcctcacttcttgcatcaccagacccacgaggctctggattccaggcctctgcccctgcaggtggacacacagaccgtaacgcagaggctcacgtgtcccacactatgcattaccatttgtgtacgcactcgttcacatttagcaggattgtaaaaattaatagttagtgcagttcttccagctagataatgcatccaaatggcaagacagtccaaagatacacactatggagtaagtccctctccccaccggcccctctggagagagccaggcacggtcacaagtttcttctgtatccctctggagataatcacagcctatgcgagcatatggatggatattcttttaaacattgtgtt

SEQ ID NO: 49308 - DNA, 2362 bp, Homo sapiens
gacattatcttgtgaaattccttctcctggctcatcctggctcaaaagctcccctactgagcaccttgtgacccccactctgcccgccagagaacaaaccccttttgactgtaattttcctttacctacccaaatcctataaaacggccccacccctttctcccttcgctgactctcttttcagactcagcccacctgcacccaggtgaaataaacagctttattgctcacacaaagcctgtttggtggtcttttcacacggacgtgagtgaaagagactgccattcatgaatggacaaggcctggctccgtccacgctttcccagctctgtgtcctgccatcggacatgctggcacatctgctgtgggtgccctgcacttctccgggcactcctggcccagctggggaggttggcatggtatccaccattttgttctaaagtagtaaatgaaactcttgggagggcagcacccagcagatgtttggagctagagacagggctctggggatgtgtaggaacccggacctggtgtggcaatggtgtggggctgtcacgaggcgtgaggaggctggggtggtgttggggacagcacacgatgctggggctcaggccaagtgaagcttggacttcactctgtctgaggctttgccaagtgtcagagggtgcacacttgggagtcacatggccaggctcacatttccagccgaagttacactctacagcctggcagcagatggacgtttggggacagaggtggagccggaacagctgagacactgttttagaggactctgcgagaaacacgctcttaaaacaaggaagcggtggttatgtcttattcaacaacgatctgttgtggaccagctgtgtgccaggcagttgcaggccctgaggctgcagcagtgagcagaaggccaaggtccctgccctcgcggtgcttacattctagtggagacagatgttaaactacagggcaggaaaacactgtcaaggagatgcaggtggaggattctgactgtggaactggggcatagagacagtgggttttgaaagcacttggctgagaaggatgggaggagggaggagggaggagggcgggtacatctgtagatggaccaggttaaggtatggacttccccatcctgacaagggggagccccaagcttgttttcaggtgtgacgggggtggggagaaagagagcattccaagagaggcacgaacgtcatttccagagcgagatgaaggtcacagagtttgggaggagatgggatccggcactcgggctggcgagcagacaggagggaactcagggagatgggaaccccggggaggaagttagggcaggatcccctgggagttttcccggatacataggagaaaaggttatccttcaagggtgagcgggggctaagtgcaggggacagaagagaggaaagcccggcgaccatcatgcccggctgccgtgggtggtctggattggaggcggcagccgggctgtgtttgtgcggagggtggcagggggccagcggaggaaactgcccaggcgccagccctgccatccccaccggcctcctcgctttggggttttgctttctgccctggccacgtgggaccggctaggtggagatcatgcaatcagggttcccagctctcagaaccataatggttaagcaagcagcttcgtttccaggcacgcaggagctcccccgtgtcagcgttttcctaacatggctaatcataaaaacctcctgggtgtgtgtgtatgcttgttaaaaatactgtccctgggccccaccctagacttagtgagacacagtcaccggggaagggcctggggacttgcatttagaaccagctcctggaatgcttactctgaggccagtttgggccccctcccatggcctccctctgtgtcccttcctccagatgctgattgaggatgtgtcccctgccgggactgtgtttgcatgtctctgtctctgtcacaaagtagatgcctggggagtgtgtgctgcgtggccccctgaagaccctgtaccgggatgtcagcaccccagcccccagctcctccccctgtgaaagacattagctcctggaggggctcaggtggtggaaatgaatcttagcatcaatgtttagacctaaaagccatctccaggtcatcatagcacatgacagagatagaggcagaacctggtggccataggattatttctgagcaaagatcgcccaagctttggcataggccagggttattcacatgtccgagtccctggaagtggggtgtgaggaggttgtggggggccttcagaatgagggaaaagggataaatcaaaatcaagtcttttttttttttttt

SEQ ID NO: 49309 - DNA, 1801 bp, Homo sapiens
gagacctcctttgcgggtctgcttagcggtagctggattgtctctgagggatacctggctttcctaactgttcctggagaatcttaaagacgaaaatggaagaaagggctcacatctttgttttgtgctgcaagcaaagtcttggaaaaatgaatgatgccaatggaatctatttcttgtaattaatttcctcaagctactggatctccttttcttgctgagattgtggtttggcagctgcagtttgatagccccattctgagactggatccctctcttccctcatctggtagttttcacgtcggggcattcctgaactccgtctgcctcgtttcaggctgggatcacagatcaggagcgaaggctttatgatattaactagtcaacagatacattctttgaagaatttctgtgtttttaattaccccacgaaagcctttggacgcacgggttatgaggggcattttgcattgctaaattccagccttgattgcaaacctgaaaagagcagaaactgctcagaacaagttgttaaaaccacagacacaagggaaaggtttctctctctccctccccctctctctgtccctgtttttaagtcctttcagctggaggtgaaactgcaacgttatcaaacatgccagtacacactgtttcccaggcctgtttttgcatgagttggggtagaaatgtacccagcttctgttccagtaggtggagaaagatgcttaaatcctagaagcactgttcacctacctttttagggtactgcaggtttagctcgagggttggagggcatccagaaaagcatgactaagagagaaaaagactactcccaaagctaacagggtggagtatcatagccaggacaggaaaattcccagcagggaaacggcctgtctgtaatgcagacacattgggtcataggtttgctttcacagaataagtgaaatggaacaaaagtcttttttgaattctcattccaagaggcccagtttctgcaggtgtgtcttttcgatcttaccttgtattcagtattatttcaagcaatctccattttaggcagtgtctactccagaccaaaaaacctggctaagaaagaaattttgttgattttgagacagggtctttctctgtcgcccaggctggagtgcagtggtgtggtctcagctcactgcagcttcaacctcctgggcttcagcgatcctcccacctcagcctccctagcagctgagaccacagatgcctgccaccacacccggtgaatctttaaattatttgtagagacagggtttccctgtgttgccccaggctggtctcaaaccactcctgggctcaagtgatccccctgcgtcgacctcccaaagtactgggatcacaggcgtgagccaccgcaggcctcccagactctgggtcagagggcagcttgagctcctccaccgactgctccaagcctttgccccagctcttggtgcctggggtggtgggagcagcatgggcttcgctgcacacggacctgggcccagatcttggttccatcggctgctgggagatcagttcccttctctgcacctccattcagcttggacgggaatctgtccttcctagaacagctgtgattaataactgagaccacacccatgttcgttgtggcttagcgccatgcacacaggtacctagtggatgttaactttcctctccatcctggtcagtgctttttttttttttttttttttttttactttttctttttctgtttttgagatggagtctcgctctgtcacccaggctggagtgctgt

SEQ ID NO: 49310 - DNA, 1976 bp, Homo sapiens
aaaatacaaaaattagctaggcgtggtagcatatgcctgtattcccagctactcagtagacttgaggattgcttgagacctggaaggttggagctgcagtgagccgtgattgcgccactgcactccagcctgggtgacagagcgagaccctgtttcagtaataaataaattaaaagtacagattctcgggtctactccagacctgctgaatcagaaaatacgcgggcaggcccagccgcctgtgccttcaccagctctcctggttaaggcctgagaaccctgctacggaaccccgagtacctttcagaacatgttgacctcattcgcagggatcagtggccctttgtcatctggtctctggccagtgtccctccctcatctggtggacttggtactgatgccgaaccacctgtgggttccaaacgtgccattgtttctcccacccacgcatttgcacaaatgtggtcctgtgtggctcactcccttttctgccgccaccttctcccccactgcgccatgctggtctcagctcggggcttacctggtcccagaggtgtgttgggaggtccccaccccttgcctctgcccgttgccttttccacccctgcactgggtgtgcataggtgcgcagggcacgtgtgtgtcctctgcggtcactgacttgattgtctgcctttcccaggaggacatgggctctgtcgggacattttatccgtctgtttacaacatgaaatagacacctccgaaatgtgtgtgtgttccgtaaatgaaggagcagagggaccccttcggagcatctcagaggccaggaagcctggcttctggccgccctgcccgctcctcacgtgtgaggggaactggggaagtcgagtcagcccgctggggttcctgattctctgcggttctgggaagagcttgcagtggaaggcctcccagccatttcctcttctcccccaactgtgactcactgattgattaatgtttggaaattgtgactcatcttgttagagaaggaaaaggaaattttattctcttcattctccctccctttcaaataagtaataaataaaaagtggctgatcttccacttggtgcggtaagaagcatttaaatacattcccggccctcataattggtggcttcttggagaaaggtacttattagaagaaaaacacttccctatgtgttgttgttcggccttctcgttgatgaaattacacggtgagttggtgagcgaatttaccttgcccctttttaaaggtatttgtggcagctcttgttgtaggaatcaggggagaggagccacttctcttttagtaagaaatgcgaagagtggcctctccatcttcagagtttcaaaatgagttcactctggtggtgagtaatgatgtcttaagctggcttattaaaggcggaggaataagatgttcttgctttacctcacgtaccaaatatagataaggcgctggatcagcagagcctcaggcccgtgccaggacacagtcgggcctggcgatgtctgttttgtctcacgactggagggttgaaggggaagcacagcctttgcttttaagggttttcttctgggaaatccacaaaaaaaaaaaaagcatttgttcacttctcacgttgtgatgttgaaattatggcttggagttttacatttgccttttaattctctttatgggcagcatgtctgtatgtcttaggctcttggttctggaagaccaagtaaattcagtatcttttcaaattgtaaccctctggtctgggtaacacagcaagacccccatctctacaaaaaaaatttttttaagtcagccaggcatggtggtgcacacctgtagtcccagctactcaggaggctgagacgggaggatcacctgagacacgagtttatgtgtctgagacgcctgagacaggagtttatgaccatcctgggcaacataacaagagcccatctctatgacaaaatg

SEQ ID NO: 49311 - DNA, 1259 bp, Homo sapiens
ctctcagccacaccagctttctcattccatgacctcatctgacttgtctccttcccctctgaatctgagcccttgttaagcctttttttgttttttctttgagacagagtctcactctgtcacccaggctagagggcattggtgcagtctcagctcactgcagcctctgcctccgcggtttaagcgatcctcccacctcagcctcctgagtaacctggactacaggcatgcaccaccacgcccagcttatttttatattttgagtagagatggggtttcgtcatgctggccaggctggtctcaaactcctgacctcaggtgatccacttgcctcagcctcccaaagtgctgggattacaggtgtgagccagcgtgcccagccatagctattcttccattcattccctcatgcaccctttccatgtcttttgagtccccactgtgtgccaggccccatggtcgttttccctggaccctgctgggatcatagtaatcttcccccatcattctttacgccttccacactcttttcccttgttaccctttgtgttatatgttgtcctctacctttctgaaaagcacagtgggtgaaatgcggtgatgtgttagcttcctgttgctgctgtcgcaacctgccatgcgccgagtggcttaaaacaacagaaatttatcatgtgacagtgctcgagttcaggagtccaaagtgggatggattccccaggctggaatcaaggtgtcagccagagttgtgttcctattagaagctctgggggagaatcagtttcctggcagtttccagcctctcgcgctgccggcattcctatagcattccgacctctgcgtcggtcctcagatctcctctgactctgagcctcctgcctgtctcttactaggagcactgggattacactgggcccacctggataatccagggtcatctcctgactcatgatccctgacataatcccatctgcaaaagccccttttaccattgcaatctaacacattcacaggcgccagctatgaggacgtggttatctctggcggactattattggtgctgaccacagatagccttatttatataaaaagagattggtggccaggcatggtggctcacgcctgtaatccacagcacttcaggagaccaaggcaggcatatcgcttgaacctgggagttcaagaccagcctgggcaacatagtgaaatcctgtctctacgaaaaatacaaaaactagccgggtgtggtggcgcatgcc

SEQ ID NO: 49312 - DNA, 1529 bp, Homo sapiens
atcctccgcctcccgggttcaagcgattctcctgcctcagtctcccaagtaactggaattgcaggcatctgccaccacacccagctaatttttgtatttttagtagagacgaggtttcaccatgttggccaggctggtctcgaactcccagactcaagtgatctgcccgccttggcctcctgaagtgctgggatgacaggtgtgagcagctgggatggatactttgtttacatactgttctggactatttcacaatgatttcctgagtgttatcttgtttgccctttcctgaagtcactggggcagcttttattgtgctcattgcatggatgaggaagcagtcccaggaacacgcagattcaggccctggacctggtcctttaggctcaaattccagtgctttttgcttgagaccacggcggtcttcaaagcccctttctggtgccagctttgtaatcaagcagcaaaggtgagggctagtcaggtgaaggcaggcgttcctggggggttcagcctttcccagcctcacaagcccccgttgtatttaccatagcagattgatttttccctttttgaacaataattcctcatgaaagactcacagaactggggccaggtagagcccggttgagtaaacctgagaatcacccagctgtcttgaccatcatatttagacaaatattgcatcccctgattgaatttgaaagggacaacttaagcatcctgaaaacagagtctgtctgctgtacctttaagaatgtaaaattttctatttcctgtctttttgatgagtcatcagtttccagtacgagttgctgtaattaccctggttggattaatttccctaaaaatagagaagcagccacttttatggttttcagagtatggacttgaataaagaacctcctgtcctttaaaccttagagagcactaaatcagacttgcagggaaaaaccgatggccttttttttttttcttcctgtgtcttatctccaaaaggggcttgtggattttgtagaattcttgggatttttcatctctgtacaagtattttgctccacacctaaaaattgatgcctgggtgagccctgaaggattttccttgtcttttgtagtaacaccagctgtcttggccccctctgaatagtacaaccatgacctggtgtctccccaggttgggggctagacaaaaacaagggggtggcttcatagttccaagtccaggtagaaattcctctgagcgctgacgattctttgccagttctgtggcccccagacatggctaggaaatgtaattgacatgtaatagacatgtctattgcaaagcatcagtgagaattgccaaactttactcctctccttcattgatgtttagggaagggctgctttactgtggtaggtgtggtgtcaggtgctggaacgatagagtaaggacagggtgggagggggcttacagacgtcacatgcacacacacaggctcacacactctgtactcaaaaacacgtacacataaatagagaggcagccg

SEQ ID NO: 49313 - DNA, 853 bp, Homo sapiens
atttcacatagaggatgtaagccacagagagaacaagccagccctctgtcgtctccctgccccggatggggagaggtgccttctgttctgtacactttatggggtcaaacgctggcccctctgatcccagtctccacttccacctaataagtcctgttcattcaagtactcccgtcaggccttccaggttatcactgatcctaatttgtatctttacaagcggtggccctctaaaccagcagcggaatggccctcagagaagtgagcctttctttctaagctcctgacaagcattgccaactcaatgcggctgtgctctccatagcgaaatgccctctgatcagcctgtgaagcgggctgcctgcccctgcctgggagaagaaaaggtatcaggaaaggggttttgatccacttccagttactttatttagcaaaggcagcctagactgcaaaagcagactttggaattggaatcggccggcctctcagaaaagcagagctgggcagctccctctcctctgtcctgctgtgattgtgggttgcctgccccgttttctcagcgagacctgataaccttgctaattgtggaaggagacgcaggttgccctctgatttgaggttgtacaagagaggtctcctgtttgctgtttggcctcctgagctctggcttagagatttcactgcctctgagaaacaccacaggtgttagcgtgacctcagcacatacaaagcctgaaggcttttttttttcctttttttttttttttttgagacaacggtctctctctctgttgcccaggctggagtgcagtggtgcaatcatagctcactgcagtctcaacctcctgggctc

SEQ ID NO: 49314 - DNA, 962 bp, Homo sapiens
tgagccaagattacactactgcgctccagcctgggtgacagagcaagactccatctcaaaaaaataataataataaagagaaatgtcattggttgtgtgtacggagaatgcaagagcaatgccaactccctggccaatggagagtattataagtctggttgaagatatatttctaccacatgtttgctgtaagctaggatgtcaccagcccaaccctgagcctttaaactcctgtgtctgattttaaccttgacacgtacttgtcccttcagatccctggctctcggtgacaatacctgtcttgcttctgttttctctctaggccagcgcttatttggggagaccatcttagggctcacccaaggctctgtctctgacctccttgcccgccccaaaccctggcataagctcagtctgaaaggacgagagcccttcgtccggatgcagctgtggctgaacgaccccaacaatgtggagaagctgatggacatgaaacggatggagaagaaaggtaagtctccctgccccgcccgggccggctgcgtccgcattcatagacaggctgtttctttcaaatctttcacacacagctgatgagggacattgacccatgaccaagggaccagaggacagggcaaaaatatttttggatggtcatcagctaatgagtacctaagagggctggaaagttgtgtaactttttctctccagcagcctgaatctaaagatttttttagcactgggagcacttttaaccaaggagagcgaaacagctctgggggcgctgcatttggtttttgtgttgtgtgggtggctgatcgggctatcacagcatttactgagcatgtaccaggtggctagaggccttcctttgttatcagagagagaaataagaaatgcattttgtaggcagggcacggcggctcacgcctgtaatctcagcactttgggaggctgaggca

SEQ ID NO: 49315 - DNA, 1034 bp, Homo sapiens
ctccaatcctcacagagacccaattgaccaaaaaagaaaaaaggaaaaaaaaaaagtcgtcttttttttttttttttgtacaaatcgctttgagatgcctctggtgtgttgctgtgtgacatctctctggtaacattttatttcttgctatttgtttttctacattaagagtcaaagttgacctggctggcgtgggggtgggggaggcacccgtcggccccttggtgttgtccctctgtctttggttagccatacgatgtttgttctcagcactgtacaacggtccctatataatacggagaagcaatatcactgtatgagactcacaccatgtattattattcactagcaccctaggtgtgataattgaagtaaatatcttttatacaaacacaagaatgtgtgggttgtttttatttaaagtgctctggcctgaggacgagcagcaaacactgtcattcgaggtccaaagggcacctcaagaatcgccgttcccgaggtcgtcccctttgcacctgtccgcaggtcctcgggcgtgtggcttccgggcacacagaaaaccgtgtggttctaggatacatggggatctcgggcactgctctgtcaatctgcatctggttcacaggaagggcttcgccagggcctgcgttcctacttgctgttgtcaccagcactgtttgcctacccttgaaccaagcccttaccctccctggcgtccgcttccttttctgtaaaatggagacaccatctcctgtcatataggcttgctgtggggaaccaggaatggtggccagtgctggtgcggcactgggctggtggtggcagccccaatcgatggcacttgggcgaccaggactacggccagtctcctctgccgtgtggcctgcagctggtcagtggcgtggcctcagccttctgtgtgggggtctcactgtgcccctgactcctgatgtaacagaaagacaagtgaaaggcaccagttaatgcttgcgagtgggacagtggcttgcgggtctctggaatgacggggctac

SEQ ID NO: 49316 - DNA, 523 bp, Homo sapiens
gcccctctatgatctctgacacctctccgggtggcatcaggcccccatcacagcgaaggctgggtggtgggggcactgcgctcaggggggccgtcccgccctgtggcccgggggcgatttcccgcaccggagggctgcagggagggggcgtggtggcgccctcgagatttatgagaaccaggcgtcgacttcctccgttgcgacatccaggcctcctccaggctcccattgtccctgctgcggagagtctggccacagcggcggctcccgcgaagcacccgtcagcgaggggcgcttcgagggcgtccgcgtcccatacacccgccacgcaggacattcccccggccccacgctccgcgctcccggggccaccaccaccgcgggctcgaggggtggcctccacgaggaggagtgggagtcccgcgcctggcctggggccggctcggcgacatggggacccccgcccagatggggcgactcggagccggctcctaacccctctctccgggccccaggaccgggc

SEQ ID NO: 49317 - DNA, 2008 bp, Homo sapiens
gctgaggtgggaggagtgcctgaacccgggagttcaaggcagcagtgacctatgatcgagcccctgcactccagcctgggcaaccaagcgagaccctgtctctaaaaaaaaaaaaaaagttatagaagcataatcattaatcccgtcagagattatgtacaggaagaggcaggggctaggatcattgaacttgtcttttctaaaaatgcagtgttcaggcaagagaggtggaaacctgtgttctctctcgctcttcccagcttattgttcagggcgttattggagagggctgcgctcagtcaccgagtcacggcctttgtgaaatcctgctcgcaagcagaatgagcagacatggttccttaggtttattactgtgcctcacactacgagacggtcattcattggcagaggtgtatttgcggggggccaggtatagagtaattcaaggcggacaaaggaggaatgtcccagtcttcaggaagctcagtgacatgtttgcgctgtcttatgtaaacaggagattgtcagaaatggaggagggggcaccagatccaaggaagtgcccggacaaagccgggaggcgaggagagccgacggggaggaggtgccgagagcatcagcggggctgctcggtggcacgaagacgcccgcggggactggagaggtcggctagggccaggctactcaggcacggagggccacctccccttcagggacgtgagcatctagctgcactgatttgttgttcaggaacaggaaatgaaaccccgcagctttgaacacaataacccacgccagcctcaggctcatgaatattcagcaggctgcttgcgccttgcaaccccgcctccgttcccctctgcggagactgcgtatgcgtcgccggcgcgcggctgtgtcgtcatacttgcgcgccgacgccgccgctcgcttgtgaaactggaaggctgccatggctagcccagccgcctcctcggtgcgaccaccgaggcccaagaaagagccgcagacgctcgtcatccccaagaatgcggcggaggagcagaagctcaagctggagcggctcatgaagaacccggtgagacgaggcccaggctccacggcccgtccgaggcccacccccttcctctgcagcgcttcagggttcccgcaggtccaccttccccgcctccaaactcagaaactcagtatccgaccctccaagagcagtctttggggaggaggaggagaaggaggctgtcccggagatagtgaacttcccgtctgtccttgtgtgagagcccagcttgaatcaaagcacggtggagcggcttcccgtgctccaagaccccttctggtttaactttctgtgaacaaaaagcgttagactgaaaaggtagaatttgtgggttagcaaaagggtatactctaaacaacactgatcgttagagagacagtggccgagacgtttggagctggtcactcctctcccgctcacaccccctctgggcctcggtcccctcaatcataaaaacaattgaacgggaacgtcctttatacctttaactagaaaagcttgactcttcttatctagtagtgttaaagttggcggtttctagctggaaactatggcttaggtttttcagttctgctctggaaagcgtagccctgggaaggtgtggactgtgttatacccaagagtacataggatgaaaaaagccacgacagagggaagaacacaaaatcagctctgtgtccaagtagcaaagcagtcctgcttcattagtcaattaaaattctttggtcttaagagatgtaacttgggctgggtgctgtggcccctgcctgtaatttcagcgctttgggaggccaggcgggaggatggtccgaggccaggaaggagttcaagaccagcctgggcaacatagtgggtccctgtctttacaaaaataaaaaaattgcctggtgtggtggtgtacgcctgagagtcctaactattctggagactgaaccgggaggatcacttgag

SEQ ID NO: 49318 - DNA, 1571 bp, Homo sapiens
cttgcaaccaaccacagtccttccatgccagcccaaaggcgctgagttctttttctttttttatttattttctttttgtgagacagagtctcgctctgtcgcccaggctgaagtgaggtggctcgatcatagctcactgcagcctccagctcctgggttgcagcgatccttgagttccttttcgttagttaactggaattcactgtctccttgcccattgcagtccacggccttcaggcaccgttggactggtattcagcaccctcgatcgaccctttccgtgtcatctccctgcaggcccgtgaagctcccagcgccagacccgagaggctacgtcgaggtttacaggcagatccccccagagtccccgaggtgacctgtaatcgaacccacccacgttccagctccttccccactcccaagcccgctccttaaagccctcatctcctcaccctgcatcacccctaccgtaagggtccctcacaggcttcgatcccggcccctatcatggccaagctggacctcagtttccccagatgcagagcgacgtttgtgggcgcggcccctctcccaccccttaccgctgggggcagctcccagggcgggtcactgccgcgctgccgctcgcagatcagacaggtccggatgcccttgcaaccgcattcccgaaggacttcgggggtctcggcggcagccgccgccatcgcgccgtccgcgtggccagtgcgcaggcgcggccgtgggggccgctgggagttgtagtccgcgccgggcgggggcacgaggcctgggttccgcttccttccggtcgttaacgcccacgggctcgcgcggcgccgcctcctgggctcagttaccgcggacgccagtgccgggctccaggagacgcagggcgacgccacacgccggggtggccgactgggtcagcgcgggctgcgcctcctcgccatgggccccctctcggcgcggctgctaatgcagcgcgggcgccccaagagcgaccggctggggaagatccggagtctggagtaagagccgggcagcgggtgaggctgtgtcctcggggccgggcggtcggggagaagagcggggaccctccccaacggcccgcttgtccccgttatcgccctctgggttcggcagagtggtccaaatgtcttcttgttgggagatcgtggccccacccgctcgccgggagccccgaggggcctcatcccctgaagggagcccggacagttaggggcacagcctgccgctatcgttagagggcctgggaagcacagacgagcccccgaaggatcaggaagagcatcctagagggggctaggatgcccccgagtcctaaagtagttgcagcttttttttttttttttttttttttttttttttttttgttaagtggtgtggagtcgggagtagtggcgcgcgcttctagtcccagctactcgagaggctgaggcgggaggatccctcagcccaggagttggaggcagctgtgagctatgatcgcgcctaggcgactgagtgacaccccgtctctaaaaataaagtaacggggggatgggcggggc

SEQ ID NO: 49319 - DNA, 1223 bp, Homo sapiens
ggtctgggtctgatgctctgttcccccttgcccactggcagccagctgctcacactggacaccacctctatccccctgcgcctctgccctgtcgcctcctgcccggacgcccgcctgctggccggctgcgagggcggctgctgctgctgggacgtgcggctggaccagccccaaaagaggaggtgaggctgggcagggggcgccttggaagccaggcctctgcagagggtggctgttggcccagatgggctcacagcagcctgggcacacccgggtaaccataagggttgtttttagaggcctcttcgcagagctggcttgtcccacctttctgccaggctctggaggaaaggactctgaccctgctctcaccctgggttcagctgtgggactgggccatgatgacctccccttcacctggggcttcagcaccatgctgtgcccacgtgatccagcccactcctgccactcatcagcagtgtgatggtcctctgtgctggcataatgtcctcatctgtaaagaggggccgatggctagcggagggcaggtgaggtggtgtctgggcaggcaggctttggaagtgccacgttgaggctttctggctcatctgtcccacctggaaggcctctgagacagggcttggcaaggggtccctgtcctcttggggcccccagcctactggggaagacagatgctcagcaaaggtggccaatcaaaatcccacagtgtgatgccagctacgaaggagacggaaaaagagtaacgggcagagggacactagcgtgggggcctcaggggactctgctgaggtgaccagcggcagatggatattctggggctcacgctttcctccctgggagcctggtgagggagtcagcgggcggagggtggggaggtgcttgcatggaggaaatggtacgtgcaaaggtcagtggcaggggagccagctggcctgctccaccatgtggccacagctgggtggacccagcccagaacaaggtggcaagggtgcctgggcggggcacgccgggcttcgtcagccacggtaagctttgcatttctatttatttactttttatttgagatagagtctccctcttgtcacccaggctggagtacagtggctcgatctcggctcactgcaacctctgccgccaggttccaagtgatcctcctgcctcagcctcccgagtagctgggattacaggcgcacgccaccatg

SEQ ID NO: 49320 - DNA, 567 bp, Homo sapiens
ctaaaagcatttagctaatacaaggtagcctataataatactttgtacaatctttttaaaacttttcaaaataacgatgctttatcttaagtttttaatccttatttgaaacttgtgggatacaaaaagagaattaactccacgtgagagataagtaattgaggaaatagaaaggttaaaaggctgatctgatattgctgacaaggcttgtttgcggcagtcagaacagagttgtgttttctcttggactgtgtcaacatcagtgttacataatatcaaataatggtaaaaacccacagatgtgctcacttcggcagcacatatactaaaacctacggattaaagcttattaaaaactaatatgtagatatgcaattaataacccatacttcctagcataaaattgagggagcatcttttttggcatagcatagtttaagaattcctccgttgtgcaaatttgattaaagagatgtctttctgagacattgcagggacattctttctattcagatagttcttgtttctatttaatttgcccctgactaagtcaaatgttgagataag

SEQ ID NO: 49321 - DNA, 3780 bp, Homo sapiens
agggacacagctcaggaaggcacaccatcctttatgcagatgctcaagccaaaaatctggtgccatccttgattcactccctctcttccttatcctcacattcagttgagctctatctcattgtttcttcttcctcagtgtctcccaactgtgctgactttgctacatgcttactgccctctccctaacacaggcgttcataacttttcacctggatgactacttgataattggtcactatgcatctgtgattcccatatctgtctagcagatagaagtgagcttttcggaatataaatctgaccatgttactgttctaactgacaatactgaatgtccttccacggtccaaagagcagagttcaaattccttaatgtggcctctgggccctcagtgacctgacccctgtctacctctcaaacatcatctctcaccatacttctcgccaataagccatacccaaatgtgtaggtttcttgatatctcacacttttaaacctccatgcctttgtgcaggctgcttctttggctcacagaacacctttcttctctgggaaaagaatctctgagctaggttagctttcccctctctgtttttcacactcatcatactttgtaaccacttgccctactcctgtcttcccactagaatgtaagtactaggaagaggaatcatgtctgttttgttcattccagtattctcagcactgagcacaatgtagtcagagtaaatacttgttaactaaatgtgtagtgtgattctaactgaaaattcaccattaagaattgagaatgaacataattattagaaaacatgggaaattttctcccaaatggcacaactggtcacatttgatctttggtgggtatctgtaacattccagagtttaaatcctgaatgttacgtctgtagtcaaatttgcacttactcagacctataatcaatcaggctggtgtttagctgcccaagttgacatccgggctgactcattttaacttcactgtttgaggttagcttcctcagctgttgtagcactgtaattgtcaatcatttgccttttagttcagagtttaactgacttggaggaagaaaacaacagaagacttatttttttcaatcttttagcagaaaacaattagtatacttccccatagatatccatttacaattctcttaaattacatatatgcttcagaagaaaataaaaacagagactagaactcgaggccatactcctaagttttttgttttttgttttcttgagacaggatcttactctgttgcccaggtttcccaggctggagtacagtggtacaatcacagctcactgcagcctcaaccttctgggctcaagccatactcccacctgtcagcctcctgagtagctgggtctataggtgcacatcaccacacccggctaatttttgtatgttttgtagagatggggtttcatcatgttacccaggctggtctcaaattcttgggctcaagtgacccgcctgcctcagtctcccaaagtgctgggattacaggcatgagccatcgtgcctggcctatattcctaagtttttaacttgtcctctgtagataaaattttaatatacagtctttaaaaataaaacctgagctttcctcaaatgctaaaaactaaataaagcattttaacctttactccattcagtcaacaaatattcccccaggcacttcagccttgtggtaagtgctgtgggggaattatattttgatgtgttttataatgtgctttgattctctacttcttgtcactctgtgacccttcagacaacagctggcgattctgctcctatgtgtcaggaaaaggttcttacaaaagaacacaggataaaaatcctgggcctttaagcttcaaaagcccaagccctgaaagacttggggcataacatttttcaaaaccatgtaatcagttggaacattttttccacccccagattaggaaaagaatctatgtcaaaaggaaaggagcaaatatgagaaaaggggagagaagaggtggaggggaagaagatgagaagggagaggaggaaaggagaggacaggggaaaagaggaggggaggggagagccagagggaagcaaatgctgagaaattcatcatatggggggtctgttctagaccttctcactttctatccagctagagagaaagttggaacccccgggtaggcttgggggcctaagtagatgggaacccattccacctttcccagtagggttcataaaagcaataagacagagtgttcctgtgctcgtcattgtatcagttaagagtcaacgggaaaagcagaaacaaccctgagcatgcaaaactgaggagatttaattttaatgggggaatggctacataggtggtagagaaactgagaagccaaatgggacagtgacaaaatctagagcttagcagcagtaggaagccactactgtccctatgctggaaggacaatgggaagatatgatgttattgaagcccagaggccgacttcattcagggaagctggaaccacagcaggcctgtggttcagaggggagtagaacactaaggaaatgcagctgatgatgatgatgcaaagaaaggtagaggaaaaccctggaatgtcccttctactggccctgtaatcactcagaaatgtctcacaagcaccaaccctaacatggaatctagttgacttgtgtgagtcaccctgtagcagagcaaggggagggtgagtcatgagtttgagggcaaacacattcatgatgtgggagcaagaaaatgtctccagcaggtgtctaggactgtggacctaagacagcctcacaggatctccatgacccaggaagacccagaggagcccagagcaaggcagacacgacagggaaacctgaagacttgaaggggccttggagttggaacaaggaagagacatcagggatccacctggacgggaaactaaacaccaaatgggccctcgtacatctcagtgaattccagcttggacagaagacaacattgagaagaccagacactgaccctgccataatgagttgactccatggtactgcttcctacccacaatctcacatcactcatggacgatatggaagggaagaggaggtcatctagcagaaaggaggctgaatccaagttcattcatagataaagaaaggaaagaacctagaccaatgaacagatctagtccttcatttaaaagaccccaccgaatgttgacgaaggataaacacataacagatgtctgcaatgcagtgagaaatagaaacggttcatgttaaaggatacactggggctggagatgcaagcagagaaattccagtgcttgcctgcaaggtagggcttctcagagaaggccctcatagacagttgatatttcagggatgaatagggatttagcaagcagatggaggagggatccttacctccctatatcttcctatatccctcctatataggaaggatataggatataagatattgtcttcctatatccctccaaatgcatgattttcaagagaagtccatatattccttgtataactatagcccatagttctttcagaaacatggcaaatctctcagggttatcctccttttgattagtaaatggggcagtcccagagggataagatggatgtggcctgagtctcaaccctgatgaatacaatcagcagcttgcaggaaatgaattccatatccttttgtagatttgttgaggccatttctagagtttagtcttgaactaaagact

SEQ ID NO: 49322 - DNA, 2778 bp, Homo sapiens
gaaagtgaaattacatgctaaaaagaaaaaaatatgcagtagggggtaaaagagagaagtcaaagatatttccaaattctggccaagtcagctgagtagatgatagtgccattcattgagaaacaggatacaagagacagggttggacaggatatgggggaaaaggaaggttggaggaagaaaatgatgagttctgttttggtaatgatgaattggcttgtgcctttggaacacccaggtagagactgtttaaagcagtttttgagtgtcacagtgggcaggtgggaggtagtgtcaagaagtctgccaacacataacaggagaaaaatagaatacttagcagcattgagaaatgatttataggaaaggagtgagtcaaacacatttttagacatgaaggaataaatcaatagaaagaaagaaatttaagatcataggaccagggaaggcatgggaaagagcaagttggcagttctctcctgtttaatgttaccttgtagtgcaataaaaggagggctgtctttggaacataaaacacggactcttgagttaattgataaattgcttcaatgcaaatcacaagccacctgaaacagatggtaaactgctaaaataaattaggttccaccaaccattccaatggaacattgtatgatatggaaagaaaaatacttaacaagacaggaagcatgagtcaggaataagtggtgcgcagtgtgagtcatgcctgtaagatcaataaagaagctggctctgctcctgactgcattacttctgagcctcctacccctccagtcacccagtctcaatgctgccctatcaccctcctcactcattctttcactccagatactatgggtcccagaattctgttaatgctttggttctcacatgggtccttttttttaatttcccactgatactatcctaatgctcttagagaaatctgtctacctccagacttcatccaacccccttgacccacccaaggcagggggagggtgagggaagaacagtgaagggagaaaaagaacagctttataagtctgccatcatgttactggcttgcagtggtccctcactgcctactggttaaaacccatctcctaagtggatactcaaggcctcaacaacgcagacccaacccacctttccaaacacatcttgttactgtcaacttaaattctctatcatctcctttttacaaatgagacaatttagaaacagaaacattaagcagcatgcccagccacagctgtcacacagctagtgacagaagcggccacccagactccagggcacattctccccatttccatgtggctgcctcttactggggtatagttttttgtctttcatatgctagatcattttgcaagggtggtcctgctaaaattaatagaactgcttctgcaatttaaaagtcatgaaaactttagatcaaaatcacttgtaaactttttccctttttgggagggggatggggtctcactctgtcacccaggctggagtacagtggcacagtcacagctcactgcagcctcaacctctccagacttaagcaatcctcccacctcagcccatcgagtagctgggactacaagacatacgccagcacatctggctaatttttgtatttttcatagagacacagttttgccatgttgctcaggtttctctggaacttctggaccccagcgatccacctgcctgtgcctccaaaagtgctgggattacaggcatgagccaccacgcccagcctgtaaacactttaacagagacagcgattaagactaaagtgatgaaagtgaggtctatgggtagagcaatgttccaccaaaaatcaactgttcccaaagtgacttctagatgttttgtttcatttgctttttcacccacaccacaacttgagccaatatccacatacttccttgatagagcaatgtggttgtggaacctttccttatctgaagttcacacagtacacagctatgaaacctggaaccactgtctgcattggtgaaatgaggtcagactgacccctgaggttatcaaaacatagatctgaaaagtcactgggaatattcttttgttttacaagtaattctaagtaatttaatcaaacaggcctgaaccatctggctcttttacaacatggtactagttttaatagctatccatgtttcttttcttccccaagtgagaaaatgagtcatcaacacagtaaaatctgaaggtgattttataaccgtttgcaagtccacatgacatatatcttttacaaacaagaagtcatagttgtttaaaatgaagacaaccctaaagcaacacttacattattaaactaatcaagtaattttacattttaagaaactgcattacttaactattttagagtttccaaattcatcagcataaggcttttctctgtgttgcttgccaaactacacagaaggaaaaaaaaaaaccaaacttgtattttcacggaaaacagtctttgccaaccctcccactagctctaagtttggccaacagtttgactgatagtgtatgagccctaccatctgctaactaagcagcatttcctaacgggtaaatgatactaagaaaaatggttgcaaaacagaacctgacttgttttcatgagttgatgtaactgaacctaaaatgcaagactacagtttgttatgtgtattctaagaaagttcaaattgtatcccaatccaaattgctggtttcaattattccttcaaaacattaaacagcctgtatataaaa

SEQ ID NO: 49323 - DNA, 2111 bp, Homo sapiens
caaacctacaaaacctaatgtctatccccttcctgtcttccttccctactcttataacggcagtaggagggcagtccttcctgttgtctaaaggcaatcctggttgagagggtccttaccttcacaaagggctgactacactgaccaaaggtctcagcttccactcttccctccgctaacctccatctattttctgccctcacggctccatggaaacctcaggctcaccttgggcagaatccagctccttatcttaggtgactagtgcctactccctacttctgacaacattcttcataatgccagtctgctgattttcctcctcaggctctctggcacttctttctcactcctccactcctcaggtacttcttgtccaaaccttaaaatctgagtttggggtttccgatctgggccttgtgctcattccccctgggagatgtcacccattccccacgtgcagccaccatcaccctctgttttctctctaatcagcgtcttcagccctgatcgcctacaagtccgaatttgacttcactttctcgcattctgccccgccttccctccactcctccccaatcccgaaacctagtccctcctccgggaagtctttcctgactcctcccccttctaactccccaccgacggtctgtgtccgctgccacgcgtgtccagtacctcgcagacctgaggaatgtagttctccttgaagtagttcttcagcctcgggttggcattgcgtagcgaggccatggcccaaggcctgacggagaagctgcgatagtaccctccccgcgctgggactaggggccgggcgcgtgcgggcgttgtcccggcaaccagggggcggggctgggcgtggcaccgccccgcgctccgctgccaggggcgggagggaggaatggttgcttcacgccccgggggaagagacgggaagctcggctctgggttgcgggccccggcgtctccgcgtggggcgcaccgtccgacccccccctcccggtgtgcagcgccccgcaccgccccgcctcgcctgggagaagccgccgggacgcgccgggctggagtgggcggttataggctttgagctaggccgtttccgggaggcggagctcagaccccatttcctttctccacatccaggtcaggtggcgtttgctgtggcggctaggcccgcgtgcgctggagacctccgcgctggcccccgcgagcctcctgccctggcccggcgctgcggctctgccgcggcggcagcatgggtggcccccggggcgcgggctgggtggcggcgggcctgctgctcggcgcgggcgcctgctactgcatttacaggctgacccggggtcggcggcggggcgaccgcgagctcgggatacgctcttcgaagtccgcaggtgggaccccggggtttccggcaggtgggcggggactgggcaggggggctccccaggccggggtggtggcttgcgtgtgctcggggtaaaatgaggagccgagctagagggagaggcagtacttgtgtgagtgcagggtgctgcgccgcccccgccgcccctttgctgactatactggtatgaaaacttgccctggctttcctgcctgagctccgcgtcacagcggaggattagatttcttaaaaacctgttgatggcctctcattttaaagcttgctccgggcctttgtgtaactaaagggattctcccgattgtggaagggctgttgaggggcccagagccataggtcaatctctgcttgcaggtgccctggaagaagggacgtcagagggtcagttgtgcgggcgctcggcccggcctcagacgggaggtacctgggagtcacagtggtccaagacctcgcagcctggtgtgtgttttggaaatgggaacagttgtctgcgcgagacacaccctcccagcggacaaatgcatgattcggtttctgtccaaaagttgatcggtacattaaaaccctccaaaggcatgtttcacatcatggaagctgttagggaaataatttaaaatatcatatctgccatccaagaaactcctgtccacaattgtagaagagagctaaacagcttcattgttgaataagcacaaactaaattgcc

SEQ ID NO: 49324 - DNA, 421 bp, Homo sapiens
tggaatatgtgcatacacgcacacatatatagatggaataagaaattgtcactgaaaaccagtcttaaacttctcccttctccaaatacgcacccacacacccacatttatattctcatttatcctccccacaaccctatggttagtcattattctattccttctcccaacagtggccaagaattgctgcattgtggctcagggttgctgcctcatggcacaggaattttgattagggagtgggggaatgggcaggcagtgtattaggtaattttggaacacactgcatctttgggagagggcaggccataagtgagacagaggagtaactaaaactgcaagaaaacactgagttcctgcagagaggctctgggatgtggaagatgccacagaaagtaaagaagccaagtcctaaccacac

SEQ ID NO: 49325 - DNA, 2139 bp, Homo sapiens
aatcagaattatcaagtagcaaacatttcatgctaagccaaagccaaccaggtgagtcagtcatattataacatgtatatataacaacgtacagtaaaggcaaagacaagaactaaatgactttttaaaaggctgttaaactttactcactcccttaatattttccaggtttaactgacgtataatgaatgcatgtgatcccggaacccatggaagagtatctaccatatcgagctctagcttgaaaaaaaaaaaaaaggaaaaaacaaacaaacaaaacaacaacaacaaaaacctatctgaatacgtgttctgaaaagcccacaataatacccaatttataagaagcaaacaaccacagaacagaaaactcaagaaagcacagccttccaccacccctccccagctagccccatttttttttttgctcttcatttccattccatagttaaataagtacacttattccaaaataaaaggggagaaacctgttggaatggatttttagaagataaacactatagatgaagcaacaataagttgctcggaggaagttgtcgacccattcatttacatacaaccaaaagaagataaacccacatgtattcctatcagtgaagatgcaacctggtaatttgcagggaagataggatctcaaatcccagacagctactctcccaaagagaaaaaaaataatgctgtggctcttcaccgaggcagcttcagagatgcaggctccgcaactcgcgaggtgcgaaaattcaaatgaagccctgtcgctcacaagtgcggcatctccgagatgagggagggctcggggacgggaaacccactctcagcccgctccacttcgccgaagaattccaaaccaccccaggctcagcagtgtggattgctccgcccagagaccgtggaggaggcagcagagaggtcacagagcacagcaggcgggagaaaaccgcctcccgcgaggtccaacagaaaccacggagctccggacactcgggatcccgggccgcgggcgcgcggccagagcggcggggtgcgagcgcgggggtgcggactcacctcgcgcttggggtggccgggagcgcgcgccgcctcagttccgcggcttccggccacagagtccccgcgcaaagcgccgccgcgtagcgggaggggcgaccgcggcaggcgctcgggttcttcctaacccgagcccgccgcgctggctccgccgaggacgccagcagctgcaggcagcgcttcagctctcgccgcctcgccatcgttggggcgagtcgtcgccgggtcactcccttattatgaccttcgaatctgacagcagggccagcggtggcctccttcaggctgcctctccagcccttaccaagatggccgcccctgtgggccggggcgccgaagccatcttggtaaaggaagcgcctgggagcacgcggcctgccccggcccgcctcgcgactcaaacactctgcagggaccctcctaagatcaaattggttccccccgctgtcctaagccagaggcttactttcagatcgcatgaacgcattcctggacaccagccacagttgctaaaactaaatgggatcctgcagacccattgacggactgtcatagccaactcaatcacagtcgagaagcatttgaatacttacagcctatggcgctaggatcctggtagcgaagaaactaaactctaatttgaaatgttgtacagtacgtattgaatattaatgggagcacggcattgttcactgtgtgatcgtttacttttaaaatgatgtcacagccccctggtacacacggttctcatctaaatttgcatcttttttaacgctaggataactatgaaagagcatacgattgtgattctgagtttcttactggatttgctttttaaactgcagaatgaaattagttgtttcaagaagtaaagtacaggcatgtcgaagtaaaattcaacaatgggttgttgggcaaaaagattataaaagtcctggggtgtgccagggtcaaaaaaaaaaaaaaaagcttgtccctggggttatcttggcaaaaaagaaaccaccaccacaggttctaaatgcagataagactggcagaaaaatgcagaccaaactattctgcattttg

SEQ ID NO: 49326 - DNA, 1289 bp, Homo sapiens
gccatattgtagaggttcgaagagtggatagtggtcaacacggatacatcgtttcctcccctcacggcatctgtctctcccactagacttttcctttaaaggcagtgacttatgaatattattccactgttttcaatcaattccatccaccagtgagatatattgcatcaggttacctttcattccaccgcatttgtgccttgcacttagtaggcgatcgataaaataactgatgataaaggggcttctgcagactccccaattcatttggtaaagaccgctcagcatcatggtcgggccctgattgctttcacaaccgcttcgaggagtgtcattcccatcacggccacaaggtggagcccacctccctgctctgggacctcaggtcgcgaccccggaagcacatccttcatcctctaccttccttctagcagaaatggcggctgcggcggctcgagtggtgttgtcatccgcggcgcggcggcggctctggggtttcagcgagagtcttctaatccgaggcgctgcgggacgggtgagcttccctccaggccggtcctgtcctcgagatctcgccagacccggcgcagcgcacctgagagtcggcgccacagatccgaacagtgggtcgggcagggcctcctcgacccggacccgccgggcgccaggcggcctggggctgctgaactggccgggggtgactggcttgtggccacccgccaggagacctgctagtgacgtgtgggatgaccctggttttcggctcctcccgccagctactgaggagtgcatgtttgaccactaaaaacgtagtgcttgcaaattggggaaaactaaaaagtgaaatgggtaccgctccagagttctatttttgcctaagactgaacttcgtcctcagctgggcttcccgcgaacctggacatcaatgaagtaaaattttttatgtatttgcatttttctcatgagagagcctctgactttaagcaaagggatgtgagacttttgtataagggcaaagaaaaactgctgaaaggcgaatagtttctggccgaaaagccagtcatttgcattttgaacatcgacccatcttcctatcctctctctctttttttttttaaccatttccaaaccctgttgcttttcttgaacaatgaaaacccgagtgtcagttttgtcttgtgtgtaggtagttttacatagtttccctctctttttttttttcctgcttgttttctccataatgaatataaaacatttctaggagaggtagtgaaataaagtcaatttct

SEQ ID NO: 49327 - DNA, 2000 bp, Homo sapiens
gctatgtgacctgaaatgaatcaggatgtcttcacctgtaaaatgggaacaatacctatttatctcattcagttcctaggaagcttgaatgagaccacagaaactctctgaaattacaaacttgtagtaaaggtatcatctattcctgggaagtgggggtaaatcactgtacatgtgtatactagcaattcaaaaaaggaaaatccctgaacaacttattttaagatttcctccaccttacacaggagaggattaaaacactgtcaaaaaggtactacctgtgtagtatgggtgtgtggcttttaagaacactgccttttaagccttttgctctagttgtaagaggcacacggagacacataaatgcaacacgtgccatgggttatgttcaaaatcacattcaacaagcgcctatgtgactggctatgggaattactgtagatcactggacctgaagactcttaagtttacaatactcatgactgtcctgggccataaaactaaaacctacagcagcaggacaagtttcacttgtaataactgcctttcaaagtctacgcggatcttttcagcagcacagtctttgaacaccgagtatgaggagcggtgtctgagttgtgacatttaaaaaacaaggccggagcaaacgtagagagggagaaagttgtttaagagagcgccagtagcaaagctttgtacgaccccaggcacgtggggtgctcgctgcgcgtagtctttccaccgtaggcaaggagatgcttatgagaacctttctggggtgctggggggttccgtcccgaaatgctcagcccaatccatgagtcagcagcggcgagaggaggaagcaacggtaggagcaaaaggaaggcacccctcaccctccttccttctaatctagggtaggattactttaaaacacggagcaaaaaggcactcgtcacggccccatacggccccggggctagtcgccagggtcaagggtagagagagcccagggttgccgaggcggaggactgaggcaggggcagctgaggtgagaaggaaccgaggttgggtgggcacttaccagaggtcagagcgtgggtgatggcggtgccccggccgtccgcggcgcttggcagaagcagcatgatggcgccgggtctagcccggtgggcgcagcggctcacgtcccgggcggagggcgcttagggtcccctccagctctacctctcactccgagcctcgcgccttggctctaagacgcccaggaaccggcgcatggagacgaccagtaagcacttccgggatggatctttcgtggtgtggaggccagtctcacaccctcccacccccgccaacgtgtgcggtaacctagttctatactgactgagatccggctggagaccaagtcgcacgagagaatggttcctaggcgcatcagttttcctgtaaaaaggattatattccacgtcccagtgcaatacatagaacataacctttaaaagcagttctttttatattatctttaagttcttactgctttatgtattaatctgaacctaatcagtgattttcccaggagcgctatacttttaagtaaaaaatgaaaatacctgtatgaaccagtatcgacgactagtatatacatttgcggagaattacgtacgtgtatttgtgatacatttgtgtttaacttgatgatgataatagcagctaatatttgtcgtgctattactaatttacctgcattatatcttttaatactcgcttggagaagaaacctctctctagtgtgttagattgtattccaaggccagcaatatttttaccttgttctaatgaagtttttattcaagatattcccaattataggactctgggacttaattttttaatgtataataaaatcaattgtattcctactatatgcttccttctaagactgcagtcaaaagcaaaaactagcaaaaacaaacagtgggtaaaggctcacccccaacagcagtatctgaaacagg

SEQ ID NO: 49328 - DNA, 1345 bp, Homo sapiens
ggcatggtaattatttttaatttcctgaggaatcaatcatactgtttcccacagcagttgcaccattttatcattttacatttacatcaacagtgcaccaggattccattttatccagcagcacatgcaagggttggctggacccaagggtcatcctttccaacacttattttctgttttgtttttgcttgttttttaataatagctatcttaataggtatgtggtggcatccaactgtggttttgatttgcatttcctaacagtgatgttgtccatttgtatatcttctttggagcaatgtttattcaggttatttgcccacttaaaaaatcaggttgttttcttgtgtggtaggagttctttatatattctggatattaactctttaccagaaatagattaccttcactatatttgtagatgtggccactacttattgtgtctaatatgccaggcgttttacaaacactgtaaagtttccttctcacaggtaatcagtccaaaaaccagcgtgccaaagcgtttccccagggctctgtccggactctgaagcactgcataaaggggtctgtctgagcccaatttacttccggtggggaagggaaagggaagacaccaccggaagcaaggaaggtgctgtgtaatcattaaggagcggaggcttttggagctgctaaaatgccggattacctcggtgccgatcagcggaagaccaaagaggatgagaaggacgacaagcccatccgaggtcagttgacatgggccggagctcggagctggggcgggactggagcggagctgccttggcactggagaggagctggattcccgctcctggctctgtgctctggcccttttgtgcccctagtaatttagtctggacaccggccggattaacttgcctgccttctcagtctccctcatccactacaagttctgtattatctgctgatggaaatttttattcattctcagctctcgggtcttgaagaagtcacgcaccctgcttggcctaataggccttgaaaagttctgcctggcggtgctcggtcacctgatcctctttcctctcctcctccttccccctgtgacagccgggagctgtcactgtgtagccacaattctgagacataattttcttaaaaaaattatttgaccagataatacattcacagggttcacaattcaagaggcagaaaagatatctttgaaaagcctcgcatccttggccccagccaccaacttctccacagaggcaactaatgttgctattttgcatatctttttagacatattctatacatatacaagcaagtgtgcttatctattccttttttttaacac

SEQ ID NO: 49329 - DNA, 1112 bp, Homo sapiens
ctagtgggctcagcttcctactagggagaagagataacaagggaaagtggttcagggtggaggaaatgacagtggaaggaatgcatacgataacttggtgtcagagtttgcttcatgtcattgaaactcatgtcagtacttggtgccaaaacaaatcacaagaggataaataaaccagcatagcactagaccaggaatggcagaaacaatgatggaaattaggctcttttaacataaccattgatgggagcataaattgtgacatagaagagcatttggcaaaattatatggaatttttaaattggcattttgttcatctagtcaacaggctacatgagtgttatagctccctctcacgctaactagaaatcatcaaagggctccacttctaccaacttaaactttggtctacacctaaagtcaacattgtcatctctgccgggacattcacacccattccaatctgggcactcacctctgtgttctgtaaatcacagtcagcagagcaatgatcacagcagtgatcaaaccatagtccaatcccaggaacaaggaggacacaaaagtggtaagccagatggtctaagcaaaagacagaaaacttgatggagaaccatgttaaacatcccacaagagttaaacacacaagtgtgcacacacacacatgctacttttaccttgtctaactggatactgcacataacaactgcattaatttatctttctcacatttttcttagcactaatcatatctgctctatgacatattaacagagccatcacctttgttacttaccagctctattttgctggttctccagaaaaaggggagatctgagaactgcataaacattcccttcaggttgacaatcacaatggccgacagcacagcctgaaacagagcacatcccccatgcctctcctcttgtgtccacagagtgtcctttgctggttcctcactgtcctcctgctgtcctccccatgccttctccctactcacttcctatatggcaccgatggtagctttgaagccatgaacacctggattttcaggacctggttagctaaaaggggccttggaaaatcagtctttcttttttctttttttgag

SEQ ID NO: 49330 - DNA, 4529 bp, Homo sapiens
aactcagattaatttttatatcaataacaacagagatatactgagtctaaatatttatttggcagttttgagtgcttttcatacattaactcatttgaccagcaactctgtgatttaggtgacattattctccccatttgtattctccatatatcctggcttaaggctctatattcagtaggcattccttactgttttaattgaatgaagaggcttttacttgggataatgtacttctttgggctcactcaaatcaattccccatcatagtaatactgttttaattcattgattaataatatgctttgttccagaaaaaattaaagattaatcttatataaagacaattatataaaggaacttatataatgatgacttaatctcatataaatcaccaaatatggttaatttattataataaaatcaaaatatggtatgaaatacattgtgtcaaaaatggggaaaagggaaaaaacttaaattaggctggcatactaaatgtttattacaacttttttggaggagggcttaaggttttccaggaatcccttttgataaaatgagagccagtttgaattctaattatgtaaagaaaatgagctctgggcctttaaatagacaaaccagttcagagtgaaggtgaggttgtccttaaatgtgagactatattactttattttatatgcacaatttctctgttatcaaacacataattatggaaaatgagttagcatcacataggtaatatgcttgagagcatgatacaatctgaggtttcccatgcaaccctgagctgtatgattatcaaaaaggtgaagtgaggaatacaagagaaataaatcgtcaatgctgaagttagactcaggagatctgtttgtcctgatgaactgacatctttgctagtaagttcaaaggtagacagtgtttatttcctgtttcacttccagatattgcctgtgcttttccagtcactcaacaaagaaggcatgtgacacctactcacatttctggaatgacatcagtgagagaatatgtaactgtggctcttgttgactaaaaggattaactttggaggtcacaaagttcaaccttctaactcctttttgggtaattttccaactatctttatttgctctacaatactttgaagaaaactataacttatgaacacatgtttttcttaatgtgtttgcaaacatattagaaaatagagagtattattaaagtattaacctaaatttctcagcttcctactacaaaagagttatgcaatgatgagatattcatgaaaacaaaggctcaccttgatgactatttttggggggaagctgggaaaaagaaatcgctttgttttagcttatctctcattgtcttttcagctatgaccatggagggagaggtggaaggaaggtattatggcatttcttcttcaggcctcatcatggcaagccatgactagatctctttaggttggctccagcggggctggcctgaaacacgggggagtaccacaggcttctgctctgtctggagagctcacgtttcatgaattttcattttacgtagttgacaacaaacaatcttacttcctcaggaataggtgctggcctaggatttgccccacggtgaacaaagtttgtgaaaatgtacttacccatcacaaagtaaaacctcaggttcccataaccggtagtgtccatggatggagtgcataatttcctctctccatctttgaggaagaccattgataagcctgattctatcgttccacattctgtaccaatgacagctcccaagacatcccatctaaaaaaaaagggggattaagagttagagttagaatattaagccaaatctttataaagaataacatttagtttttagtgagggacacttacttacttagtaatgaataattctgaaataaagatatggcactttatttaggcaatgattaaactttaaacacaaattttaggtagtgaatacactttaaacacattacattcacagttatagttttcctgtagagggatgaatttaatcaatcttgtatacggtgtgtctacttgtgatcagagccatgctccagactgagatacttttcattctttaagtacttatagttgagttgggaaatcaatgaactaaggaaacagtgaattataaaagacagactcataatataaatacttgtatgatgttttacctattgaaaatagtaataaaatgaaaagtcataagaattggcaaaagtctagcaagttttcaaaaaggagatgggatttaaactgggtctcatcaaacaggtaattggatatgtagaagagaataaaaatagctggcttttattgagtgctaactacctggccagatccttttctagggcctttacacattaaagtcatttaattctcacagtgaccctatgaggtagtcaccattactaccccaattttagatgaagaaactgagatgaagagaggttaagaatgactagcaaaggaagaggacagtattcaaagccatgcagtgtgactccagagcctatgctcttaccacagttgcataatgtgttgacgaaatcacatgactataggctaagaaatgggaatgaccagcaggcatggtggctcacacatgtaatcctagtactttgggaagccggggtgggcggatcacgaggtcaggagattgagaccatcctggctaacagggtgaaaccccatctctactaaaaatacaaaaaaattagcttggtgtggtggtgcatggctgtagtcccagctactcgggaggctgaggctggagaatggtgtgaacccaggaggcaaaggttgcagtgagccagctgagattgcaccactgcactccagcctgggtgacacagcgagactccgtcacaaaaaaaaaaaaaaaaaaaagaaacgggtgacactattaacagtgcagaaatcaatagaccttggtggaggatgtgtgttaggggagagtaaaaaatacatttgaatagtacagtggaacaaatccatggagagtttggaaagaggggagttcagactctatttagtagacactcagtgatatttctaaactgcatacatgattacatctctcctttgtttaaagtctttcaggggctcccccattgctatctggacaaattccaagttccttaatgcagaacatgcagtccttcttggcctggcccaagaacatttctagcacaatctctcgccttgtaccatgtctcttctgccttgtacccaaactcttttgccatacaatgtgaattcaaagtcactaaaacattctgtcagccctctgaatcttaactttttgtctatcaaacaaactcagggtcattctttaagatgtccttgaaatatcaaacacctttctgtacagtctttcccaaacttcctggctcctcctacccagccccaccactccatctcagactgttagattcttcctttgtgatctaatttctcccagtacactgccattgtttctttacatgcctttctttattcctgatatgtcagctcctaagacaggatctgcgtcttatttttgtgtcctgagaccctagcacagtgttcaatgcccagcagatcctcaataattcttgttgagcgatggcgggattaagggattccatcttcagaaaataaatgaaacctgtagagtttcctgactgtatcctgtcctcactttcctctgctttctctagtcacatccttgccctgtcctctgagacaattcatgccattagcacaaattggcacaaactggaaagcagccttttcaattggcacattgggaaacaccctcttcttctcccgaccacacgtcaggcaggtctgaccaccacttccactcaaagtccccttgtacttgtacttaatgcctactgctactattgctgccaggcttaggctttggtactgaatcaacttacagtcatagctctgatggttcagcctcctcttccccttagatatttgctacaccatctgcctgtctagatccaagccctgcaatgaccacctggtctttagcttctctgttggcctaggttctaggcacacactttaaatgcccaaaatattcagagaggttttcaggtttagatctcttttaaagattcgcaggcctaaatggatggtcttatatagaggactgacctctatggccccaggtgcctgttcccttactcatactctttctctacccttgctaccagtctgtccgattccttttccctcaccttttcaaggcggacccatctgttgctacccaagtcccggttgtgtcagtgagaagtgaaaacaaagcagaaggtcaaagacagctccatggttaggggaacacgtatttatagcacaccacattcaagaggactctgaagctagtcaaacaaaaaccttccaatacatgttggctataacagaagtcataaactggtgtttgggggaatgaccataaacttttgatagacatttaggtcatttctatcttttttg

SEQ ID NO: 49331 - DNA, 1336 bp, Homo sapiens
agcagccagccacctccaggagagatttattcaagaggtttagactgatggaaactgtagtgggtttgaacgtgttgagagaagatttatacaattaggggaggtataaatgcttagaaaacaaagcaagtgaaaagcaaggcaattactaattctaggaaaataaaaaacttgggtttggaaaggaaaagaaattacagtgcagtctttgacccgtctgggctgtgaatggtatttacataatcagcattgtagaccattaacattgtagatcattaacatgacaatctaattgtcatttgtagaaagttaatagataatgtctaaactagaaaaaacaagaattggcaaaataagcatgttatttagagatatggaggaacatttagaaacaatcagctaaaagaggatccctgctgtgaccataagcatcagagacacacataacaggggaagtgtgacttttatgacttcctgggtgagactcatattttttaacccactaaaactcaagttttctcttgtgtgcagtggaacctattcctaaattatacaaattccagaaagtagatttcctggctgatattgtttacagaaaatctctacttttaataaattccccacttttaattaatctcacaattcagaccaaaggaactacttcaattaccttgctgttatcattgcccttctgtagtaatttttcccctccaaggcaccctactccctaatacttgtacatttactttctttcccttctgctgacatgcccggggcgtcttctgctttcatgcgtgcatttactctgccccttgccccaagcgttatgaaatcaattacttattaagctactaagtaatgtcatttcctcccatccttttgtcactcgggccttgaaagcaataggtcatccatcttcttttcagttcaaggcccaaataactaggtcttaacaatcatcacgacctaaagttaggtctaatcaactggaaccagaggaaggaggagaagacatttgtgtcagtttcttgcatatgttggaattattttctttggcagaaatatgtcacattctttcttcgtgacagtcagcagagccgatcacaggactacacagcaggccagtgacaaggcgcgccaacctggcaatctcgctattatcttagtgctcctggttgcagcactgctggagacagattacccttccttgcaggaaaaaaaaaacaaaaacaaaaaaccttgcctcttctgaatggattacagtgcatgtgcacagtgtttgttcaaagaataaatactggtcattgtagcaataacaacaatgccagaaaaattc

SEQ ID NO: 49332 - DNA, 523 bp, Homo sapiens
taaacctctaattcccttctatttattccttggatataagacaaaatcctcagcaatggccgacaaatccttgcttactattcagcctcatcttgaacaataaatgccctcattgttctatccacacttaacttttccctcccccaacttttccctcccccaagaaatctgctgtttcttttactgggaaattcctacgcacacacacacacagacagacagacagacagacacacacacacacacacacacacacacacactttcctggtaaaattctatttcttatgcaatcatagcagataagagttccctaactttccatgtgttcactcagtttacaactatatttgctttgaactatttccaaggatatccattaaccaattaatgttatcaaaagttagcataagatacttctagataatcttttatttcatttgttcttttaaaaaaattggttaccatgttcaccttgagcttcttctaaaattttagctctttttcacctgtggtttttaaat

SEQ ID NO: 49333 - DNA, 729 bp, Homo sapiens
gcccgccggggagcgggacggggacgctgtcgaggaccgctgagcccgcgactcttctgcgagggacgtcaaagccccgcagagggcacctcccgtccagctgtctgaaggggaaggccagcccctttggccgtcagtgtgccctgtttttcctgggaggatgcgtgagggaaggagaggggcggcagggacggccgctggcgccggtttctttgtctgagccggctgcgtcccgcgcccctcggggctcgcagtctgccagtccgggcggcccgcactcgttctgggaatccgcccgaggccgcgaaccgctaggggccctcgcgctcccttcccacccaggccccctgtccctcccgccgcggccgcccggcccctcgcggcagcgacagagcctcatctgtagaggattttaaaatgagattaagcgaaagtggaattggcagactcgagtggtgcctggaaatggtgatttgtgctgctcggttgtggggaattgtaaggcaggaagggctggcggagctaagatccgacaggctctcttcgccggactgttctgttattcattgcttctgggctcttcaggcagagatgggtgttgtaattttttaaatcagtgtttatttcctttaaatgtcggttatgaccaatggccctgaaatcgggggagggaaaaacgttcaggggagatgctggcagcggtgattgaagcgggtggtaatgagcggc

SEQ ID NO: 49334 - DNA, 1178 bp, Homo sapiens
gataaagcttagggcctgctcaaggtgggaagaatgataggatagtgctactcaaagtgtggtttgcagatcagtcttcaaactatctgttgccagtacacgttgagataggtacagaaatggagagtgtttaaaaactttcatagttattgtataagcagtagtatccaagcagcattccatgtccctagtaattcatattgaccttagttttacaaaagtatctgtctgtgatggattatgagttagtatgcaaagtactgtcccggaaaatccatacataaagctattacccatccccaaatagctcggccctcaatgaaaggtgaactagaaaaaaatcagaaattctctcactaaaatttgaaaccacaatctggctctcaggaggttgtgacacaaattcacatttctgtttgattttaaaaacctcaagctaataattaattttaaagcggttctgggttgaaagtgttcccaggcacctggcaaaaccaaattcaaatcacctctagcatggaccctaaaaacaaaacaaaaacaatttctttaagtcaggcttcaaagaactacaacagatgaagattcacagaacgttgtgtttacaatcaaaaatcactaatactgtgagaaagcagaacacagtgggtcagtagaaacaggaagtaaccacaatcagactcacaaagacttcagatgttggaataactctgttatttaagatatgtatatttaatacatttagaaaagtaaaataatattccaaaaatagaactaaaaataagagaccatcaaaaatgaccagccattctcaaagtaagaaatataatacctataatttaaaactccaaggagagaagtatgtgcttctgacagtatagtgtattagatattctggaaggccttcttcctgtgaaacaagtagatccagcataaaacataatcttcttgtgttatcaggcttatagaaagaaacggaaatcactaaaagaccaggaagttttatggctcaaggacatcaattaaaaaagaaaagaccagaaaattttttaaagggaccaactataagggaaagccagagtagtatgtgcagtgcataatccagagtagtgagtatgtgcagtgcataagccagagtagtgagtatgtgcagtgcatacatatgaatgtgggttccc

SEQ ID NO: 49335 - DNA, 1097 bp, Homo sapiens
aaatgtgatatatataatacaagggttgatttcctaactctcctttcatgaaaacacaatccaacccctgcagtgggtgagccgtgattcttccaagagccatttaaagtgcctgagtgaggattttctccaagaatagggcaatttgaaggctccccatgagttgaggtgaggtgagaaatgcttcccagtcagagagcccagggccagggcatcccacagtaggcacaacacactcttttgcctaagggatccatgctctctgacctgggtggccaagctgatccttactcaggggtgacagaggatggtgagtgatgtgaggtcaggagctttgcttgctgactccaaaaccccaaactttggaagtcaataagcagcactttctgggaactcagctatgggcttctgccatagtcctccctgattctgttaatcattgagctctctttttccaaatttaagaatgagtcattgctttaactctagggcagcccgataaaggttcagcatcaatggcctgccctgtgatttccaggtcaaaggaaaagaaaaaaagagaggaaaatgacaactgccaacttaagagaggcctgtgaagagcgtttctgctgaaaaataatgctgacctccaaatgaccttcagtacaatagtgcttctgctcaaggataaactgaacctaggttaaggtctaacatcttagatcttttcttttaactgccatattttgacatttgctaatatttgatacgaatggctaattttgattgggacacctaagatagaaaatcacatagaaatcttccaagattttgaaggtcctggcttagtgattacatcatccagtgcttactattgatatgacaggccatgatttgttgacttggagatatttattttgttacagtcatttcaaacatccgattgctagtaatttttggatagcttgaaaccatagtaagtttttttctcggccaagttagatacaaacagggaaatctgaacttagggaatatatcacattcaaatacttgataatcaaaatagttttccttattatcccagcagatgaaattttcagagctcaaatcagagt

SEQ ID NO: 49336 - DNA, 1531 bp, Homo sapiens
agacaagacaaactcctctctagggcatcctgtgaactatcagttaaggagaaaagtttaccctagacctcttctggactgttacaattctggaaaagccagtaaatttttaaacctgaagcactgctttggcccttagtggccttgaaagcaaccacctctctacacttgactcactccaactaccgcacagaaacgtgtgaacttacatttgaataaataacaccctgcaaacacatctgttacataaatgtcattgggttggggtaagataacaagcaacttctaggagctaatgtgggcaaacttctgaaaagtgtggcgtgtttcaaatacgtcttaggcaacgtcctatagtgcaggccggtcgctctcagactgtctcctcttcaatattcggaagagactgtgggtgaagctgcagtacagaaccacaacacccctatttaacgtaaaaacggccttttggccctcaatccaaacacgaaaaaacaaatattggaacaggtcgcaagactaccgaaacgtctgcctccaggatctggaagacagtttaactacaatacctctccaaacaaggactgcaagatggacacttgagactcgcgacaaagcaccacgttttccaagtggggcattctggcaggcaccaccgcagaggccagtgcagccagcccacaggacccttgcacaagacggagcctctcccgagtctggcggcccacgctcccgccggaaaccggacccgcagcgtcgtgggaggagcctgcgctgccgggctgcggcgtgacggcagcgcgtacgccgagcgtcgccgccgctctagtctcagggccggaaccatcctcttctcgctggtcctgtgcgcgccgaggttttgcccattcttgggcttggtggggatttcgggctgacgctttttccactcaaaggctaaggagacgacatggagatgggcgaatagggaaggggtggaaggggttaagggggtcccgtgggcctccaatgacccctgaaccccgtgcctttagttttaccggctggaagccccaagtttagaaaccttgagtgcctaagaagacggacccggagctggggcccttagagggacgtggaaggcggacttagaagactaatattgtcaaaagatgtttttgttgtcgtttttttccctgacgacgttgtgggaaattagtggcattgagtacaaaacagggtgtaatggggtttaatgcacagcttggaattactattttttgtgcaagctttaaaccagatgtggaaagcctctcagtcctaatgggatgaagtcgtagtgtgtgttggtgaggttgatagtaaaaataatgctacttttagcattaggctttcacgtgtatttatttgtgaggcacctactagcgactaaacactagaagattctggaaataagatacagaagtaggcaagtgcatggtggaaagagagcttggcgtcctgaaacccctgggttgggaccactgactgactcaactgctgaatagggggactt

SEQ ID NO: 49337 - DNA, 687 bp, Homo sapiens
ggcattggattctctgctccttctatactcagggctgcagcttcagagtagactttatagaaatattctattaggcccaacagtaccaagtacattcacagcccaggggagacatcagtgggcttcatatgccgccaaagaataagcccaaaagtacctgcaaaatggccagtgcacttggcactgttagttgccaccatttggaccttatccaattgaccctaaaattggcccaagtacttgtggtagccaacttccacaaggtggccccagcgatctttacctctgggtattcacacccttgtgtaatctcctcccacactctgtcaaagtcggtctgtgtgaccaacagcataaggcagaaaatggtgtattacttccaatatttggttttaagataccatgacttccatcatgggctctctcatcactcacaagggaagccagtcgccatgttgtgaggacaggcaggcagcccatggaaaggcctggaaagcaaggaactgacaccctagccaacagccagcaaagaactgaggcctgccaacaaccatttgagtgagtttatacacagattttccagccccggtcaatccttgagatgaccacaaccccagtgaacagcctggctgcaacttcatgaaagactgcctcagagctacccagctaagctggtcccagattccc

SEQ ID NO: 49338 - DNA, 588 bp, Homo sapiens
atttttattacatacaactagaaaggaccaattagagtgtggaaagtgttcctttgcatagtcaaatgataggcaggggaatataatttcaccagaaattactatagcgagtttcaataaaggactgcagaacaataaggccttgttaatcccatactggtctgttcaaatagtgtgtaattcaaagcaattgctgctccctaggcaggaatttacaattgctacatgtgaagggaggataatgtgtcattccaaggggaaatcaggttctggaaagggcctcctggctgcagaactgtatgtgtccccaaacagctccacagcaggccaagttaaacaaaataagtagagaaccaccctgtgaaatgagtctgcttcgaattgatctgtatttgccttgctctctcctgcctttttggtggatgacaaaatgtccccaaaccaaggatcaagaggggaaggcagagaaactcagacctgaataagctatcacttagaaattgactgcctccaccagtgcacggtggctcacgcctgtaatcccagcactttgggaggccaatgcaggcagatcacttgagctcagga

SEQ ID NO: 49339 - DNA, 2574 bp, Homo sapiens
cctgtggaagataataatcttttgtatgtttaattcgttatcattgccttataaattatcacaagcagcacagataactactggagtcatcagtgcaacttaaaacaacaaaactagcatttctcacttgctgtttttcagacacctcccatcatctgcacctggtccccaaaccagctgtccatgagcaatgacaaagaactaaagcggggatgggggagagggggtgtagggcccaagagctggggagcattatggcttgctgtcagctggcagtctaagatgtacttgggaagatgtttcatacccattttccctgtgaaattaaaaatgtgatgctaccaaacctttgcttgtccaccacccttaaaagaatactcattcagtacaaagccctgcaaaaaggagtgagccaatttgaataaaagcggaaacttcgtaggaattaggagcctgaaaggctgcgtgagagatcgcaaacatattgaggcgttcttgaaacacctgctctctgattacaggtgggaaaaggccattcctatgccttctcccatgggcacggcgaatcaaaggcactttccatatttaatacgactaatacgtcattgggcaaagagatactcaatacatccccatagcttttccttacttttacttaacctttatgtcggacgctttatgcctagtactgttctaagcgctttgcatgcatcatctcatcaacctaatatttaataagaggctcggatagattaacttttaaaatctggatacagctggttaaggtggcagaagagttggaattcaaataaaagccagtcctatagcagggccattattgctcctgcctcccctagcttgatcacgaaaaatgagtagttctttcctctgggcacacaggacaatgaacaggcgggctgctgccagaatttaccgaagatggccgctgtgctgggctcggagtgagctgacggtgtctcagcgagaaaagtcgggagcggcagcagactgcttttttggagggcaagaggggagaaaagggttcaacggaaaacgggggtaacataagagcccgaataagggaaaaggaaacccctgactcccctagccacagaaagcgctgggcggaaatgaaccggcctaggacgcgccctgcgtggaggcaggcccgcgcggcggaagtgcgtttctggggctcctcctgaagaatgcggaggaggaactgagctggcgcgcgggccagctgtcctctcttctgatcccgaagacaggatcggattatgggttgttaccggcttgtgcggccctgggggttgccggttcctggagacgagctgcacccctgcagtttactgggctcttctgtgacccgctttccgaccccgcctggggtattcagaccggggcagacaaggcccttctgcccctcctagcggccgcctctcctaggctggagggcggcgccccatatgacacagaaggcggctagggatacgccctgtaccatgccggccagtctggattgccctaacgccaggccccgactcgctctggccagcgggcatgcggcgagtttgcccccgcagcgcagccgcccacaactcggtcttccagaggagcgaacgttcggactgcttggtagtttactagggcaaagtaccaccccaccccgagcgagcaagcggacctcaggaaaggggctccttctgtgtaaagtgatcggcaggccttgcagtggatcttcggtgtccatagttatataccaatcactattttgtctacatcatttggactgtgcagaatgagatgccaataatatatcacatacagtaaaagggctattttcacaaaaggtcaaaactgggatatataacctctttcttttgattagtcagactgacttcaaagggggcttagggttgcttattaaagaaaaatgcctccccgtgggttttcatttgagccacttataagtgggctagtttctccaacaccaattgagctggaaactagagtaattagaacacaacatattcccgacctgaacaggatactgaaataagttaaaagcctcattacttaccagccttctctcagaaccctaacaccccttgcaagggatttctaactaggagtcggtagataaaatttagaatgtgtgagcattatgtaatacacatgtaaaacattctgagatgggatccacgggcttttgggggctgtcaaaaggcccacggcacaaaaatagttaatctgtatacttgagggaagagagaaccatcactggaagtattaagctctaagctcattcaggcttattttctgggaacttgtaaacaaaatgaagtttatggtcctagccagactactccagataccatactgagacgttaccctttcctattttccactctctactggcgatcagatggttggttcttagttgtaaatactttggtttcataaaaccatcattagaaaatggagacttttcatcaatcacgtcttaatctatactttgggggtgtttaaaagacatattccttatgtacaaataacctggtttttccattt

SEQ ID NO: 49340 - DNA, 1611 bp, Homo sapiens
actcatgttttgttagacagaatcaacttaggatattgtcttccgtcctagggacccagaggaaaagagatgaccaaagatgcaataaactgccccaatatactgtgtctatttaaacagaaatcaatcagctgttaggcaagccaatgggtgcataagtagggagaggggtcagccaacactggacaccttagagcagtggttcccaacctttttggcaccagggacccgttttgtggaggacaatttttcaatggacagggcaaggggatggttttggcatgaaactcttccacctcagattatcaggcattagttagattctcataaggagagcacaacctagatccctcacacgtgcacttcacaattgggttctcacacctatgagaatctaatgcggccactgatctgacaggaggctgagctcagctatgatgttcactggcccatcactcacctcctgcaggtgcggccgatcaggggccgggattggggacctctatcttagagggttttaggcgaatcctaaatagtgtgtctccactaatatttgttaagtttatgcttaacatagcaagactgatatttgtgacagcccatagacacatctgctctcttaagatgtacaatgtttcacaggaattttaaggggtgttcttgtttatatatttggcagttgtgtaaactttggtcctaggaatagagagagatatgagtctccagggacagcaaaaacaatcaaatggtaaagaagagaggccatattttctttaacacccttaattccatccttatctctgctcttgggtgcttatacagcacattatttgtaactgtagtcactctaaattatcccttactgcctctttgatgaggaagaatgattaacacaatggaatgttggaaggtttaaagtctacacctcatctttcctggtatccttgaatttactagtcaggaggagttaaaatatagtcatctttaaaaaaatctctccccttttcacttcacagttctttattttatccatatactcttaagtgcaactgcattttcttttgccttaacagttaaagaatcccacagggaatgatcataggctactctggttttcaatttggggaaaccctatactttaacttgaataaaataacaaagtcctccaaactaatatgtgatttctgcccagagctctgaaagtcaaagtaaagaaattcaataaagtgagggtaacagggagtaaagatgactttcaaggtagccaaatgcctcaccatctaaataatgacgcccatcaatgaacaaacaagattcccactgtcccatctcctatccagtgaaacacagccaacttgataatttgtgcagggaaagactctgtttagcttataccttgaacctaagggaaattaaattgcacattttctgttcctggctaatcttctgaataatgtactgaacacagtaggagttaagaattaaaaatacctgtctgcagtttcagaaacaatcacacacaaaatatttgtttatttccagactgatgaaagactgaatttttggtctcatgtatttactgtattgtttcatatatttatctatatgctt

SEQ ID NO: 49341 - DNA, 5442 bp, Homo sapiens
tcagagtggacaaattacattctttgtactaaatatttatagctcatccacattcagttgcttataactgaaaaaagaaatccacaaaaactagtgaggatttaaggatacacaaatgaattaaaaacccaatcttgttttcaaactaccaagagcctacaactaagacttaaggaaatagcacaaccttgacctcaggttcttttcaggtccagcaatcattttctcgtagcaccaagtataagcgctctgccaagaagtaggccagattttggctgcaaatgtgtttgttgaataactccccaccctctacaccacccaaaaggagaagccctttaaaaattatttgctagttttgactactttaactagtttggctaagtgggaaaaacgaaaaacaaacttagtctaccttaatgaatatgccaaaatagcccctaaaactgctggatattttctcctatcgagatttcaaaagctaaaagtatagtttgtactactataaaagtgcttcaaatttcatgatgatgcaggaaccttaaggaataatattcaccggaagtgcttataattgcatcttttatttttaaaaactacaaaagggcaacagaaagaaagcagacttgaaagtactgaaaagtcttacaacttaatacagtttaaaacacggcttttattccgtattactaatgcccagtgcaaaaaaaaaaaaaaaaaaaaaaagcaggcccggcgcggtggctcatgcctataatcccagcactttgggaagctgagacgggcggatctcgagagttcgagaccagcctggtcaatggggtgaaaccccgtctctactaaaaatagaaaaaattagcagggtgtggttgtgggcgcctgtaatcccagctacctgggaggctgaggcaggagactcgcctgaacccggggaggcggaggttgcagtgggccgagatctcgcctctgcactccagcctgggcacaaaagagcgaatcccaccgacaaaactatattcttaagggatgtacagacagaaaactgaaataaagaacaggaatcacaggaggaaggaagagtctgaaaagggcccttaaattcagatggctgcttatgccttttcaaagcaattaaagtgttcctgggtgttatttacacctttaaatttgtttccaaactttggaaatacttttctatttcaatctgagaaactgtttcctcagaaagtaatcgatcctccttgacgttgtacccccagaagctggtctacccctcgctaggcctcccagaggccctcaaggactcctagttgattccgagtcccacgtcagggaactaccaccttacataagtatactttgcggggagaaaggcagataagaaaatagggcgccaaaccttctccaccaacagccgtcacaccccacgaggactgtcctgcgggggctttcccctgggagccgcagctgttctgccgtatgggggaggggaacgctttccaacagtcatctcttcctcttcaggccgccaacgccgaccgcaccacagtctcctccgcccaagccctgtcccctcccccgccccggcctgggtcggagccaaaccccacaggaatgcagcccggtcacatgcgctgcggcggtggacgtgcctctccccccgcgccccaaagagacccagcgccatcttgccctgacgcagttacaaaagtcacgggagaaatcctgtctcctcctccgcgccagcgccccaaagttttgcagaggccgagccggggccctcacctcgcgcagggacagtagaaaatggtcagggaagagccttgcgattcccttcgccactgcttgggttccatatcggccgcggcagcaacgatcaccatcgtcacttctccctctctacctttgcaacagcctccccctacggctttggccccacccgctgctgcaggatgaggtcatcgccagccaaccacgacgcgcccgacaggacacatcaggcgctgattggctgccgagaccgcctctgcctctccccactccgcttcccccagcgctctgggtcgctgcggggcaaggggaagacggaaaccatttcggggaaagacccccaaaacaagagccggaatcgccgtgtcattttagtggggaaacccttcttttattctttggtctcccccttttttcttcgagatcactgtctgtccctccctcgtttaatcaccgccatataaaggaattcccactcccctccccgcacattgtcccaccggtggggaaatccttccccgaggccaagagaagtataggaggcagcgacggcaactgcaccgacggcaacggcagctttttaccccgaagcacggtggcagggaggcggcgttgacggtggctgcatttttccggctgcttctccccccgacctcttccgtttcttgctcctccatcgagacagcactagactcgccagctccgcttttatccggtgcccggagcctgcgcactggagcctcctcagcccctagtgggcgtcgagtgacaccccaaccgggttcacccagcgctggaggccagactgggctgggggaggagggggagaggaacggggagacgggactggggttgtttgggagggggagaaggtgtatcgctttcggagggtgacgggagggagttcgttcccaagccctgctgtccttgttcgtgcacccaatactggcatgcccaagctcacctatatccagacttgagggccactgggggaaagggggaaagaaccagtcccaccgaataccgacacttcctcaaaccttcggtggattgttgaatgcatctgttgtcagaaagacagagattccgtccccctcaccgcctccagtttgctatcttcgagcctccgcggagaggcaacggcgggcggcagcccacaagcaaaatggcgccgggcagcttcatcccctccccctctgcccctgcggagcgggacgggcgtaccccgtgcacttgccgccgccgccgccgccgccgcggccgccgccgccgccgccgccattttcccagagcgagaggcagtgacactgagcgggcgcagggggccgagtcggagaccgtgccggagttcgggagcggcaacagagtgggcatagacactccgagcagcctcgccgtcgtctctgcgttcctgttgactgcctggctgccccctcccctactcctcggttcctggtgaagaggctgcgcgctgctgtttggggagggggtgtgtggagccgggtcctgtgtccgcagtggctgctgtcggggggtcgcctgttcgcggaggtgcggagagactccttgggggtcgagcacataacggggttcgggtgtctcgtgtgtgaacatcacaggttagtgcctgtcgtctccatgggagttcctggggcttgcggggttggggtacttgtgtttcaagggggagggaggtctctcatctttatccttaagctgggggagccgacgttgactctcaggtgtctttgccggcgcaagacgttgcttgcttaaatcgaatttattctttcttctccctgaccctagaaatggagcattatggcgggttttagggttgggaaaggggtaactggcagttaaacccccttgagagtgggggagttagggagggggcgcactcctcattggcagcgggttaaggccgcttgagtgaagacggaggcttgtgactgttagtagggtttgtgtcgaagtggtcccaggagctgccagcgctcccttttctcaaccgcgtcttgttcaggtgctgaaaagccatataggccccattttcttcttccatttcttgacgggcagtctctggtataatgtgcacatgaatacgaagggggtaagaagaacgccctgggcatctctctttgtgggagagcgagacagctagctcctcatcctctcctggagagggtaaacccgcccctgaagtggtcaccccagtacccagccttctcagtctcctcccccactccttttgcattaccgccgtcctttactgtgccggagccttaggatctacaatatggctcatttcagaaaagcttattttgaccaagggattggcacaaattctatggcagcagacacagatgagaaacaaacggttcactgtgctaaacggggtgggggtgagaaaaaaacaatccagagtgctctcttctactggccttagttccgtatagatccgtccttgctgggctctgtcttaagaacgatacaatttaaagtcaaagaggaatcgctagagttagctctagagtaaacctcgttttgcctattttgttccctttttagagatgtgaataaggtaaggtgtttggagttctggagaccttggagagaattaagtgaggtgcattcaactcgaggctggagacatgaatacctatttggaaaatagtctgtttttttccttcaatttctgagatggggagtaaaaactgaaatttccctcttttgtcctttacagattctaaaaatggcggccccaggctgatgttgtggtaatctaatcagctcgggtcctccacaccccatgcagtgcgtttgtctgcagcatattacaggcttattatgtttacatgaaaagactgggctgtttttccttccccgagccagttacaaaaatgtgttgattttttactgcaaattacagtgctgtgttttagctgattaatttgattcgtttttcctgaaaggcaaataaaatgtctccacttttgaaaaaaaaaaacagccttgcaaatttcagtggtgatgatgggtgcgcttcaacattaaaaaaaaattatttgggtaccaataatagtttttgtttggtttaatccaaccatcttttattcaatatgccaaagtagattaaaatgtttagtaactgtataagtatcatctattttatatgattaaatgtttcaatctagagtaagacatttcccaaccacctcttgacccattttgtggattttggtttttgtattgtgttttagcttaaattttagggagctgtacaaacaagcttaaacctgttacttcattgggtgtagagatgccattatattttgccatccatttttcccatgtatttaagctttccttaagaattttcaaagtttattgtgtatttggtaaagtgaagcttcatgctgcctttaacaatcgtcttacagcatactatcatcattatgtaagttaaaagtaaggctccgattctggatttttttcctcttcaaatatgcccatttacctattataggattgtggaatttagtctgttttaatagaccttaaataaaaacattaccataatagggtcttgaatccattttatgctattttcagaaacttacagactgagactgaaaattaaatggtgtcaggtgtcatttaactgaatttttt

SEQ ID NO: 49342 - DNA, 418 bp, Homo sapiens
taggccaggagaatgctactttcagtctttgatatctctgagggaaaggaaaccacaccctgatactccttggagccagatgcaaaccagccttaccacactatttgttctacctgctttacttaccaaggcttaggagcagcatttcaccttctccaggctcccagtatcacctgaaggggtcaaaggtagggcctgggtgactcatttggattaagtcttgaccctttgtcaattttatctgttcctctaattcctgtaattgggcacggtctaaaatgtaggtccattcagatgtccaaatccttatggtgttcttccttttattaattcttccacctgctatgtataatttagttattacagtgaccatgctaccatcacattaaggcccatgcctagttctcagatcttctta

SEQ ID NO: 49343 - DNA, 497 bp, Homo sapiens
ctcctgtttgaatggtttcatggtattccagtctagaggtataccaaaattaagttttaatcagtctcattgaatatgtacgttgtttgagccaaatattgcattgaaattagcattttggcataatttttgtacatgtctttaatgatttacttagaataaatgtgatctagaattactaggtcaaatggaatgcaagatctttttaaaggctactgatatatgttgccagattgcattcctgaaagtttgtgtctactcagaagaagtcagtgccctggcaatttgggacatttagtataggagaaagtaggtttatagaatttaacccttgagagtatcacattatgatagcatgtaaatacatcaaaatttaccttgccatctaattttaaatgtaatatattctgagaagttaggactatgtacaatacagtttaacaaaattgccattaaaatagttgtattttaaaagttgatgtgtcaaatgtgatccc

SEQ ID NO: 49344 - DNA, 975 bp, Homo sapiens
tacctagctaaggcagggacttggtttttgatatggaagaactttaatacctttaataatttaaacgttattgtctggtattatccttaagagcaacgagggaatagaaaggcctggtgtttcaggacctatctggccatgtgctgactcagatcatgctgagtcaaagctgaaagacagaaagcaccctctttttctcctatcagctggcactatctgctcaacaatgcttttacttgagcattagaggaggtaaaacacagtaaattcaagaaaattgttaaattaacctctgaataacagaaaattaatatatttattctgcattccttttttcagtgagaagaaaaatgctaagccttgcacacaatcttttcttttaaatattggaagaatatggataaaaagcagtatggaataggaaaagcatgaaacccaacagcaagcaacccacctttcccaacacggaacgcctaagtaaataccactgagaaaaagctgctgaatgggccaggaaacagggcagaggaagagaaccaggaactggctcgcaaatgcagggccctttgtgttcaccaactcacaggttcagggtcaatgaccaaacgatgccaggcagggccaggggagtttacagacaatgcaactgtgcagcacaaaaccagcagcaaaacaggcctgacagatagaagaagaggcttctgccgccctgtggaagccgtcatctcaaccactctgggaacagactctgtcagagggagtgggcgttgctgccactgtttcagaagaggctagacatcctagaataagccagaatatctgctagctcttgctttataagggaagagagattatgcattggcatctggggaaatcccttccagtctggaaaggtgaggaaccctgcatgtctggttgaccaggcagaggcttacctggaggggctcccacctgcccgccttaggcagtcttccc

SEQ ID NO: 49345 - DNA, 362 bp, Homo sapiens
tctcaataacttaattgtataaaaacacaacaggaggtaaaagagattttgcttttctttcttttctcagtatgatagttcctgaactaaggtaccagactgctacattcccaagaagtccactgaaacccaactggaatgcttttgtcacacctcctctgactgagtcaccacagtagtgacctgtcacacggtttccttcttacagataatggtgacacaaaggacaaactggagctgtcttccttccaaaatgaaaagcttgcaattgcactctgcttccactaagaggggaatgagtggaaagctttcacttcgggaagaactgggccccttaagtcaccttctgatacgctagtctt

SEQ ID NO: 49346 - DNA, 1027 bp, Homo sapiens
gattcctacttatctacaacctaaaaaagtaacaacaggctgggcatggtggctcacgccgctgataatcacacatgaggcaggaggatcacttgaagccaggagttcgagactagcctgggcaaaagagtgagagtcccccatcattccaaaatttaaaaaattttgctgggcatggtggcgcatgcgtatgatcccagctactccgaaggatcacttgggtccaggaggtcgaagctgcaatgagtagtgatgacaccactgcactccaacctgggagacaaagtaaggccctctctcaaaacaaaacaaaaaaaacaagtaacaacaaaaattacttaagggtaagataaatataaatgaaaacactattttcctcattagtaatttaaaccacaatttaaattacattcaccacagaagaaacactaataataataatactatcaaaaattatgctgtggtgaatgtaaattgtgctttaaattactaataaggaaaatagtgttttctttttataaaatataaaaatataaatggattcagaaaccatttttgcagtgaaatcacacagattaaaggtcagtccgttgattgagcaaccctgaatacctaaaatgttcatgtcaaggccaacacataattctaaacccctgcctactaccaattacttaacagatatttatgcttgaattcagggatgtcgatttgaatatcagcattggcatttactactataacattaagccagttacttaacctgtgtcagcacttgccccagctacctcactcaaaactatacctgggtatatattatgtgccacgttagtgtttactgttctgccagtactctaacccactgtgactaatgacagattaacaaatgagcaggtcagagttaagagtattgtctatggctatttaaaactgtaaaactaactggcccaaagcataatccgattcactacagtagcccaaatagcaattcaggtatgataatttacagctggtaaatgtcacttaaaaa

SEQ ID NO: 49347 - DNA, 1719 bp, Homo sapiens
gctggaggtggccgccacgggcgcgttttccactccgaccggctcccgcgcacacgcccaccgccctgcgcagcccgcgaccccggcgcccgcagcgcacccaagtcacgctcaacccgagcggaaagtttcgaatccaaacccgagagccgaaacgcacaggtctcggggctgaactcgcgccaggaacacgcccgaggcaaaccacttgacaaccagcttaggttctcagcagaaaggccgacaggcgggggccggggaggaaggggaggcgagacacacgccctcccgcacactcggcccctccgcctcctcggcccgcggctcaggtgggagcaacgcagccgctgcactcccgcagcgggcgggccggagcccagcggcagacgccggggccccttccggaaagggccgcgacccccgggccagctcgcgggcaagggacgggtgcgcacgccctgcccggcgcctttccgccggcctcccgcccgccggccggtggcgacccggggcgggaggtcgcggggtcgaggctccgtgatgctagggaaccggccgcggcccgcgcgcccctcccccgccgccgcccctccccccgggccgcccgccgggggcaggagccgagcgccagcgtcccgggggaccagcccgcccgccggcccggggacccggacaactttcccctgcgcggccgcgggcgcccccgacggggcgggggtggggaacggggacaggcgcagcgtggactcactttttcggatgtttctctcttttcggcctccgctttcgggcctgaatggccagcactggggaagagaagacacacattaacggtcgggccgcccgcccgggctggccgcgtggcggggagagggcgcgccgcgggccactcacctttccgggagctcattccgacgcggcggaagcggggcggggggcttcgcgacggcgacgcgggcgccgagacgagctgggctgcagcctccactcgctccgccggccgggaggagacgagaaccgcgcctgcgccgccgccgccgccgccgctccagcagggacccagcaagacccgcccccgtccggccccgcccccgccccgcccccacccgccggccccgggggtcgggaccccagcgccgcgcgcccagcgccccgcgcccccgccccacccacctgtgcagaagtggccgccgcccatggccgcgctggccctcggcctcccccaccccagcccgcggcccgggcctccgcctcctgcgatcctgcggctggcccaggccgcccgcctctcccgggcaccggacccgcgggaccctccctccccgccgcggcctctcccctccgcaccccggccggtcgcgccgcccgctgctccatgcgcccgtccttggccggcgcctccgcgggtctcgcaccacctctcttcccgcggcctcttctctccctttgctcctctacatccttgcaaccccatgagcgccgcttcctcctctccggcaggcgtggaaagggcacacgaccaaaagctgggaaacctgggtccgcgattagcggtgtgaccttggagaagtcattttctctcccacctctaagtgccctccaggattgcatgagtttaatgaaggaaaagatacagatagcattcaaggtaggacaaaggttttgcacatgaattgaaactcgcttccgtaaacaccaggtgtataacaattcaaaaca

SEQ ID NO: 49348 - DNA, 988 bp, Homo sapiens
tctgtggcctttcctcctgtttagcgagctctgacattcactcataggtaggaacaaagccctccattggttagtctgggctgaggtgggcgtgtgtgtttctgtatcagtgatctgttttccggcaggcctctccctgaggggagagctggtagcttccatgtaagtggcagggcatacttcactaaataaaagatgtgtgggtgagcagtctggggaaccccacgattgctaaattcaggagggttgtatttccaatggaacaggtttcgtgtgtttctttcctaggcagagctgcctgtcctgctccccacccacgtcttctatggagttctaaaggcagcgcaagctctgctctccttcacctggggatgaagcacttcactgggtgccctccttgggctgcctgtccacttgctttagaaaactgttcatgcgctttatcctgagggcaaaacactcaaaacagtgcctagtgctttgcaatgtgctcaacaaatattcattgaatgaatcatggtggaagaggagaataggagggagctgatagtccctgtaattccaagcatgcttccttaatgaattaccctaaagatggcttcctggcacagccctgctctttttgttgaccgtgggtttgccagttgccaggatttcctttattacataccatgtgttgggctaagtgcaacttcctcttctttttctccatggataggattccacctgctggctctttcctataattccataattcattgagaccttgggaaggaaagaagatggaggcgtgtgtttagtctgccaactttttctttttgagatggagtctcgctctgtctccaggctggagtgcagtggcgtgatctcagctcactgcaacctctgcctcctgggttcaagcaattctcctgcctcagcctccaatatagctggggttacaggaacacaccactgcgcccagctaatttttgcatttttagtagag

SEQ ID NO: 49349 - DNA, 1805 bp, Homo sapiens
caaggctgcagtgagcgatgatcacgcaactgcactccagcctgggcaacaagagcaaaattctgtctcaaaaaaattaaaaaaataaaaataaaaaaaccaaaaacatgttcacaaggagttgttaagtacgtactgttggctactttcctaatgtttgaacctaacaattgcctaaccaaccccttttcaatagtgttgtacagtctgattttcgacagatccctcaatagtcgaggctcccccaggccaatggggcatagtcatttcatagatgattagaggcttggggatgggggggagggaaccttagtaaccctttatttttggaatggaaaaaaaaagtagtctgacgggaccaaatattttaaaaactaaactctttgccaaccctactcggcaggcaacgaaggtgtgcttctaaacacctctgcgcagggctgacgaggaggactcgaatttcagcttgcacagcagcacctccatccactcgttaagcattcacccagcttgagggctggagaaagcactctgagtctgcagcccgtccactcctactctgggaaatgcatacaaagcaagcagtccccagagcccgcgtggcgcctagtaggctcccagtgagcggcgacgcaggacacaggggtggaacacgtgggctggacccacagaaggcaggcgcggcgaagcagtggcaccgtgaagggcttcagggccagtgttcctctgacggagggacaagagtttagggagcgtccggggcaaagaaagggaggagtgggaagggggcccccgggggacagcgccgcgcggggaggaggggagcgctcgggcgcggcgcctccggacgactggccgggcagagcggagcggggagcggggagcggagagcggcgcctgcaccgccgaagcgcaggacccactgggttccaaccgtgctcccgctggcacgatccataatggaggcgccgcgggctctgaccactgcggggccgccttcccagtccgccttcccagtccgcactgcctcttggggcggggccctggggctggggctggggccagggccaggccgaggagccccggcggccgcggggaggccgcgcacttacccggagcctgggagcgcgggcgcggcgtgagctgggcggcgaggtggccagcgctctggttgggacgcaagagagcggcgaaggccacttggatgagccagcggctagggcggccaggcaaaagcagcgctttccgcgcggaggaccagatgcgctccagccgactcaccggcggccgggctcgcacacgtgcggcgcagcgacgcgccgcggcccgactggacccgccccgggggcggagtccgctccctgccgccggccccgcccccggcccacccactcggagcggcctgcaagccagggagcgccccaacgcggactcccagcctacgcgcgttcaccctggaccttcctcgcgaccgcgcctgagtcgcaccagcggcagagagcgatttcaccaagcatctaagagttctttagatctttaggaagtctaaggcagcgattgcctcctttggtgttatattctaagtgtttccttcacatagttgtggccctttcacgttgcaccgaccacgcagttgacaataatggaaagagaatcactttagggactaaatattgttctacatttgatcctgggaatgtagtggatctaaaagcaccatcttcctacttcttaccgctctggcttgatggcttgccataggatctgcttcaagaaaccggatcataggttttttttgttttggt

SEQ ID NO: 49350 - DNA, 1381 bp, Homo sapiens
cattcattggaaacccccaactaaatattcgaaccaaataaccctgcaccgaagctcctagtcaacaagccccccacactctcagaacatctggatattgcctaaaatataaatttaaattattcatattgaatttaaggcgttgggagagggatatcttaaagttccatcattaagagcttcaataaagtggaggggacttttaccgcggtggagtgagcgaatcccttctctggagctccataggggagggtgcccgcttcctgagtggccgttccgacctccggtcaggagggggaggaacagagcacggccggcggctgcacgggcagggcctctctgggctgagaggaagaaaccagtgagacatcgagaggaagtcgctgtggcactcagtcctacggcctccgaggctgggtagtgagtgtgtcgctggccttagccagactccacaggccacgctggctgcgaatggagccgaggactcgcgcggaggcgagatgctaccagccggcgagatcggcgcctctcctgcagccccggtgagacggccctggcgtccctgggaggggacattggtggcccattgaggtggcacagacctcccgggggagatagtcccggtgcggtggccctgtaagcttgtgaaggtgcttcctgcggcttagattagaggcccttgtaagacctcctagaggaggcggtagtccccgtgaagtggctttggcggccctggtgagatgacagatttctctagggaggtggctctagtgagcaggcaaggtaactccaggtcctgcggaggtgacacacacctcctgggaaggtggcggtggcaccaggacagtggcactttgaggtacctgattcggacggccctggtcgctcagaaagtgggagagcgtctggaacctctcttgcctccagtgggtgccctttgggagccccgtatgctttccatccacgactttaatcttaatgtgcttgtcacatctgttcttcttctagtgctgctctgaaagtggtgacgaaaggaagaacctcgaggagaaaagtaagccagctccaaacaccttagctttttcttcccgcccaaactcagccttccagggtctgcaatatagaaaggttctttgcctatcttttagatgcagtaccgttttctgcacaatatgcttatatggtaatactgatgaccatgatacacatatttttgtctttctaaaattgtaaaatatgggatgctttggagaagagcacttcccgatccatacctagtacagggactagagtgttttcgctggaagtctgcctatcatacagtactcagaataattggggcctgcctgtcattttaatgaaacatcaacttactaagcat

SEQ ID NO: 49351 - DNA, 777 bp, Homo sapiens
ccctgagaatcgccaccaggaggtggaggttgtagtgaaatgagatcacgccattgtactgcagcctgagggacttttattgaaggccgcagagttaatcaacagcagaagggctcacgtggctgggaggcagtggaaagcgaatgtgtaagaggggggtttcgtgtgggaagcgaaccccacatggaggtatggctgtaccggggcatgggggcccttacccggccgaaagaaaaggagggcgctggtgaggtagctaaccacctccttgatctgatgcttttccaaatactccgcggcttggagctccctgctgctggtctccatcgctccgcgtcccgctgttgctaggcgactgcctggcgtctcagccgtgcgactctgtctccctctacccggcgcggtcacgtgacacgcctgactgccctgtggctgcgacccggacctggaatttctagagctcacggttcagggcaagcctggggcatgtagcagggcagagagggcaggtgaggtgtggaccaacgtcactgtccgcgatccaggcttagggctgggcccaggtgcctttttccatctctctctagcacctagctcggtacttgttgatccaatgattaacaaggcttgaagtgctggcatcacaactcagcatgaactaataacagaaggaacttgtgcaattttgagggtgcccagtggagagttctttttattattattatttaagacctttattaacaggtgcttgcagtttgttgacttttttgaaaaaat

SEQ ID NO: 49352 - DNA, 2930 bp, Homo sapiens
cgtctcaaaaacaaacaaacagcaaaaacaagccaagcagccctcaaatgctcatagcacagtctgcattactcctctaaagtcaacgtcaggctctgaatgtgctccttaaggcagccccacgagcacaggtgcaccaggtcccaacatttggaaccgtgccagttgactcatctctttggtgacacttcttcccaactgtgtgtaactgagcttgggccaggccagctaatgtctgtgactgtctcctaatttggaattttttctgctttataatgagtgtggcccaatcatactctactgtcaatgattccagaactcagctggatgcgaaattggagcccatcagaaacaggaaagacagcctcacgtgcagtcctctggattgaagaatgggaagcattggggaaaaaagtctgatcaagaatgtttcaaagatttcaaagaccaggtgagttggtaaggggctgggccactgagtgaacacctctgatgtgaggtaaaaggacttggcagaaggagagaagggagactgcgctcttttgggtgtgttctaagggtgttcattagctaatggagaagggcttagaagagtgaaggagaagaacctagagctgtccctgatacttttttctttggtgtcccttctctccctcaaaagctttgggctttctctctaagggaacctgccttggcctggactgagaagacacagaagcaggcagctgagtgatggtgggaaaggcatttgaccttgccatcctcttccccagtatacacgctagccatcgggccagcctttctttactacagctggcaacagccccaaagtcctgaactgagaaagcaaaggaggaaacggtcacaggatagtgccacagaatctggaaagccaatcccagagatgatgctttttgagcaaaaacattcagctgacataagagcctattaagagccccaccccccacctcccatacacacagatcccgcgtgtgcctatgctgcagccacagtgcagtcacagggaagccagtgtctcggaattgtcctctgcttcctctcactggccccgtgtgcatccccctcacttcctctgctgtcaccttccccagccaggaaagtgtcccagccttgggcacgccccttccagatggctgtggaccctgaatgacaggttggacttttttttccatttggaaagaatccaaaaggttctaacccctgctttcacagtatgggcatctcccatcttctttgtgtctaatcacagtaacgcaaacacctccatgtgcaggtggtgagacctgggagggggtggtgagttggcaatagcctgatgggtgactcagcaatttattacactgtttgcttaggtgacaaacaagcctggcagttacccccgagcttagccaaagcccttcaaagttcctttcccttcagtctaaaggatgcatgtgcacacttcccaaagtcgcacaattagttgcatttatcaactcacgattgtcctttctttgtggagcagtgtttgaaagggaaagatgagtctccactcttcccctgctgctttcataatgcctgttttgttcacttgggatgaactctttcagagagctcagggctgcagcctgttcccctgctgtgtctaatatgctgggagtagttctctcctcatcatctctgtacctctgtctcggtcctgggaaagaaacccaatgccgagaacaccctccctcatcccccttgctacgtgggggcgatatctacctctgtttcttttgtgctgctttagttgcccacgtcttcttcctttgtgcttggcctgtctgaatttatctttctagatcaaggcgggtcctctggctttaagaaacatggttctcttggcatcaagtagattcccctccctgcccagtgatgtctgcaaaagaacagaggtggagactcatgacggtgccattgcaagagccaccaatgtgccgcagggccagctgcccacctgccagctacgctttcctggtgatcatgatctatattctttgattatcaacagaaatgccttaagagaatggttctgaatgtctctaggtctgcagaaattattgccagcccttcttcacttaccagagcacggtaaagatgaatttgacaggcaggagcctgaagacatatggtatttgtgctgtgggttttgtgtgtgatgagagttctcagctgtctgatttcctccaccaattccttcgacaaaagcctatgtgcttatgctgctggcctggcagaattttgagaatctctgactcactggcagagccttagaagggccatatcacccagcctcttggcttccaagcagtgatagcattaagtcatccccaataaaaaggaatttaccctcttttaaaatgcccttggagaaggaattcaatttggctctcttggatgtattttggcagctactatgaggaaattatttatatccaatctaaattctttaagttgaagaagtacttgggagattctagaagtctgaggggcaggcaatcactaagaatcagggtaaataacagagacacaaagtcctactaccgtggtatgacagatacagttgatactgcataaatcctgacaagtgaataaatggtatttttgcggtgtgtctggaaaaatattgggaaaactttcagaaagcctgtctgtaaacacctttagcaaacagaaaacaggtattcaaccacagagcatggtaaataagaatatctgccagataaatctaacattattctgtggctgagtgtcaggcctggtggttagagaggaagcatagtgtctaatctctcctggcctttgcacagttttggattctctcccacataacacaccttcagtaaactggggaaatgtggtcagaccacacagttaccaggtgagtg

SEQ ID NO: 49353 - DNA, 433 bp, Homo sapiens
atctacccacctcagcctcccaaagtgctgggattacaggtgtgagcgtggcccatatggtactcttaaggtcccacatgccctctaatatttaggtttatctttccatcattttgggtttctgtcctttcattcctcagtcccccaaattcctgcatgtgacacctaggaacaaagccagagagtaaatactatttccccatggtgacaggaacagcaggggggacagacagcagctggctgccagccagctgactcaccatggtttatcccttgatcctttcgcaggaaagactgtgtgctgtttgctgctggaggtaagtagattgtctttgggcgttttgaatggctttgaggtgctgctggcagagtgatggccgctgagacaggcttttgttttcacctgtactagtgatgtcctgggattggaggc

SEQ ID NO: 49354 - DNA, 2033 bp, Homo sapiens
tctcaggcaatcccatttcagtaaaaattcagtgttcccttccccatacgcttattcatggagatattttcatacttgcagcatcagtgtcctgtatttaaaaccttagcacagatgcctcatgaatggctgagccggctgcaaatactcaaggtggctccctgcaccatttttagaaagaacttgttgagaattttccaatatggcttttaagggactaaccccctcccaatagactttgagcaccacagtcgcttgtggcctgccatggttgtgtaagcacacttgggcttaggccagcacctggcttactcacttgacagcatggagtctccttcagcccccacttttgagggcaggtgcttggcaagtcattagccggtttctatcttatcagtgggttcaatctgcttttgtagctgcagtcaggatgctgcctataaacaccctgatttccaaggggccttcttccaaaagtaaactggagttggagagagaggcagggctggcaccttggcactgggagccgtgccaggagccaggccagctgtacttacagccgcttggtgaggtaacgattccccccagctgtggaaatggagacagactgcatttgagaaacttgcccaaagtcataagactattaagtggaggagcttgggctagaacctgggcctgttgtctcatttgtcaccatcgtagttagatactaaacttactgccatggtgtaaggggggatattgaatcagccttgctcagcagaggaggaaatgaagacacaggaaagtcaggtgataggacaggctgcgaatgcaggcagagctgtgccaagcagtttccatgccaggagtgcttgtgagcttttctggagtgcccattcccttctcagactgcagtacctctttaaaagatggcagggctgaggagccgaggaggcgttccttaagcaaaggttatgctaggtcttctttacccctcttcacctcctacccactgctgggcaacatgacctatcttgggcactaagttcttttgacaaatatgagtgtgggcctgtggtctacactgttcacaccaacaccagctcagttcccaaatccctaggctctgggatggtttcttcgtcatctggtcaccccatgcacattcattcagttaggagggaaagcaggctttcttgagtacctactatatatcaggcactgtgtaagctgcttttcactcaccagctcatctacccaataaccctaccatgtggtatgataccgttagttgccttgttatagatggggaaattactattatttttttttcttcttagatatcagatgggggaaattaaagcttagcaagattgtgaaacaagaccaaggtcacgcagacctcagcagctggcaggaaagcccaggcttgcctggccccagagccaatgccctttctaccatgccaccctgcctgggatgttcctttccctccacgctttagaaatgcaactgggatgattcttacaagggcatttcccattccagagctgctgtgaagtcatgtaacttaggatcctttttaacttttcccctgtggtggcattcccccttcctcctcctcttctatttgtcatttatactaaggtgcaaatttctggcatcaccactattgggcaggatctggggagtcccaggggctttccagggccctgaaatacttccatcagcccccagggatgccctcacaagacacctagactagctaaaaggaaaaactacagaaatagaatctgtggggagacaagcacatgtacaccttgccagcggtactttcaagggattacatttttctggagagcaacctggtgataataacaggaactaaaaagcatccatagcctttcatctggtaatctggtaatgtaagtttggaaaataggcctccaggaaatatcccaaagggaaaaaaaaagttcaaagatattctcagcactgtttactacagttaaaaaaaaaaatactacaagcaacctgaataatccataata

SEQ ID NO: 49355 - DNA, 745 bp, Homo sapiens
taagatgcattgcttaataggctctgtcttttttaaaactgtttaagttcatccaagaagataaaaacagacaacaacaaaacactaacatatccttaagcagaaaaggtggaagagagaaagtaggtgccaatacaaatgcaggaaggagacaaaaatatgggttaaaatgaaagctatttcattcattcattcactcttttttttttttttttcttagcatttccttggcacctaccatgtgccagacactgggctatgagccctgggttattacagtgatgatacaataggttgctgtcactgctagacctttgtcatcagagggcttcctgtgctcaggggacagcactctccagatcctggctcgctgccacagttgtcactctgagtggaggagaacggacgcggccctcagaaggcaagctgctgcccgaaggacctgagtctgccggactccacctggagccagaaccacgatcctcttcataacatgaggccttttatggctctatctgctccccactgtctgggcccagtggtagcagaggggttgacaaggactccacatgcatggcactgaacttctccatcagagtagccccctccaaaaccacaaacacacaccgcacaagtcacatgtgtttaaacacaggagtcaccacagctttggtgaaaactgggggctaccagcttgcagataagctgttgaattctaccttaggatgacacagctgatatcgcc

SEQ ID NO: 49356 - DNA, 1053 bp, Homo sapiens
cagcctggcccacatgggaaaactccgtctctactaaaaatacaaaaattagccaggtgtggtggcatgtgtctgtaatcccagctactcgggaggccgaggcaggagaatcgcttgaaccttggagatggaggtagcaatgaaccgagattgcgacactgcactccagcctgagagacagagtgagactctgtctcaaaaaaacaaaacaaaacaaaaaaccccccaaaacaaacctgcacatgtaccccttgaatctaaaagctgaaattttaaaataaatacataaaaatacctgaacagctggaccgaatcttcccaacgctgtcttgaggcagcatcagtgacctttgccctggtgccttgagctaaggcctcatggcttgccaggccccgtggagggaggatcctggctgcaggaggcagagcaggtgccaggctgcacttccacatcagagaacacacagtgcagcagccacttctttacttttggacagcagggccagggcccccaaatctgtgattttttaaaaggtcctgaggtgattttcatgctccatgagcttcgggagtcactggaaatgccgaccaaacatgctgtctttggaatcagaaagatctgggctcaaatcccagctctgtcactcattagctctgggacttggggaaataacttaaccccctgagccccagtctccttacctgtaaaatggggacaataatacccacatcatggagttacaacaggacaggtgctcgagtacactgagtccctcatcttagcgcacatcacacgctgtaattactggtttactggtctaagtgtcctgtgcctggacacacccagagggcaggtgtcctgtttactcttttatctccagcgtttagcacagggttttgccctcaagagcactcactctattcactgtggaataaatgggtgttgggaggattgataacatgtagaaggtggctaccacagtgccaactcatgggagacgcttaacattaagttcccctgatacatgataatgtccattaaaaacacacaca

SEQ ID NO: 49357 - DNA, 1927 bp, Homo sapiens
tttctgttctccttggagtggcagttggcagcggcaaacaggaagttgtcttgaagtagggtgtggttatgccctgtcaacatatgcgtacagacacatactttttttttttttttttcctttctggcccccttttctctcccttctttagaagcaaaaggtctgagttattttggtgaaaacaaactttttacatgatttaagatcaaccatcactaccacacaaacaaaaacccaggacagaaaggggcctaaaacacagcaaagggtctattttcctgccaccagtcactcgcttgtggcatttagttaggaactgactgtgtgtgtgagtgggtgtgctttttcccctttatttctctgggcacacaggaaacagagccctagctagaaaccagccagacacgctgcccagcatcctagtgagcccgtcagtccacctgtgggccagtcgcctgcgttgattcagggcctgcagtgtgcatgcactggacaaggaccatcgtggacaggaaagaaggaaaaaaccagggtgctagtttcaaacaatttgtacagtttgaatagaaaggaccctgaacatgtcttaacacaaagtacatataaaaacaacaaagaaacacaatgactgagtagataagtgcactgagtagataatacacggacataaacatggggcgttggggttgacacgccgggaaggttcattgcagctggcttcccggtgctctgaaaggtgtgctagaaaattttccactccactccttctcaggccggaggctggtgcctccagaagggctgtccaaaatagactggtccccaacccagcctcctactcctgacctctttctgaggcagctactctccccgctccccgcctcagccctgtctcggctccagctccagcccacagccggagagcactgtctatgctaacactcattttgctaaatgcctcgtgggctgccagcatgatctgcctgccaggatctctgttccgtgacctgcgcccagccccacgccgtcctgtgtggccctcgtgccctgcgctcacacttacacatcccggggaggctgccttgccgtttggataaggaggctgacacacgctgggcaacgcgactcgtggtagtagatgtttcctggctcctggatgagggccctggccagtcagaacgcaccacttcccctttaagagagcacgcccagacgagattagggaaaggcagaaagaaaagcccggaacagtcagggttgtatcctgaatttggcagatgaacttgggtattcctgaaccacacacacaaggtgtggtcagaggcagcaggctcctcagaggagtatcagagccagcgctgtgtgtgcagggctgggcctttccgcagccctggagctgctgtctgtctggcctgggtccccggtccccaggcagcctgaagacacctcaggccttcccactccctcttcgctcagggtctgaccatcttgataggcagagtccacttcattacctagcactatgccttagagagagtagagaggtcattataatgattggaaaatacttttgtgggttgttggaactattgatttaagcagggagatttcattcattctggatatttagaaagtttggtccctgatcttggccaaggacagtagatttggaggggggagaatgcctaccaaaacaatggttcacaaaggccacacgttatatgaaatgtccagaataggtaaaaccatagagacagaaagccgacttgtggttgtcaggggcaggctgggaaaagaaggcggggggagtgactgcttaatgggcacagggtcttctttaggggtgatggttgcacaacattgtgaaggtactcaataccactgaattgtacattttaaaatggttaattttctgtgatgcaaatttcac

SEQ ID NO: 49358 - DNA, 491 bp, Homo sapiens
tgtttggaatgtagtaggggggtgttgagggggtataaactgaccacccatctgaccagccctcgttttcagtcatttgcagctttggctggagattgtctgttcccaacagttaggctgtgggcgttgttccctgatcccaggctagcaggtcaagggcccctgggcacattcccttcacccaggggactgtggagtagaggcctgctggatgttgcaatgcttagaagaaacacagatgaaagggcaggcccgaggcctgggaacctgagtctttccagagaaaaacgtgagttgctttcctagtatctctgcaaagagtttcaggatgacctggaggacagagatgggaacagctactcttgggccagctctcccagagcaatctggaccttctagagcattggcccctgcctcttgcagccctgctctccctccctatctcaggtgcccgtgtaggctcttggtagccttacacctgaggtagcgta

SEQ ID NO: 49359 - DNA, 1035 bp, Homo sapiens
tgcacgtgggcactgtccaaccccagtggccacagggaaggcagggtattttgcagaattggagccagcaagtaagcagtccgaattccgagttcctgggtgccaactggagtgagctgagtgatcactaaaaaacaatataaatgggatccacttccaccttcaggatgggcaggattaaggcgtatttaaggaagccacaacacagcagtttgctctactcactgttccaaagaggcagggtcatatctaccttttggtgtgtgtgcctggaggctccggggagaggtggacacagataaccctgaaacctcccaggcagggaatcacctcttcacacacagtttgcatctctgcagttgacggcaggagcaaaaaatgtggccagccaggttggaagggtgacaactgatggaggcatggaaccaccttcggcttggggccaacccaggttactaatcacaggtcaggtattcaggtcagatgtccaccattcacacgggctctttgtctgccaaggcctgggtccaggctatgagtgttcaaaaatagaacaggaagttcagaaaaaagcagaagccaagagaaggttacagcatgggagggcaggcttgggagagaggatttatcttgtggggaggacctcccagtttaggagagaagcacctgctctaggcacaggaagacatcacaaacaggtgatgaacagcagccgggaagcaaggggcctgttgtgtttccatgttacatcctgattccaggatgagcaagactaggaaacagaccagtttacagtggccaccagcctcacagactgtacctattaaaatggaatgattcttctgtccttttgtgagcaggagccgaagaacaggtaaatgaagggaagcaaaggaaagagaaagaggcctggatgggtgaggggagcatttgtgatcttggcccactcagcgcccatcccccttcttctcttcttccagtaacagcaccttgattttcctcctgggagcaccctcctccacattcagtctggga

SEQ ID NO: 49360 - DNA, 864 bp, Homo sapiens
tcctgcatcagattgtcacctctaagttattttcctgatccttgccagtggcgttctgccaccagctgaatcttctccctaacagctcgtggcattcggcgtaaaactgcagcctttagcaggacttgcatttggaattgttacaagtgctttgtgcaggcttcaccagaaacacgtgcactgcagaattgctgcctggatcaagatctgactggtgcatgtagcagggagatgacattttgggccagtgcagtgatgtgattagttggggatttcccctttaaaaacttacggcaaaagcctgcctgagacaattcaatattcataaatggaaagcatagatggcgtttctgctctgccaagagcaatagctatttatcatggcaaatgactgaaatagttgtacatacaatgctttactcagcgctgtaaattacagtatacagaagattaagcttaagcctaatgctacccttgagcttcaacagctgagtcctataaatggatacccgttaagaggagagaatctttttcctggttactacttaggagtgtatctctattaaaagcttgtcttaaacataaattaccaggaagcctgccccttaccccaggcagacttttcctcagggcattgactcacatgagtcacatctaaatgacacagtgacaggcctgagactataagtgtgtgctgtgctgacctcaagagggacagcagaggaaatgggggtggaggtggagggacttcacagagcactgaatgaccactcacttttagccagtctgatctgagcccaaggagggatggagagaccctgccagaccttaaggagacctttagaattaaaataatcctgaacc

SEQ ID NO: 49361 - DNA, 1758 bp, Homo sapiens
tgggagtatttacacgatggaaatcggcatccactacaaaccaggacttcttcccgcagagagctggttgttaaaacatttacaccagcacttcgctgactagtgtccccttctagcatcactgcttcctggctcgatttctccagctataaaatggaaaattatattcatcatgtaccatactgggacgcagacaggttttatgaactgaactgaaatggaaatcattatattaatttaaaattatggttaccgcatcaattattgacctaagaacttatgcccaacagagccaggtaaacaagttgatcacctcctgtgtcaaatgaggctataaattgtcatgggtggggtgggggatggggaattaggttactggagttctttccaatgtctattgacttaatgcttactcattaaagattattcaggagattactcacagatcaggcttgtagcattaaatcaggtctgcttataaatttatcacactcttctcagtgcctctgtttcgagcaagcagccctccacttcccttactgaacttctggtacaattcccattcatggcagagtccatcacattcacgttatcagcttggtctggcactcagcctgcttcccaatagcactgaggttctcccaggcctctgtccactctcacagccttcctcccgctgaaatctgcttctcacacccccaggtggcagaggagggagggatggaacagaactcagttgtgacgtaaggagacacaaagtttgggacaacagaatggttcctacaaaagtaaagtactaactgacttcccagtgtagttggtaaagtgcttctgaagtcaacactgaaaaagaaactggcagcatgggagcagcgttttattccagataaacagccttctagagagaacacttttgacaagcaaagtcatgtgtttataaactttagtttatatccaatattcacttttgaaaatggttacagttaaggaaaaggcagggtgacatctccaattctctatttacacaggacttgtttctaagatgggaagacagctggttttgtggattcaggatcaagctagatgctgcgtgcctttgaatttgcccctggataccttccaaggctcgagactttgacattatgaagcaacaactggtgagagctcaaatgatgaaaaccttaagagagactaaataaggcttgattcctcccttttgcaagcaggaattccaggtgaagcaccagatgtacagagaagctgcaagaagcagacactactttgaaggcagtcggacagcctattggcaatcagtgatatctacgctcaccatagagaatcccacggtcggaaaaaagaagacagcaaaacagacaaccttaaattctagtttcttggaaaaaataacacagctcctgaaaatggccttagatttcagggttgtgaaactacctcagtcgctataggaattacaaaaatgtcaagatggcatacgctataatgctatagctattaacataattttatataatttaaacattatgcttttcattttaacttactctaaaaggtactgtaatgaaaaaaattggggctgtatttatgttaatttaaacattccaagctctttccaggaaggtagatgtgagctctacctaaaaagtaagtcttagctgggcgtggtggctcacgcctgtaatcccagcactttgggaggccgaggcgggcagatcatgaggtcaagaaattgagaccatc

SEQ ID NO: 49362 - DNA, 1339 bp, Homo sapiens
aaggtggtctagctaagcatcagcccccagtccccagcctgctgttcagacacccccagctgccttttaaaaggtcacccataaggagccgtaagccctgcagttggccctgtttcagcagataccactggggaaacacagacctttcctttaaattcctcccctcagcagtcaggtgagtcagggaaaattcaatccaatttcccagcaaatcctactatgctctggaaggacatggtttgaaaaatctatttttgtgcttttatttacttaaggtctgcatgcctgaggaagttttttcatagtgccatcaaactgcttcttgcttaccaggaaaaacaaagatcccacctttctgtaacaccaccagcccagccacagaatccagaggaactgcagctccaggcccttgattcccagcagcagaaggctcactccagcaccctgcacagcagcctggctctagcgtggggctttcccctccctgggctgcccagggctcacacagttttgtttttcctggtttaaatgaagtttctgattcagaggcatgacctgtctctatggggtttgtgtctgtgattccagcagcttcgtagtgtaaactgctggggtcagggctgggtatctctggatggtcccatctttctagaagggtcaaatgcccacatgagaaaacaaaaccccttcaatctattcaggacttggagttgtctgtattggtaaacttagactttgtcccacatctactttctacccctgtgtcaaatccgtcagccagccaacttcaactgagactcttaacaggactcaatgcaacacacgggcttcactctccacctgcccagcagtggtgggttgtagagtggcccctacattgccatgggaggccagggagggcagtgggccgaagcagagggcatccatgcatccacaccacagggctctgaaagaaatggccaagggcccttcttctctgccctagctctttctcagctcccctgggagcgtggcctgctgggaccccatgagtcagtgctcccctgctggccccaccctgatgtccaggatcctatctagtggagggacggctccagccctggctgctgtgagaaggtggcaggacttgagcagtatcctcggtgctctgggcctttatcactaacttttcaaggcatgagacctctctggggccctagaacaccttccacctttactgctgagataaggcagcgggacaggttaatgggtccatacctaactgtgcattggaatctttcaggagctcttaggggacagatgactgggttccagccagcctgactgaactggaaattct

SEQ ID NO: 49363 - DNA, 1783 bp, Homo sapiens
ggtagattgtgaggctggagcacatctaggggatggtgttccgcacagagggaagagctagtgcaaaggtccagagaaggggagagcctaggacgtatgagggagagcaaagaagccagcctgtgtgcaggagccaacgcgagccagcgtagaggcactgaagccggggatggcatgggggcggcggaaaggctgtgccagtgactctgagtggtgtgggaagctatgcaggcttttgagcagaggagtgacatgaactgatacttggcttttatagtaatttaggtgatggtggctcagatcagggcagcagaagtggaggtgggagaagcagttggttttgaacctaacctgtttcctagtggactagatgtggatgggagaaaaagatgggagtcaaggatgacaccaagagttctgtccaaagcaactggaagaatgaagtggctatcagctaacctagaaaggccacagatgaagaaagttacggggtccctgaaaagatatggtgaagtcctatccccaatacttgtgaatgtggtcttatttggaaacagcgtctctgcagaagtgatcaagttaagatgaggtcattagggtgggccttaatccaatatgactggcgtccttatacgacgaggagaagagacacagacaggcctggagatgatgtgaaggtggacagggagaacaccatgtgataaaggaggcagagccgggagtgacacagctataagacatggaaagccaaggatggctagccacaccggaagcatgcaacagattctgccctggaagcttcagagagagcgcagccctgccagcaccttgactttggactttggtctccagaacagagagagaatgaatttctgttattttaagccatctagtttgtggtactttgttgcggcagccctagcaaactattacagggggtaagctaacaattcagttttccacatgttaaatgctggagatgtcaagcaggtggtgggatgtctgagtcccaagttcaggagaaaagcccaggctgctgacaggagtctgggacatgtctgcaaatagaatgcatttatagccatggggctggatgagggcagcaaggaataaaagtatacatgggaagggaagagggccaaggattgagcctggggcactccaaagctgagactgggagaagcagaaactggcaaaggactctgagttggagcagcccaggaggtagaagaaaaaccaagagtgccaagtcctggggcctgcatttcttccctggccccatggctcctggtgggccaaggcctccctgctgacctacctgcagccacctctcctcttcccctcacaggctaagtcccagagagcccactgaacagaccactctcaactgcccccataccttgtcttcagacaaattgtctcctctgccagcttcccctttcccttctgttttctgggtctcagcctaagagctcccctgccttgtgaatgctttggaccaccccaggcacagggaggcaccctgctcccttctcaagcccccctggatgctaaccttgcctcaaccttagtgctcatctcctatcccggggttgatggggatgtctgtctctgtacacaaccagctccctggcacagagcaggcctgcaataagcatttgttgaaactgatgaatccaaacatggatggctgaaatgggactcttctggcagctaccgtattaacactaagtttggagtcaacgaaaacatatgaactttaaaagcaaggtttcttaagtta

SEQ ID NO: 49364 - DNA, 723 bp, Homo sapiens
aagtggttgcctctagggagacaggactagcagtgggtagagacagggcaagggactgctattgaattaagtttttagtacaacttggcttttaaactgtacatatattactttgggggaaaaaagcacataaaaagtttaataagaacactagcctggagaactgggttctggctcaatgtctgtcaccagccaactgtgtttggttgagcaagacactttgatctcaggtctcagttgcttcatctataaaacaaggagttggagtccttcccaactgtccaattctatgactgcatggttctaatgtgcaaatttgggttctctgccaatgttggtggtatcatccaaacttgaattactggactgtaatattatttagcactgtgctaagaaaatagcattttattacatagacatatacctaaaaaatggagacatttggaaaaatgtgcaataagggagtcttgtgatttgccagacacagaggaatgtaaattgtgactattttgcagaagaatgcaatatggaagaaaacacaggatcgtcaaagaagataaaacaacatggccaccaagaaaaaaacaaagcaataataatcaaatagacaaggagggttagacccagaccaggtctaaatgagaaggaggctggacagtggagaaataggaccttcccatggtttttatacaggtgaacagagaagtctgaatggtagatgat

SEQ ID NO: 49365 - DNA, 1833 bp, Homo sapiens
aacacccacaaatatacactcattgagaagatccacactactgccagggtccccatcttcaacgtaaccaaaatcatagatttcagcatgcattatcaaaatgcatttactaaagtaaggctacttccaaagacagaggagaaaatataaaacttccttttcaaactggccaaagacagagtattgtttacattccaagcaaaatcacaagcacttaacaactggatgttactacgaccttacagggaccttctctggaaagaagaggttgaaaagaaaacagtagttgttgcaaactgtgcaaatcaggttttctaaaacattccctgcaggaaagctgttgtggggctcaaagcttaccctttgggggcaagccttctaagtaggcagtaataagaagcctccttgtcactggggacacacgaagtggctcactcaaagctaatagtggtagatgttaccccatcccccgacagccccattttaaagatgaggacaagaaggccctgggaggctcagttatttatcctactaggtcacgacaagtataggaggtagatccagaaatgacctgggggtctgtccctataactggagcctctatggcagagctggaagaggggctggagtctttatttcacttcatcccactcttcaacttgagcaggggttccatgtttatctgttttactgactcggctttgccttaagattttctttggaaaatgattctatccttcaaacaacaacatcaacaacaaagacaacggttttgaaaaccactgccccatacctgtgactagaagagttgtttaattccccctcccacccagccctgccccatggcgggtgtggggtatggccattgatgactgtggaagaggataagatgtcactgtgtaggaaatgttatacatacctaacgtgtgatttggcagtggaagataacatctgagtcatcaagcagccccacatcaaaacagtaaatcaaaagcaaatgatgtgggaaaacaaattcctgtattcttacagagcctgtgttgggaggattcccatcccagggctcttaacccataaatcaacaaatctctctcttctctaagaggcagctagaaccaacattcctgcttccacttctgtgccaggaaagggagattaggacagtgcctgctatgccatgtcaggtccagtggccttccatgggacctgcacttcctgggactgcacttcctgggaccccagctgcaaagagtgtttcacttctgcagagcagtaagcatttgaaaaggcagggttcacagagctgtcctattgagactttagagacatcttcaagtccagtgcttctcaatctacgtccacaggagcctgggataccttggaagtatctcagttcattctgggggcatctgccccttcttcaaccacaacagttcctctttttgcgttttatacagagggctctgtgtaaagtttggataaagaatgaggtgctccagtccacctttaccgtagatggggtgactggggcctagagagcaaaagtaagttgtgcagtgtacacacttgttggtgaccaagctccaccctgcctgaccaatgcatgccctttatgctaccctggttacatgaagaattctacttcaaaatagctgtataaatgcaaatgccatgtagtctcttcactgtagcgagaaaggctgaaagcacattaggctcattcaggaggtctcctaaattgctctgggaaaaccctgggagatttaaaatgcctagaaagcaatttgttgtaacagcgcttccaaatttccaatttccaactctgtgggctga

SEQ ID NO: 49366 - DNA, 2728 bp, Homo sapiens
gtgcagtaaacttctgccttcaacagtctcacccccctttaccccccccccagttgtatttatactttgaaagaagttaacatgaagcagtagtcacctgggcgtgctcaatttttgacaagccttagtcactctgtacccagcagaacaattcacattatattcgaaatcctgtgaagattctgccacacatgctaacactaaaatgccagtagctccacttaccttctttattaagcctcataacctccctgctttttccaccctcttttccagcctcttctaaatctacatctgcagatgaaaaagaaaaggaaaacagaaaataaggaaaaaaggggggaaaaaagccaaagtcaaggggggagggagagtgtttatttgcaaacagatcgatataaatactgtatatgaaattctttcaaaaattgacaatgcaacattttctcccaagtctgggtttccatctacctggcccagataggtacccaaaaaactatgcaagcagcaacaaagtagccttttaaacggacaacaccgtggggctgcgagcccaccccgcgggctgccacggggagccgggcacagacagacagacagccctggcagccgggcctctccctgtgcattgatgatctgtctctgtgtgtatttatttagagagagagggagaagcatggaggacaccgggggccactctctctctcacacacacactttttcccagtggctctaggtgaatggaaaggttacaggataataaaaggaggaggaggtggtggggttcttactgtcggagcagtgtaatttggcggcgtcgatccaggaggaccagggtttgcccagaaacgcctccggactgggcactttgcgatccagtgtcgccattgctcttccttcttgttgctttttccctgttccttcggcagcagcagccgagagacacgggattcgagaacgctccgacgtcatcttcggaacgttccgacattgagtgttctgaaagggggagggagggaggaagggcgggatgggaggagggcggcggaggaggaggggagagggagcggaggaggggcgggcgctcgggctcccggagccggctcggtggggctcgcgcgcccgcggccgccaggggcagcagagaggcacctgcagtccgcgcccgcccgcccgccggggccgcccgcctgccggggaggggcagcgcggacgggcgagcgccgcgtgcgggagagcgaaggctgcagcgcgcccggcagccgggatgcagcggcgccgcccaagcctggggcgcaggggtcggggcacacggggataggcccgacgcggggccgaaggaagggtggtctttcccgcagagttgccgctggaggaccgaaagttttgcaggcagcccttgcttccagcttgtcgctctctccccgcgtccctgtcgcccaacgcgaggcgcccccgctggggtcccgacggcttggtggggaggagccgtgaggggttgcgccccccacccccacccgagccagggaagggaccctggtgacctcgcctcccagccctcacccccgtcacccctttcttctctttcctggaggactttggaccatggagattctgcagttgttgctctaggagctgaaaccagtgggtagatgtcgttctgaaacgcaggtgagtttggagcgctacgagctaccttcccatctcaggctgcggggcgtgcaaaactcaaaagttagggcccccggacccccgggttccccgcgcggtgcgtatctccggctctcagagaaccactgcatggactttgctccagggtcagcagagcgggagggcgaatttacggctcttggaagacgacgctaacgggcctagcccctgagccgtttccagcgctccctgccgtgagacgagggtggcccgggtttgcgcaggcaacctttggccaggaatctgattcctgggagaattcacttcaggcttaactgctctagccagctagaaagggagcgctagatttcctctggattttggacgttgggtgctttagttgagattttcaccctttaaagaaggctttaaaaagtcttctgttacttctttttaacaaatccttttgtttactagaattatctaaactatatggacaccgccctcaccccacaagcgacatatttttttttctctttcgccagcacccttttagctctcaccactgctgtttcccaagttgtcacagctgaagcgcactgattggaagttgctttgtactgactgagttctgccctggctgaaccatctaataatttccctgagcttggcaccctgtatcgctaagccagtgttaggatgggcgatgaaggaggagctgcggatttgcctttagttgtgatgtttgtgtgagtcggcttgtttgtgtcagactcagataaactgcatttgcctttgctctctttcgaagggctcctacatagctaaggtgtcgctgggtgaagaattcccattgtaagaattggtggtgttaacaaatatgtattacttgttgacctcttgttatatgctagaccctgggcttgacatttccttccttccttccttccttccatctgtccatcttaagtcaaccaatattgcctgtcatggaacagctgtgccctcctgtcaggagggaaagatgagtgagacccatcctcaccctcacagagatgcagtctggtggtctctggaa

SEQ ID NO: 49367 - DNA, 568 bp, Homo sapiens
tagaagccagccacaaggaaaggcaaaatcacctttaacagcatgaacggttatgaatagattcagcacaggatactccaccaataaaagaccattaggcctcagagctgggtagaggacttgcaaaactactccaagattgcgaggtatttaaggcaacctcactcccagactaacctggtgccacttggcaaacaccacaattgcacaacttctggatgttaacatagtctacagtccagttgcaggtgtcaaagaatgcgtctgctccagccctgcagcctgggctgcagttcctttttcaatccttgaccctcaatttatctgctgctattaaatggctatgtaatgctttccatcagcacctgatgctgggttaggttcagaaggagagctcagtgcctttgggctgacaggtggctcctggagcaaagtctaggcagcttattaacagttatgacatcccagcccggactcaggctcaggtatgggcccacacagctctgcagattcttcaagaacccccagaggaaggtgatggctgcagggctggagcagatgcattctt

SEQ ID NO: 49368 - DNA, 720 bp, Homo sapiens
aagggcaacgaaagggacccctcctctgcagttccaggggcggaggtcttcagcctaaagcccagcctcgcgtcccaaggctgcataagggcgggtgcggagagggctgagaagccctgacctgcagcacccgccatcctcccagccttataccttctccagtccaactatgtcaaagccaagcacgcaagcaggtcaaaacagaacaaagtgacaatggcatggttctgccacagtctctgacacttgctcttgaatgtttgttccttccttggaggctgtgggcgcggtctctgctgtggagttcttgagagcaggtggcagagcgggtgaggtcagcgcggctgctggaggcggtgtgctgtgctcccgcagggaggagggcggcgtggaggaggcgggcgccccctgctgcccgcgcgggctcctgcaggctcccagcctttcgtaccgtggcccctgaggctttcccaggctgatgatgaatgagcccagggcccgacggaggcatccgaggcacgtgacaacccccgctctggttgtaaattgtcaggcgattcagtgaaagcgctttgcaagctgtttgtgagcaagaggcggagcagtttggctgattcagaatgggctggacacagtcaactttgcatggggagagaaacatggtctgatggctgggagcgagggcagctcgcttttgaggcagggattgctgaatgaggg

SEQ ID NO: 49369 - DNA, 1672 bp, Homo sapiens
cctctgctggccatatgcttacttcctttatcctcccatcagctctgtgaagcacccaccactttagtgcggaggaagccgagccttagagaggtcaaggcctttatttcagcctcccagccagcaggcagcagggctccaaatcggaacccagatttattggaccccaaatcataggctgtgacagggctcgttattaaccaggccataaatacttcctgagtccctatcccgtccctggaactgctggggacatgaaaggcacaggaggcaggggcccgacctcacggggttggagcagacctaaagtgggatgagagcagaggaaccctgcggctggggctctccactcttccatcacgctctgtccagcagggcaactggagggagccatgagcatgcgatgacctggcggctgctcaggatgggagggaccactgtcagccaggactggcaggactgtgtgagtcatcctagtgggtgagggagtcttcctgggctctgggagctatgagtccatgattcctgggcatgtgaggaagctggttaggagctcagccaaaacttaaactctcaatccagcactctttacactcccaccacatctgagctgagacttgaaggggtggggcatgggtgattctggtcccagggactagagcctgggggctcccaccttttcctctggttctgcactgacctgccctctggttctgccctgacctgcccttgccaagcccactgggccggcgaacagttgtttccattttccctgcagcctctgttctgggaaccaggccagcattcatagcctttcccctccttttctttttgtaatagaaactgctcagggctgccaggagccagcagtgtgctccgcggctcaccgtttggctggactggaggtgaagcttcttggtggctccttcccagccttctatggaagctggaatccactctcccgaggccatttctcctcccggggttccctctctgcagcctcaaccccccagtgccctttgtcccctaaagcgagcagtttgttttcagtccaatacctccaggggatgggggggggcgcctggaggagtgtcccaggagagggtcccaccagccacgctgccctgaacccccttaaaatgggggtggtgtgacagtaacttagagaccacttagatgacctcaggcattctgagaaatctaaaggctgatctgaagccagaggaggaaagttcattcacctttgtcccagcccctccccgactccaggactctagcgttggctgtttttatttgcagtccagcgtccggaatgagcggagttccttttgggaaggatgtgcggcaggtgtgctcactctgcccgggagcgtctccccgccgaggagcgcccatgctgactgcgaattgttccacactgcacgcagagcattcctttagcagcctcttgttttcttaagtgactctctacaactgtttccttggaggcgtttgtctaaataagctcttcttctaggcaaactggtggggggaattgattcactatcctcagaaattaggaagcatgaaattatactggctctgctaccggggaacaaagagcaggggcgtggtgtgcagcggccagtgcagggcccaggacagggtgtgggggctaatcacagcccgcggg

SEQ ID NO: 49370 - DNA, 903 bp, Homo sapiens
attggtcttgaaaatagcactgcatacaagaaaaaaacacatgcatttatgaggcaagagtccctgaagtttcacatttacacaaaatgatgtgtgtcttttggtgggggaagcggatgtgaaattccctacagataagcccaggctagctgaccagatgaggtgagatttctttcaggtactgcctaagcaatcaatggccagagagggctgcggggctgggctgctgggctgcgaggctgctgggtgctgagggagcagggggaatgttccctggggtgtggctggccatggtgctcgccatcctggaacaaatcaactgaggcgcaaatctgcagcacctttgccacagccagaatccacggtggttcctccgtgagcacatgccctgaattccacctggcctgtgcgtcatgctcagttggcaggatatcagaaccaatgctgccaacaccagactctccacgtgcggagcaatttatgaaaccctggggccagcaatggccacctttgcatcctggagttaggatgaccctgacacatcccagccccagcatacaccaccgcgctgccctgaggctgggctctaccttttgagagctactgagctctgcagagatgtgggtgaagggagccacagacatatcagtctggcaggggcttagagtcactgctctaactgcctatctggcaggtgaagaaacagaggccagggcaggcaagccctgaccagggcagtgtacctgcttggtagacgagttctctccttcccccagtgcagtgcctactgtctctctttagctgtgcctagctgggttggggtcttttctctgggcttccctaaccactcctgctgacccctatctgagctccaacttctccctggaaaccacgcattaacct

SEQ ID NO: 49371 - DNA, 2237 bp, Homo sapiens
atttttaaatgctttaatcatggttttctttatacttaaatctggacttaggtttaaaaaaatcaagtatatttatttatgcgtctttcaagtagtcatttgtgtgaagtcagcactacttcagttttcagaaaacacacaaaatgttcagtgaatggtgaaattgcctaaccccttgcgcggttacaatggtccaagtaggaaatcacattaggtacccatcagagaaactgagtttctacgctgcttttaaaaacatcctcggtaggttatttagaacaggaaattgaaagttcttattcttcttcaccactctatcactaaggaaaagggcgaaaaagctatggatgtaaatgctgctgtctataaacacaacttgcctgcagaaatatgtagtgggccgcgaagtttgaaggaagcccgcagtgcctggtatattcaccaactcctccaagtaactgatcattgccaaggtcgaattaataagcgttctttgatgttaatgattgtgagtgttctcaggaaaggactaaaagctgactttctaaacaggatgttgtttggaaataccccaaacaaactcgatgtccattcctaacgtgttattaagtgaaccgatctgactcgatgcgttttgttaaaaggactttctttagtttccctggcccacagtttatttttttactatttttaactcggagcccatcttaaaaacaaattaagaacggaatgctcgccaaatcacgtctacaagacaaaatcggcttcccagggagctagacctcgagtgggcaccggcagggacgtaaccgctgagcctctccgcagagcgcgacgccggccgccgggtttcggttagaccgcagcaggaagttttcccttcctctgcgggaggcagtggagccaaggggaaatttgaactcccactccacggggacacccagaggggagctccggtgtgggagggtggctcccctgggagccaggcggccgaggagctcgtgattcgacgcccgccgcggcgtctccgccccgcgcggcccaggccgcggcctccctgccctccctgccgtccactcccagtcccggggcggcggcctcaaagcccgcgcggcagggctgcgtcccggctcgcaggtccccgtctccccgcctagggcgccgcgccgagcggcaggcgggcctggccggcgcgggctgcactcacccactcgaggaccttgatgaagccgagtggctccttgagcgggttgaggttgatctggaagccggacatcctctgaggaaaggagggagagagagtcaggacgacggggcggaggaggggaccgacgagaccagagcagcccggtggcgaggaagggcaggcggggctggcgcgctggccgggctcggaggcgggcccgggcggccgtggggcggggcggggcggagcggcggcggttgagctgctggctgagactctggggcggaaacggagtggggcggctggggaggcgaggggcgggccggggcggagaccgggaggcttctcctcaggccgcacctggccgagtcgactgatccgctggcgaaccaagtagatgttgggcgccatactgcgtgcgccgcgcccccttccctgcggttcagcccctggcactcggtcttcccctgcgcacgcgtgtacgcgtgcgctcgttgggcccgcgccgcgcttccggacccgcgcgactgcgaagagccctgacccgggggcgcccacgcccgctcctgcgcagcttgggggcgctggcctcagagacaccctcacttgaccccgagctcaccacagctgagctcactacaccgaagctgacctctccttcccttaacagatctcaacttttttatgaatttataatgtattggcacagatgaagttgtgtttcaaggcatgtgttaggggcctttgattaaaattgcaaaacaacagacttctggctaccgtgctgtggggtgcctcgaaagtgtgaatcaccaaatattcgtatggaaattaggtttattttcaaagttaccatcgcagccatggttgaaaaatgaagtaagtttatacctaaaaggaaaggcgtggccggacaggccctcggtgacctacactttcacctcttctacgctgtcggtcgacagtcctctttttaaggcatcgttggtatctttcttcaagaagctgacccctttaagattcggcttaggtgatactttcctcttggcac

SEQ ID NO: 49372 - DNA, 708 bp, Homo sapiens
agctttcaatcctgctgtgaatccagagtggctgtcatgggatctactgcagttaattttttcagaactcagagctaaatccctgaggaggcctgggctggagaggccacctgaatggtggcctgcttaaaggtgcggtcatgtttcctgatttaactgggtcagtttggttgtttatttttgccatttgatttcagggcagggttggcttcagtgtgctggcaattcccagatagtttatgctctgagggactgggacaggtgttcaagaacccccagtgactattatttaattttgttcctcccccagcctcatggtttatatatgagttgttatgtgacagagttctatttttaaccacagacatgctctgttcaactggaatcatgttctttagacactgcattatgcaagctggctccaaagtttgccagaagtgctaaactaaactgtgacaattcccagccgtagtcactgacacccccacagtgaaccaaacagcatgcttacttgcttcaagatagagtttcagttgtgttaaataactgtctggtgctacctgatgagaaagccatgtctggctgtttggatcagcttctctgatcttgtctcctgtctaatcccagaataaatcctttgggttttgggggaggacgttaaaaaggctctggtgaagaagattaaacctgaaacaagtcataatgagg

SEQ ID NO: 49373 - DNA, 756 bp, Homo sapiens
ttcctttgggaaggtttttctttttatatggatcccccagacccatcctcagaggttttgattctgtaggtctggatgggtgtcagtgggtatttatttccaaatctatccaggtgattgcagtacctggccatctgtgggtgagtgctggctcagggaagttggacatgtgctccccagtgtgggggtagcttgcttgggtgactggacaacacaggttattgcagtcttagataattggcttccacaaccacccagctcagcacaagacagcagggaggggttccagcggagtagagacaatggtgaagtcgtggtcttctggccggattctgcatctcaaatggcagctttgcatgaatgcagccgcagtgtggcaaatgggcacaggggggcagtgtggccccacgtggctccgaagccctctgattctgcatgaggcctgacccgggctggaatgccggctccaggaaagctgtgagctggtgaagggctctcccactgccttcttccccttccactcttagtccctgtcccacagaacctggctttcagatgattaaagttcatccaccatttactgagcatgaattatctcatgtcgaacactgtcctgggttatttcatttaatcttcataacaatccaagaaaggcatatgatttccaccctacgcagaggaagctgcagtttggggaagttaattagtttcccagtgatggcagagccaggattgagaccaaagcctgtctgactc

SEQ ID NO: 49374 - DNA, 2737 bp, Homo sapiens
catcattcctcccttctccacagccaggaatgcccctctggttggtggcctagcagagggtacagtctgcatcacacagtgaagtgctgccagctggcctgttctctcccaagccactgttttggggagccaccagccttgctctgagctccagcgttcatgtgtctgtcattcagtgtcctttcctgacatgggcattcaccaacaggactatgttccccaaagccttggcccatgacctctgaaagttccctgctgatgtgtgctgtggagtcgatagtccctctggccaagcaagcagatgcgtgtgcaaaactgcaggctgtcagtggcatttacaaagagaagaggaatgtgggtccagagatggggcaggcggccttgaggggaggagaggagaggagatgcatgtggaggggggttgtagcccctaggtcctggggccctgggatggaggaggtgcctgcctgggcatgaaccatcctgcctatcctcagctgatgtccttggcaacaggctgtcagccatcatcaaacctcctgtgaagccaagtgaagcaaagtcctccctttctccctaaatcctacatgtccaaggcaggagatgttcccctgactactactttagtaggtgcccagtgggtggcacctctagcccacagctccaacactagaagggctgtagggatcctttgtttggatctgctcatgttacagacaggcaagctgtagccctcagaggttgtaagtttcatggctggaaccctgacctcctgatatgagtcctcagcacccttctctctttcacgccaatattcacaatacctaacaatcaggattctgtaccaggcactatttcattttatttgtttgagacagggcctcgctctgtcacccaggctggagtgtggtggcatgatcacagctcacttcagcctcaacttccctgggctcaatcgatcctcctgcttcagccttctgggtagctgggactagaggcacatgccaccatgcctggctaattttccattttttgtagatacgaggtcccactatgttgccagggtgggctccaactcctgggtgcaagcgatccctgccttgacctcccaaagtgctgaaattataggtgtgagccactgtgttgggcccaccaggcactattgtaaacacttctcaggtattaactcatttagaccttgtgtgaggtaggcactgctatcatccccatttcacagatgaggacgctgagactcagagaggtaagtgacttgcccaaggtcctgcaggaattgaagctgggtgttctggctccagagcccaagttcttcactactgtgcatactgcctctcgcaggacttcctgggactgcctatttcatgtccatctcctgcaccagattgtaaacctcttgatgaaaaggattctgttttagtcccccttgggtcccccagattacgccagagcccaacacagtggaagctcaagcgaatgttggttgaatgaatggaagaagaaaagcatcagttaaaccattgttccttaccctgcatttcttggaaccaatgtctctgagagcttcctgagtatagggtgggacattttggcctctgggcagaacccagctgggtaagaaagcagcccttccctgggtgggaccctcctggcttctcgctccgcctgtgtgactatgaagcgggagcgctgcatattttcttcttcagagcaaacacctgggttgattgttttggcaactgtcctgcagactgaggagcacgcggagcatgtggagtgtccggctgactgctgtgactgtggcagcagcgtcacctctgtgtggggccagagacagtgagggctccctcttttgtgcctcagccgctgtgttcttgaggctcagacccacaaaggtctctgagtatccagttttctgaggctaatgcaggggaagggacccaatgtgggtaggggtaaggttggggtggggtgaggggtgccgagtagatggggcttgcactgggacctgggaaacatactgagagtcagagatttgcatgcagctgtattgcatgtggactggggaagccccgtggggagtcagggtggctcttcagaggtcctgaattgaggcagtggggctgagctttacaccctcttcatccaccagttatggggacatagtggctgcctcagggatgggagcagaccttgggcaagcagctccttaattagaagcaggcttcctagaaaggaggatttgtgagccatcagcaagcaacacttgggccagcatggtggctcatgcctgtaatcccagcactttgggaggtcaaggagggaggattgcttgaacccaggaatttgaggctgcaatgagctgtgatcaccccactacactatagcctgggcagcagagtgagaccctgtctctaataaattaataagcaatgctccccattgttggggaatgaggtgctaagtcttaaagaaggatctggggaggtaccacaacatctgtcagacacattcacctggaagacgacaagaaacagctatggctgtttcttcagcccatggctgtttctcttgtcatcttctaggtgagtgtatctggcagtggatgttgcggtgacttccaggtgattgtgtctggcagtggatgtcatggtgacggcgagagaaacagccccgggctgaagccatgctgagaagcagcaacaacaggagaaacaatggt

SEQ ID NO: 49375 - DNA, 961 bp, Homo sapiens
tctaaatggacagggatttttgttttattcactgctagaccccagggtctggaacagtgcctggcatatggaagatattcagtaaatgtttgctaaatgagtgactgaattgcatagagtggaatgagaggaagcacatgtttttatgaaatgattccttatagagaattttccatatccagatcaaaagaggcctgtgagtttagatcatccacagaaagatacaaatcacttcggaagagtgagcaataaactttaattcagtgtttactgtgtgctagaaacgacgctaaacattttcaccagcattatctctttaaatcattccaacaaccaaccctatcatgggagtctactgttcttattttacaaatgggagagttgaggcccagagaggttaaggaacttgtccagggttgcacagctaagtgtcagactcagaatgtgacctaatgctgtgagtccaaagtctgagtagactgctgcttcagagtgtggcccttcctagtgatacttctgtttaagtgtctgtttacttaacctctattggtccctttaaaaatcaaagtttacaagcttgaagctgtggctcatacactttgtgcttaaaaatgtttattttgattatgctaatattgcttcattgtttatttagctgagtttctgtgacacttgtaggaacatgtgctctcacctctgtgtacttttttttgttgtttttgagacaggatctggctctgtcacccaggctgggatgcagtggtgtgaacacagctcagtgcaaccaggctcaagtgatcctcccaactcagcctcccaaggagctgggactacagatgcatgccaccatacctggctaattttttgtatttttttgtacagatgggattttaccatgttcccaaggctggtcttgaactcctgagctcaagcgatctgcccgccttggcctctcaaagta

SEQ ID NO: 49376 - DNA, 928 bp, Homo sapiens
tttggagctgttgtaggttggcttcctaaagagcagtttctgatggagagattaatgtgccagagatttattaggggagctactagggttagcacctgtggggaaggaaagtaagccaaattgttcagagggaggagctgggccacagtgcattcatgactggcctctgcagctccatagagagcttggagctaggatggcccttcctgtcatgagatcaggctgtcctgggaagggggcataaccccaggcagggtggctctctgcaggtgagggcaattccagaacgggctggcagttgagggctgttagccaacattcccagcagcttgcgggacaggacctgctgtcctgctggggagctgggtggcaaagcagagcaaccacaacagctgcctacttttttaaaggtttttattaatcccctagcactggatctgaaagacccatgggatcaacgggctctgttgggaagtgctgacagtgcttgaggcattagttagggagagaaaggcttttaagtatatgtaagaggaaataggacgatattgggcagggtgagatttgtcagtagatgttaaggtagagggacctggatgagagtcaggaatcctacctggttatctagctcctaccagggctcaagctacaacactgactggacccttggtggcctcccctgtgaacccaggggacgaggaaagacttggtgactcccatctctcctcctggccctggcacgcgggagctctctaagtctcatcttttcttttgctttgtttttctgagactgagtctctgttgcccaggctggagtgcagtggtgtgatctaggctcactgcagcctctgcctcctgggttcaagcgattctctgcctcagcctcttgagtagctgggactacaggggtgcaccaccacgcttagct

SEQ ID NO: 49377 - DNA, 2457 bp, Homo sapiens
gattaaaaagatgtggcacatatacaccatggaatactgtacagccataaaaatggatgagttcatgtcctttgtagggacatggatgaagctggcaaccatcattctcagcaaactatcccagggacaaaataccaagcaccacatgttctcactcacaggtgagaattgaacaatgagaacacatggacacaggaagaggaacctcacacaccggggcctgtcatggggtggggggagggcgacgggataacattaggagatacacctaatgtaaatgacaagttaatgcgtacagcacaccaacatggcacatgtatacctatgtaacaaacctgcacgttgtggtcatgtaccctagaacttaaagtttaataatagtaaaaaaaaaaaggaaaaaaaagagaaaatgacatcagactcatatgtctattaggagaatcaaagtattacaggcaaggcatttaatatagtccctggtacctagtagacattcattaaatgtgttttccttctctttctgcaacacacaaatgcggtgtgttgtgggacacaggaactaacttgacaaatggtaaggataaaataaaacaaaaaaaaaggtaatatttgtgtagtagtttctggcagaggcagaccagatagagctaaaacactctaagttgctgaaaaagacttaaaaacttctgttaggcatagggtactggcctagctgttgtaactaagaaagccccacatataatggtttaaaaagatgggagtttatttttctccatgtaataacccagaagtaaactgttcacagctgacaaggcggctcgtctttctcaacacaggatttccatctttggctccaacggggttgctttggatcctgatatcatctaggtagcgggaagggggataaaggccaggggaagggaggatgtaaatttcttttaaggacatgactcagaaatgacacagctcattctcacccagcatgaccaaatccatgctgtaaagatgccaagaaaagtacacttgaactggccagagaaattctcagctaaaacacaggagtgctcttattaaagacagggaatatggatgttgctggacaggtagccatctcagccacatacctgtgttatgttttctctagtctaaaacttcaggctttcaaaaaacaaacaaaacaacaaagctaacataaactccaaaatataagcccaatttctttcttgttattcaataaatatttatagactacttactatgcactaggcactatttgaaacattgcagattcagcagactgcaaaacagatcagcttcccgatcccagaaagctgtattcaatagggagagaaggtaaacaaatgaaaaacagaaacaacagtagataccagtaagagcaaagatgaaaattaaggcaatggggaaatgagcgactgggtggctcctccctttgggtggttagggaagtcagccaggcattggaagagcgggaagcagaaagtgcctgcacgggaagctgcaagggcaaaggtcccgatgccgggaagatcttggagggtttgtgacacggaagggctggtgtggctggatttagtgggagagggagaaggttataaggggagagaagagatcagaaaggcagctgggagcaggcttgtagagggctttgctagccagggacagtttgttctctggcattttccagcactgattgcattgtacacaaagtaggcacccaatgagtgatgaatgaacaaactaaaagataaagacctgaggctgttgacactcatagctttcctttgctttacttggcaaagattaggattaacctctactcatcctttgcatacctctcgctcagaacctcaacacctctttctccttgcaagattgttcttagtgtccttggtagcccagtgtcccctggttaaaaatggccttagggaaagaatttgcggaaaagatggctatctgaagaagatgaccacatctcctttttggctttgtctattctgttcaacagctcccattctgattttttccatagggtttagcagatctggcatcagcctgccactcttggttagggttaagtttgaagaggcagtgtaacagtggagtggcaggatgggatggtagtgaaggctgtggcctttagagccagactgcccgagtaaggtacctagccttcttggtcatcaatttacttatctgtgaaatgggcaaccataatcgttcatgactgcaatattgaaagctttgaaactaagatttttagtaactcacttgaggcaacacctgtcctgagttaatctgaaactgtttggaaggaaaacttgacatgaaactacttataatcattatttattccattttttaaatattagtgcattttgtttgattaggagacagtcatagacccttccaggggagttatataatttataatgtaat

SEQ ID NO: 49378 - DNA, 715 bp, Homo sapiens
tatgtggttcggaaaagccccacaggtaattctgatcctctccctccctcctctacctactgatataaaagataaagcacctaaaccctgataaaagatacagagaatgggtgtgaaaaatataaaaactggaacactccacagcaggtactatttctcagaatgcatctttccctgcactgaacagtcctctgacagttctaaatgtggcatcctgtgcagcattgtgatctgagggcagacagagctctttgcccaaggcacatattatcccaaaagcttggtaaataaagccacagcattgtgctggaatgctgtatccttttagagtgccacacgttgttggcacactgttctggagcccagtgatacaatgtgttgtttcagccagccccggtcagaaaccctgagcaaacaagtcatctgactgaaaggaaaatggcagcaattatttccagtaaattgcaaatttaaaaatatttccgatgtttttgcatcttgttttagatgtgtctcttgtaagtagcaaatagattttaaaatttcttttaactgatttttttttttttttggacagagtttcgctcttgtcgcccagactggagtgcagtggcgtgatctcagctcaccacaacctctgcctcccaggttcaagcaattttcttgcctcagcctcctgagtagtgaggattacaggcatgcaccaccaggcctg

SEQ ID NO: 49379 - DNA, 720 bp, Homo sapiens
aaagtgaattttgagtctgggaagaaaaacatttaatacatgtgagacttcaaagaaagcttcctcttgccaactctgataatgcaatactatgttaatattttaataaatcactccaatagaagtttcaatgatacccaagaagactgaatccataactgaaacacaacagaaaaagaagataggcgctctgtattttgtccaacacaaaagatatttttattttcctaaataagcagtttcattttggtacacagtgcaaagtgaaaacttagagcaggtttacactgtcaacctcatgggaattcacaggggtgacaggctgaatagcaaagtccaagagtgaggctgacgtcaaggaagaaaacaattgttgcaaataaagcagatttttcattttatcaaaattacagcatctaatttagtatacaaagcaaaactgaattctttttcctgcttctaagaacatatttttcataccaatgaatgtaaagaaattacaagtacagatggtcacaaacatacaatggttcaacttaacaacggtgcaaaagtgattcgcattcagtggaacatcaataaattacttgagatattcaacactttactataaaataggttttgtgttagatgactgctcaactgtaggctactaagtgttctgagcacctgtagggtaagggaggctaaactacgaggtctagtaggttaggtataata

SEQ ID NO: 49380 - DNA, 3407 bp, Homo sapiens
aggtgacttttggggaaaaaatgaaaaatctaagatgaaaatattctgaagtttcatattataaaggatataaaacacaccagtctgacttgaaagttgacagaagtaaaatttattaaataggtgcaaattctaatagtgcaattaagtatggctcactagattagaaacctttaagataattcactattctaactaaaagcaccccagaaaactgatgttaaagtaattttacattccttatgtataatggttagaggaactgcaaactaaaggaagttgcattcttctgtttttaaaatttagactattcaacctccctttacatttggctaacatgtaaaaaaaaaatctgacagttattttagatttagttaagaaaaaaattctacaaaactatcaatgaggctattctaaaatcactatttaaaattttgaaaacactatgattgaaccaagagaacacaagaggaggttttaggaccaagtaaaggaccatacttgaggtattatcacgtatacttgacaatattcaagaatcatacttgatagtgttcggattttgcaatactttaaacttgcatctaaaagacaacttgttgatggatcttggctcgatttcaagaacctatctaaatatcataaacagcattttaagctgattggaaaaaaacagacaaaacttaagtaaaatggaattctctaaaatactttctcggaatatcggaggagggctaaaaacaaaggaaaaaaaaagaatcaaaacaaaaacatgagagtactatgttttaccactgtattccaaaccactatgctgctcaagtaaaatttactttacctcttcccttcactactgcgtgcttcatatcaactgaatgtggcagctacccacacaagtgttcaatgggcatgtgaacgcaacgctgtgccatttccctctccacatgttctctagggttaaaactacagttcctttaaatcctcgtgtttcattttccttttcacagaaatcctgtaatgaccctaaagcagataagagcagagcggcctctacacccagggataaggagcacgagcaatcactaggtgccaaggagtttgaaacggagcccggcggagtgggacaggggaatccactacggctaccggggccaggcgagtgtcctccgcgccggagccgcagaggaccgcggctgctccggcgcccgcgccaggacttctcccacctcgcgccccgggagacttacctgcccagccaggggcgagcgcgccgggctggcccgggggaaagccccgctcactctccactgcgggtccccggggccgttacctaactggtcccagctccaggccaagaggccgcgcttcagggaagggcatgcgctcgccggcgacgcccaagccccgagccccgagccccgagcaccggcgcccgggagtccgctggggcccgcctcagccccccgccgcgccgccgccgccgcgcgcccccaggccccgcctccaccgcccagccctccatcctcctcaagccacctcctgcccactgcggcgcctcctcacctgccccagccgccgccgcccgcgcctcccccgggcctccccgcgccgcgaccctagccccagccccagccccaaccccagccccagccgcccccgcccccctgccgcgcgctcgtccccagcgcgccccgctcctcctcatctgcccgggccccgagctttaccttgtaggagtcggtggccaggaggatgttgaactcggcttctgccgcaggattcatctcgggccggaggacaggggccgcgcgccgcgagctccctggcgcggctgcgaggaaggagaaaaatgagcttcaccgcgctccgttgcttaagtcactgctcggtcggcggaggagggggagagggggaaacggagagaggggaggggtcagaggagggcgggcccgggagccgtgacgcggcgcgggtgacggctgcggcggctcgcgtgctcgcagtctgggagctctggcggactccccacctcggttcccccgccttcaccccgtcaccctccgggggccgagaaagggcggggcgcggcagcgcgctgcgcagtgcgcggaggcggggcggggaggaggacgtgatgcacgcgctcttcctcccagacgccagctctgggaagctggaggcagcggggcagccccggcgcgtgacccgggcgcttacctaagttcgagttcccggcacgggcgcgggagggcggggcctggagggggcgttcccagctttgccagtgccacgaggagccggttcgcccgccccgcctgggaccttccgtcctacccagtcctggccggttttctgggtcctcctgaagtcacgccacccggctagggggcgaggagcctcctactgcccatcttcccgtccaccacgcgcagttactcacctttgtctccggcctggattaaggatccagcctttcgcctccatccctcttgtccctcctgatcctcctgaccctgtctttaagatcccaggagctgcggtgaggagtgaggctgaggggcccctttcatctgatgcagcgactccgctttcctccggcggctctgtctatggctgagctctttgatcctttgagagatggtttgacttttcccgagcaaagagcctgcgttgaaaagcgggggtggaattcagtcctcacagataatgaggggacaagacctaattgaaccgagtattgccgggaaggaaaaggcaacgggccaagcctttgacagggtgcgacactgacttttatcatcgttatagtctttaaatcctgggaaacgagttggcaaccccaaaataaagaagtgtaatgacgtctgatgacttcacccaaatacagaccattccaagaaagacttgcgcagttctcatgcgtggttgcgtttttgcataaaactaagattccctttgtccgcatgtttaatagcttaaaaataaattgaggtttttatcggataaaagtagccaggaaaaagtgatacagtgaaaacgattacaggatatttatagacttgtctttcaagttattagaagtctcattctatctgggggcagtgatggtggtggtggtagtggaacttgtgaattgagattcatagtggaacttgtgaattgagattcatctcgaaactggaggcatggctgagacttctaataaagacaacctcagtcaacactatgtcttgaagtcagtatatatttttgacaatcacctcatctacacgtagatacaatacagggcaaagatcatggaagtggaaggtatcaccaggcactcaccaatgtagtaaatactagtacacttacaattattttcagcaacgaggtttgaaacaagagggcttatgtatttattggtt

SEQ ID NO: 49381 - DNA, 1761 bp, Homo sapiens
ttcataccaagatagagtttgtgtttatataaacaacataaatttaaattagatttttaaaaaagttcttaattggtagtgtaaggtcccctctgtgcatcttctaagtggtttacatggaaatattcttgaaaaagcccaaatagatgaatagttgccacagccttgcagtgctatgcaattcaagttttaagaagatttgaaaaaagatagggtgggagaaggaaacagacattcattaagtatgtcgaccagtcatgttccaagcattgtgctgggtagtttacatatgctgttccatttaacatgcacagtcactttgcctggtgtttataccatccccacttaaaaatttagagactaagtctgttccttcttcctaatgctactgtttatttcctttcttttctcttgaacacgggcattttatgtttttaggacaagttattctaaataataaaaagagcaacaaccgctgtttattgggcattttctatgtactaggcattgtgacaaacattttacaaaaatttcataatttactctttataccaatcctttgaggtggggattacttcacaagaacagagagattagataccttgtgctgaattacatgtctagcaagcagtggagtggggtttgaaactggaaccattgactccagccgctctacactagtgtctctgtggtttccatgtggtccactcaatactgtgatgagctggttcacaggaatgtcaataagaaagaaaaataatgatgtaaataacaaagtatgtcatgaaaaccatttaatgttggttaattaaattatacaacatctgtggagctggaaaagaaaaatttcaggttttacaaatagtgcctaataaaacaattgaaaacacagtaagcatgattttatcagagttgaaagtacacaaagtgcacacaaaaattcagaagtacctttagtccacgttgtattttcttcctgtttagtcacttcctttagggaaatattgacaaatcccttacagccccccatttaaaacagtttaaccagtagattcttgaaattctgaacagggtctttagtgattaattaattgaatgctttttatattcgattcttattctctctgtgaggcacagctctaatgtttataaacctaactttgttcaacccccaataaagataggttggcctagtatacacggaaataggatgtcttacattgaaagtgcctttattatgtacattttatgctgttcttttctttcaatttctctttctccagcttttctcttatacagttccttaaacttacttctccattcttctttctggtttttctcaaatctttgttcacttcctcaaaaataaaactgaagtcattctccaagggttctttctggtcctgtgtctgtacttccaccttagagtcagtagtctcttatgtaagtttccgtatcctgactctaacttccctgaacaagctcttaactttctcctttctctctctccttttcttattttttttttgttgttatcaattgtctttgatagaagtttgtctttttaaaaaacatttttattccactctccttgtcctttaattgcttctgcccatttggttggcaagactgaatagcccatttctgcttctcgttttctgtatgcttcaaattaaagaaagtgttaattttaaacctgatcccctttctgtcaatctcctcttctcccaagaatggaggcttggcttctattggcttatg

SEQ ID NO: 49382 - DNA, 2279 bp, Homo sapiens
ctctaaaactcctgggctagaggaatccccttgccttagcacccccaaatagctccttctttctattagaaaatttatacataaagcctggccagtaacttggtctccatttattcttttctccaactatctattaatgatcctatacttttaaactgtgttaattattgtttaaattagctatcatatgggtcaaaatgtaaagaatctaatctaaagaagtttctctgttaccattggagcctggctattccatttccttacaggcaaccagcattattagcttcttgtctatcctttcttagtcttttgagtaaatatgaacaattaaatctcaaatctcttcttaactaagaatggggctgttactaaggtcatttgtttgtttcgtgtggggttaacagtgtaaggatttggccttgtctttccttttatggttttctgttttgatctcccatatttcagatttgtaaaacaagctctgagcagccagtggtccattcccatgtgctctctgtccctctgtcctcaagggcagagtgagcaatgtcactacgtcttttcatgaagtcacagtaaagcaaatattactgtactggggcagggcctttcgagttattttccatcccactctcaacttttattaatcttcagagtcactctggcaaaaggtttctctggcttcatatccagagatgaaaatctaagcttgtccctcattcaaattagtgggatctgtctctttactgttttcctcgcttctctgtaatctgaaagaatgttgttttttcaaaagtccattaccaaacaatgattcagggctcctaaactgttttaataaagaaaattttctatttgtcatttctcccatactttgtccgtgagtgggtgtgagggcaggctggacttggaaaaacactttaacatggacttgttgactggattccattattttgtgtgcccagaattcacccatttcctttcctgtgtattccctcctccttctaggaactgtcctttcttcttctccacatgcttaattgggagctgctaggtgagttcaaatgtaggttagaccctggccacaatttgttggtgcaggagtgaacgccggatctaaaatggatcaattgttctcttcccagggaatttggactttggtataagactcaagtcagtctctttccaaatggctgaacctaccattaaggtaaaattcaggagctttgggctcctgaatgctcctaggtttgctgttacaagggtggaagaaatagagacagaaaaaatgatgtaagaagagattgaaggctgctgatggtgttccaggccctggatttggccgtcactgcccttgccttccatgagacatctcagtcttcggagtcagctagttcagattggttttctgttacttgcaagccagagtgtaccaaacacaggggcatgccagcaacagcagccctgagctctcctgggtgaggttttgaaatttcactcgcaagattccctgcaacattttctcccttctgccagttagagtttggactcagatcatgtttgtaattgaaaatatctaactgaaattaaatgtttctgaaattttttttctcataaacgttgaattacagtagaatgtcactgatacttctctcgtggccagaaaaatgtttgtaattttcagtttgtgtttgttttctctaagcacgtcccctttctcctattcaaacaaaccctcagcagtattcagagaacagttactgagtctttggactcttatatgtgcaaacacctaaacccagaaaagagattatgcgaagtgcttctgaggaaagcatagcaaaattaaaacagaaatcctactcctgcccgagggatctaggagcagaaaaaaactttatttaccaagcatagccctggggaggcaagaccccaggaaaaaatgtggaaatatctggggagacaggctgttgtagacagttttgatgagatgtgtatactctagagaggcaaggaagcagcagaaagatgcccatgcccgcatgcatgtcagcgaagtaggacagaggaaggctggacttaaaggggctgtgaagacaggaaatctcagccctgacctgcaagggttgtgttcaaggactgtaactatagatatcccagtgaacactcatggagacagagaactgaaggacaagacgccacaacctccaaacccaccattcaatgtcctagctccattggagtctcctggaaactaagacaaaactttggaaaaagag

SEQ ID NO: 49383 - DNA, 1910 bp, Homo sapiens
tcttttaaaaattgttcattagcatgaaaagacctttactgagggaaaatttggaccagaaactgccaggaacttgggttaacaagggcaacttctccttcaaagaaacccagccacggtggagttgttaagaggtttgttgtcaagagatgatctaatttctcaagcacactagccattaagtcagaaaactacagattttagaacttgaaaggaccaccaaaattcagttcagcaagtgattgccttagataaacaggtcaccacaatcctacattattggtgggtgcaattaaggccctgagtgatcaaggggtgtggaaactaattgtcttgccatttaataaatactttttccatggcaaccacgttgtccctcatttcctgcagaagagaattctttcttttatggaaaattcttgagagaatttagattctatgagatgacaaaaagcaaagaatgaagaaccatactactccatactggcatttggttcagccacaacacaataccagtgtattagtcagagttttccagagaaccaataggatatctcatctgtatctaatctgtaggtatctatatctattcatctctctctctttctcatataatagagaactatgtgtctcaaaggctggaaactcaggctggtctcctacattgcagtcccttttttgggaaatcctcagactttactcttaagacctctaactgattggaggctaatctgctttattctaagtttactggtttaaatgtgaatctcatcaaaaaaaataccttcacagcaatcattgacccaagaagcttgaaaggcttctctagtttagggtttcaccaaagacaggttgcatggaattttagtaagcattccacccaaaaagtttctgtgatcaatgttttttggcttaaacaatgtcaaacacttttatttattagagaaagcctttattatgctcaaaatgctgggaattccccatgtgggggttatggtttgcagtgatccctggtttttatactcaatcttttttgtgtgagtcatctctctgaacaagcatttttggaagcagacacactgattaaaataaatctctctattttgtagctgacaaaaccaaggccaagagaggggaagggctctggctcacagagagttggtggcagtcacagaccaaagtttactgacttcagtgttctttccaaatgcaaaatgtaaaaagttgagaataaatggagaggattggagccattcctagggaggtgtttgacccaaggcaggcagctctggtgggttttgtacctctccagcatttctgaatagctgaagttaggcctgattcatgcagagatgggagatgggtacatggtagaaatggaagccccactggctctgttttgatgatggtcatgtctgtagactatcagaagatagagccatctccttttctccctgagtcaaatttctctgagtaacagcccatttgtcagcaggtggtggtgggagaaggggttgagtgaaccagtcttggggtttgagacaattgcctccatttgctataccttgaagatgacaatggtagcaatttccacctagttgaaacatatcatcagaagaaaggttattaatatatgagggcatatcagtcaaggaagctatttagcattacaattaataggggaatatcttcagaagctcctttccaggagagtcaaaaagccttattagattaattctttttccttggctattggctagggcagatgatttaaaagctattatgctaaatttattttgttatattctctttcaggaatagacatcccccagtatgtgtgaatttcttagattcatttacatctttactttaaatctttctgggaactcttcggtgatcccaggtcatat

SEQ ID NO: 49384 - DNA, 837 bp, Homo sapiens
ttaagtacaaatccacagtttcatttccatcctattgcagatgtgcttagggcaatcacagaactccgtctaatttttggttcttatgaaggtgatttttttggtgtagttgttaaatgggtgtccttgcaggcagcatgattggtggagccttctatcccgctatcttgctctgctccccctctccccagaacctgtcttaaccatcatgttttttactttcactttgacacacttcttgtatcctttcctcccattctcagtacccatctaagttggtggtttcagagatcaagagctccttgggaggtggaatggcttggaggttggctgactgtgtgggatgtagtcccttcctcagggtgctcctggcttgtggtttggcctacactgctctctggaactcctctgctcagactcccgcacctcctgggaagccaggattaacagttcccagagaccctccctcgggaggcactcagactgtcctcacttgcccaattcctggtgccaaggttgggcatcaaaaatgcaatgtcaccttactaagcactgactggcttctgctagcatgagacactgccccaccagagctgtacaaacattctttgcataaggggaaatctgcagcctcatccagaggctgggtatggtgcctgggggtgggttgccaggcttggtcatacctagtcctctttggagctgctgggacataacttgctaacttagcaccgcagggagtcggagcagagggacccattgccctcctgcagcaccgaggtcttacctgcacaagtaggcaacgttttcttttctacatttttattttttgagatg

SEQ ID NO: 49385 - DNA, 2783 bp, Homo sapiens
caccaaatttggggagttttctctatttctttaaatatttttttcttccttttcttgatctaagatcccaatttcatctatgttggactatgtgatattattctgtaagtctccaagtctctattattcttcttcattctttttactatgtcatttagattggataatttttattgctctatctcaaagatcaccaattctttttccagttactgtgctaatgagcttatctagtaaatttttcattacagttattacatttttcaactttagatttccccttttatgtagtttccatttctatgttgagattccctatctgttcactcattaagattatgcttttaattctctgcacatatttatgatagctactttgaaattttgtctagtaaatccaatatctgagtccactctgagtttctatgtattacttttttcctgagtatgggtcaaaccctcctgttattggcaggcctaaagagttttggatgaaaactgaaaaatttgatgatactttgtagcaactctatactgttatgttcttctgaggaccaatttttttattgttgtatttgctgcctggagttgcttggactcaaactatctcaccttatactgtacaacagctggtatctctgttcagttctttcagctttaagccatttatttttagcctgcttcccagggtcacccctcaacttgtgtagtttagcagtcagccaaggatttgggcaaggtttgaatcagattttgcagtttccttactgttctgttagtccagcgctctatcctctaacattagaagtgcgttggggaaggcactcaatcaaaaaagcagcaaactcacagacctacccagtgcaactctgtttttcaaacgtgatcccctcactgggtcttgctttgtgcaaaataacttaaagactttgggacagttgcaaagggtgggggatgggatgttgctatcagatttgtcaagctcttcctgatgagtcgaatttggatgaatcacagcctggccaacacaaagcacctgcccgtcccttcagcgtcttgatcaaacagcatttaataaacaccacatgcccttgggcttctgctgaggacagttgagatgaggttaagctcacattggccctgataacctacagcttgaagtctctggagtgtctatctctggggctgtgtctgtataacaggctcatgaatagagaaggaaaaaggacctaggatatcttggatcctaatctctttgtgacactcattgtttggcttatcccccggttgtgacttattggaatactcctccgggtatatgtatgtgttttttgtttgttttcttggaggctgtatctgaatctcagctgtgactgacatctcacaatgatgtgtactcaaaaaggccccatttaaattattcaggttgctgcaaaccaagtggttatttggaaacttagaaaaaccagggagaagcagaaatttatatttctaaaaatgaagtaacaaattcgttgatttatttcacacttttggttgaacattcatattaagctgttttttgtaaacatattactaagaaactattctgatatggcttattttccagtgaacttatgtgcacacattaattcattaatatatcatgtcttacatttgttttataaatatatagacatgcttcagtccctgagaaattctaagataattaagtgaccccaaaaagcagtgtaactagttagttcacaccacaaacaatgaataaactgtttgctgaatttcctgtgttccaagtggtaacacttgcatcatagttacaaaacttcagtttcctggtttattcacttatgccattcatttaacaaaactgctaggtcagacactgacaggctctgcaacattgcttcacacaaacagaacagtctgtgctctcaggaacataagatcaatgataagtaaattaaaaataaatatttcgaataatgataaatggttcagggaaaatgaaggtgatgaggtggagagttcctggtgaacttttcaggaattgagccatgtgaagatctgtgggagaagaattccagacgagtgaaaagggaaagtaatgtttttgaggcaggagtgcatgtggttgaaccaagcctccaatggaagtctactggcctaatttgtttattcatattcatttaatcaaatagaacaaagagaactaagcacctgtcctagagcctgactcttctgtttagaaatctagggaatcactctcttctaaccccacagccttcagccacaaaatgcctgtggtcacacgcacttctccaactgggttcttccagctcctcaaggagaaatctctacataattagggcttcctttgttcagttactcttgtgtgacagatgcaccgagagtaataacttaagcataccctgagaatgaccctatggtctaaaaagaatgtgtgtttggatttccaagtgaagaaatccagaaatggccagtccaaagattcattctatgagaaacatctaaacctacaggccagcccatggaatgcagaccatacaggggatcaagaccctttgttttgggttaaatgaaggttgccaggtggaggttaccagggggagggtgctaactaaaaatactatataaactgcatgctttttacaagaagttagtggttcttctgtccagaccactgccaccaggacagtgtcctgtatgtaagtcccctcaataagctctgtgtctcatttgcaggctctgggtctcttcttcag

SEQ ID NO: 49386 - DNA, 2919 bp, Homo sapiens
tataaagcttctacaagtgctttttggaagtaagttggatttaaggcacgtgtaaaagcctgtgtctctcaaattcctctgcctagagtgaaacagaatcttagtgagagatacaaaacagcattctctggatttacccaaatccattctgcagctgctccaaccacacacatcctcacatcaaactcatcccctaaagtctgggattctccagggattatcttacagatactgagcatgactgcccactgctatgtgtggcacctgctaccttcttcctcacctgcctctgcttacgggactggggtctccattgctgctgacaaccaaggcagccttagagagcagcacgtctatgctggagcacagtggaggtgcccaccaccaccacccatgacacagctgcatctgcacagggtcaaggacactgacatcagcctggcttttggggctggctggtgctgctcttgccccctgcttcctgtaacctagggatgcttttgtgatgaactatttttgtttacacttgttttttattccaataccctcatctcaggacccaggcgcaggacttcccaggacttctggccctgggcgctgggccagaagacatcagagtgacaggcactgtgctgttcctcaaaccccaccaggaccaccccagtctccattctagtcctggtccagtgcaactgaacctagtaggtgcttctatttccccctcctgtgaagagagtctttcctaggagactccatcactcaggtatgcagacccacaggtaggttgagccacacatcatcctggcattcacagacttacatctaaatcctaatcagggagaggaagaggacacagctatcttaagctcaggttccaggtacaaagtaatgaatgggtaattggataaattactgaataaaagagggagagagaaatggaatgaaaagaaaaagggaaggaaggtagataagtaaaaagaagaaaataaaagattctggaaagtagttcctaacccaagttccaatctctctctctctctctctttctcaatcatgatgggatggggagggcagaggaatatgttaggacagactcctccacttccgttcaagtaccaataactagatgtagaaagaaagtatgcaaattagaagactaatgttctaaaatgagtaagagcctatttgctcactcttggctcttaggaaactagagaactcatggggaaggcaggcaaacagaagcaagatttcatcagaacactggccccttgtcaatttatcactctggtgaaacagcgtgacgcttgggatttccccagaacgtcaaactgcaattttacatgtgctgcttggaagcaagctgtgtaacttcctgtaataaggatttcaagtattcaagcaataaatctgagatgccagagcctctcttaacactgtcctgtagctcagcaactccaaattagcacagctccacacatccaaagcctggaaagggtggaagatgaatatgaacggacagatccctcatgctcacccttggtggtgaattgagtcatcagctgagtatggaaaggagtggggaacaagctcacaggctctttgtctccttcgacttttgtttcacatttgccaggaggtaaggccttcatacctgcagctgggtcaagtatctggaaacacgtgggctgccagcagagccacttcatgtcagcatcagagtacaaagtgagtgtgagactgagtgagaatgtgaactgccagggtattcctacccgtgtggcccaggcctggctgcagggagggcaaagtctggctgcagggaggggaaaggtcagctacaggtcccaccacacatgtcctccaactgcactttccttgttctagcttggcatcagcccaccttgctgtgtgccttgcatgcctccttcctcttcctttaggaggggatagaagggtccagctgaggataaatacaacaatcaagtcttagatagcatttgacagctatttgatgaatgaataaataatagatgcataaataaatgaatgaacaaataagccaacaactgggtgtcaacaggcagacacgcacattttacaaataggtatttccctacttctccagcgtgatagagtggagatcaatggctttcacaatatcttgttaaacctgaaagtttaacgaaaatattctcttttactgagtccttgttaaattaaagaaaattagaaacagctacatatagccagggtaggggaaggggatggttgggtaagaaaccgagaaacttgaagaaggggagcagatcattctggtggagtagggacacctgccttacctgcactcaaacattcccaagtgtcgactcccaattcccagtgaaggctggaggggtgatgttaatacctcacactgataatccacagtgcctctcctcagggtccgctgactctgacacctttcccttccccactctcctccctcttcccttctagctcaaagtttgggtgagactgaaaagccaatctggctcccacttgcagaggaatcaaggcccccagagtttcagaacccagagggcccttcgcttaacacagcaccttcctgagaactagaaacaggcgtcccgatggtagtcacagcttcacaggtgcatggggaagtgaatgaagatgttgccttgtgttaattagaaaaatattcaatatcagtcctggtcctggcgggaaacagatgacacagtcaaagtggataatgaaggaaagtgtgaggggaaggcaccatttacaaagacgtgggtgggatttaggcaaacctgcaaggaatggtatggtatcctggggctagcaacagtggggagccctgagagacaaggagagagagagccctgtactgagacaaagcaagaactgtag

SEQ ID NO: 49387 - DNA, 1657 bp, Homo sapiens
aactcatagctgctgggaatctgcagctcccccttctctttatatagctcagattcatgctttattactggagaaaaataaaaccaagaaacaaatgacacagcattagcatagatgtcatgttgcatccatagtaagaggcacctccctctccaggctggagtccccccaggaagcagcttctgatgtcagaaatccccagggaattggccaccttggtgaggggcaagatccaagttttcccttgaatagctgggtgttatttttttcctggaacctgctaagaagctgcaaactacattcatatttaactcctggggacccctttctctctgaagaacctattggacaaaacatatttctcagtggggatgaactaacactgaaaaatgttacaagaccagtggattacctcccccccgagtcccctaccactattgttaaaataaaaaccttaggcaaattaaatttaacatcatttaattgagcaaagaacaattcacaaattgggcaatccccagatgagaatagttcagagaggttctgggggtgccacatggtggaagaagatctatggacagaaaaaggaaactgaaatacagaaaaaacagccagattggttacagctcagcatttgccttatttgaacctgtttgaacagttggctgcctgtgattggcagaaacttagtgactggcacaagagcaggttacagtctgtttgcacatccagttgggttcagttcactgtgtacagagaaacctttaggccaaacgtaaaatatgtaagaaggcagctttaggctaaacttaatctaacactattttgcagccaagtggctccatgctcctgtcatgttataaggtgggggaggaatacagggtgaacaacgcctgtattcaggtcctagccctgaccactggccacccagaggctaggagctctgctcagccttctacccagcttcttctccctcagtaatctggctgttcccagaaccaggtaagaattctgctgtgtgaggatgaatcggcagaattttgccaaagactgaagtggaaggaaccgcccatgccacttctgtgttatgcctggggagccagggactcatctccccacttggccgactctcaaggtccttggagctctttgcctgtggattcccttctggaggggctgagtatgaaggctccatcccaaagtaccttgatccaaaccatctttcatctctgtcttaactgtaggcactgctcaggagaaagggtggggcaagctctttatctagaggaaatgagttgtatcaccaatttgacatctacaaacctactcataaaatgacgggcatggtaacatgtaactacccaacaccgaatgaacaaatggataccctacttacattttccatagaataaaaatgaatttctagaggtggtgacacttatttagagaaggtgaagttagcttgaggatacagtacagtggcctggttttacatgtcatttctctctctgtggctgatcttacataacttaacacaaagtctttgtgcttccacagtttagtaattcatcttctgtttttgctttacttagaatacatttggaagagcaatgaaagccactgacaatcctagcatctcactggagaccataatttc

SEQ ID NO: 49388 - DNA, 966 bp, Homo sapiens
tgatttagaatgcctaatctcctgggaatgcagcccttattcgagatggaatcactctggttcaaatgcctctgacatatttcccccctccctttaataagagaacccttaatcttaagggttgttgagagctgaagattcatctccataacttcttcaggctgaataggggcaatgatattcctgcctaactattagggtctcttatatttggtgtacagagaggctcagtcagaaagcgtcaatatgatgagggccattcatgactctgaattctgataagtgatatctggaagattaatatgtgttcaatttaagaaaacattgagtaagcttatcttgcattcctgcaaagagtataacagcaaatatattccacaacagtaaagcaaaataagcaaaattatcccaagtaaactaaataagaaggtattccatgaactgggcagctgttggaaccaagctgatatgaagttgctatatgtgttacatatttcaatatgggcccagaatttgaatattgatccagatttttacattactcatccttcttgtttattctgggcagcagccagagatcactgcttgggtcacaggaataagcagggttagtttagattgcagaaaaaaaatctcaaaaacaacagatgagtctagaatctaataacaggtgtaccatagtttttgaaatgtaatttttctctctctggtctcctatttttacaaaagagaaatcatggtaagactggtttgctttattatacttggcctgattatttgcatgaagggcagcaagaataattattttttacataggctttttaaattggctttgatggaactctgttccacagaaggaatctcagataagactttttaaaagccaagcccagccatggctttttaccatcaaatacctgtgagttgggtaaattcctctcctttgaggtcccaagataacttggg

SEQ ID NO: 49389 - DNA, 3277 bp, Homo sapiens
ctccatcttaaaaaaaaaaaaataagcttgcagtcctcattcctcctcagcagatattattcagatactcaacatccacttggtgaagtattgataaattgcttcttttactattattttttctgatgaagtatgttgactaacttaaggagaacttaagaaaaattagatgaaaacaaaaggattcctctgcctgctaaactttttattgttgtaagaaagcaacaaaaaaccactgaattcctatttttccatcatcctatgtcttcctaaagtcatccttaatttcatcacagcaccactgatgaggcaaagccagggtggaaatgaaggtggcagtaagctgaattgtaacttggaactggctgtggccagcctccacgtgaccaattttgtaatttattattaactttatgcagctacacacaaaagggagtgaagattgcacaagaggctctgctaatagcaaagtcttttaggacctagagctgtgaactacaaacagtttatcttcaagtgcccaggaagtgatggtagaattcaggttgcctgacagaagcaatttagattcttcagcaatagaggagagtttgaatgtgaagacattctcctctcaaacttatatcaccttgaagagtggacaaatcccaagctttactgtttcgggctaccaggcacaaatgtgattgcaaaccagacaaaagtgtccccacaagttcatgagcagattttaaaaccaacctgtttctctgcctctggtttcaaagaaactaattgctcaggatgcacacagatggtgtctgactcattgtttctttccttcatgtcactggatgttaaattagtaatggtaataaacaaccacatatattcacagagaaaaatgtatgaagctaaaattagaatctttgtcatgcaacattgatttgttccagaagttggagctagattggtcagcaagtgaatgtttcagccttgtcactccaagtctttttgagccctgagcacagacaaccctagtgtcattgaccttaataaatggagagttgctgagaaagcttctagtccactgccaggcctccagctgtggccttccagtacacacgcccctcctcagctcagacaacttagtgctctatgcacttgctgctgtgcaggggacctcaacacctctagaatgcagtacagaagttgccatttacatctttaaggtcctagacatgtggcagcttatttgctaactgaagtcgccacactgatcagtcattggatgcaggccaccctgggaaagggtgtgacattggaggaggtaggtttctgcagaggggacaatccataaaggggctgacagttgaaggctgttggcccatgacattctcaggagctggggcaatgaggcttcactgatgggggagctgggcagtgcatccttgtgtctagcgcacggctacttcaagtcacttttcccagaagactcttctatcacaattgaaacttcttcaagtttctgcctgagataagctttctccatggttttcagaccaacatcacttgccccaaactctccaccccttctcatgatcagtctcatttttttctccactttatttgatttgtcacactgtctcatggatatctgtccctagatgggtaagcttacttctacatttatggttatgttcacttagtagcttttctccactgtttacaatagtcagctctgtctgtacaaagaatcaggctccaaataatgaaatgttggctgaacttgtcctacttttcaacttctgaacatgtagagtacacagggttccaaactatagtttgctcccacagagttggcttcctttgtgtttttcatgaaccaaactcaatctaatttactacaaaaagtgtgttcctgtcagttcactccagtcacatgagaaatcgattggcctttctaagggagaagaggaatcatttcccaaaatgataagagaaacaaagccagccagggttagaagactccttttaaatctcctcctcctgaaaataaatgagaagaagagtcgataaactcattccccacattccacatagtggcctcagcaatattatgcttcactgggcaaaacagcttcgaagtgcctgcttttacctaatagcacctaagtgcactctgagtgccttcatttcaatgattaatcaagaaaaaactcaatgattaatcatttcaatactctgtggctgcattcctttggtgctccatgtacaataggacaaattaggtaataaactttctggcatttattccattcaattgaatacttctccacttttttagctgtaatctctgacgttatctagcataagtggtctgcatggaaattgtgatttttttcctaacctagtttcttttccaagtaaaattacatccttaaaggttcatccactcctcaccagggcactagacaaaaactcagccttgattttctcacctttgaacaagttgttttgttacctccagttcctggtaaaatccccctgctgtttgttcataaggcttccacagtacacatgaacagaaaatgcacagtacacatgaacagagaccccagaacaaagtgagatccaaagtgacttgcaagcaatgcttggggaagagaaaaaggggaagacatatttgaaaagttacattaatagaagagggagaatcagattgacatttggaacttttctttcgtaagaagataattaccactaactcttcatcaaagaggcatcattttgaaatttttttctggctgccaggattagttaatatgataacacatacagtttctttctctctctctctctgtctctttcttccctccctccctctctttttcagtctcttgcaatcaaaaacatacttgatcaacacatccagctagggtttaaggtgtagtgtggaataggacagctgtttttctctgggatgctacttgatgcgtggaacacaaaacggagtgtggtcacttctaataagctatttgacttagcaaaagctaataatgagaaaaaaagattttgttgtttttattgtggctgttattcagtcactataagttatcatattattatgtagggccttaaaagttattgagaatctacggacaatgaaaaagacaccaaaaatgtaaagtagttaagtcatgttcctgcccttgagaaataaaacatagatttggaagaacttgaggttgaaagaaaatttaactgctttttggggttggcaggatctttagagatc

SEQ ID NO: 49390 - DNA, 402 bp, Homo sapiens
tgtaacattgattcactattctttcaacttttctgtgtaaatgaagatttttataataaaaattagaaaagatatttgagatatttgtcattttacatcatctactttaatttaaacacaacagagtccctttaacttccgagtaagacttggtgtagtttgcagctgacctgtgttcccactgagaaaaactaaatgaactgggtaaaattcaaaaatcctctgtttaaagattgctgatgcaatagggatgagagggcacaggactccagaacaaggataacggtggcaaagtgtgctgactctgcaggcttttgtccttgggggtatgtgccaaatctgggctcaggacaagaagctgagcacctagactttgagcacagggccactgatggggacaga

SEQ ID NO: 49391 - DNA, 361 bp, Homo sapiens
aaaatagattttggaagttaagagaactgtagagagtgagttgagaataatttgtgattttgagggcctttaaaagtattagggcagcggcagccgctgcacatagacatgaaagccaggctaaaacagtaaggtcaggttgtttggataaaaaggctacagggcacagtcccggctcttgcgtaagaattctgaccacatagccctgcactttggctgtgtgtaatgaaaaagggttgggatgagttagggagagctagtgtgggggcagcttctagggctgttttttaaggaatggaaaggagtggcgaaaggatttaggatctgtggggtcagctaggtttgcttttgtgagtttata

SEQ ID NO: 49392 - DNA, 1328 bp, Homo sapiens
aaacagtcagtatgatatagtattccctcactgctcacccctagccataggtttattaaactgtacctagtaagaactttataatgtaagaggggcatgaagaatttcatgactgcccagacaccagcaataaaaatgattcaatgtgggggtgaatatgatttattttacataatgtacacactgtgtgtaaatgactgagtcattattggttataaagtataagtagaattattatccagaacagtggtctccaaactctattgatcatacatctttgtccataaagttgctttgatcatacacaaatatggaaattaaaaaataaaattagaaagagagtttctaacatttctttccagtttcccaatggaccaccttatgcagctcttgtggggcacacaccccctgtaatgagcactgacttatctactctcctgtgttttgtccacattcttcatctagctggtcaaagctaggaactgaataaacgttgcccattacatgtagaaggatgcgttgatcaagacctagagtcaatactaaattaagcacaaaactgatcaagaactagagtcaagttcactccactaaatatcatacctgccaggagggggcagatgtgaacagggcgtaagaaaatccctactcagagacagagaatgtggaaaaaacaagcagctagagggaggtggggcacaaattctacaagacacactgaagccagccagagatagcccatggctagaacaggaaacagtctgaaaacatcaaactaaaaccagaatacaaaaacaactgccaaagacagaataaagaaaaatgctggggttggggatttgggtgtgtagttcacagtggtgagtggaaaaaaaaaaaaaaaaaaaaaaaaaaaccaggagctttcatccagaagcccaaagctggagtgaagaagagcttcagacagtgccagaacaaatttcaagagccaggcagaaatagtcaggacttccagggctcagaagtttatgaggcaactattttgaaactattcctgcaagtaagactcttctaaaaaaacaaactagtattctcagtcttgtgatttctgatcataaggaattctcattctttccaatctgggagatatgcaaggctctggcagactttttgaaatgttagagctcaaaacacaagtcaagcagttatagcacattgctgagcagacagcacacattcactgaagatttgtttaccattgatttatcctgcatgaatgatgttccacagaggaacactatccatagtgaataccccaggggccgtggaatgtgaaggctctaatg

SEQ ID NO: 49393 - DNA, 1904 bp, Homo sapiens
tattatagctcttttctccagtctaagtgtaaaatggtgttctattgttaacttccatttgcttttttctgaccactagtgaatatgagcatgtgggctagccgtttcaatgtctgtgaagtgtttatcctttgtgcatctttatctcatcattttgcccttttctcatcaaatttaagagcttttatcataggcataaactgtcacttgcattacaaatgtacttttcttattttgtattaacctgttgactttataattttaaaagtctttcctttccttcttttatagcttctagtcacagtttaaaaggtctctcccacccctagaatatacacatagcctgccagatttttaaacaataccttgttatattttttacatttaaaattttaatctgaaatggatttttccatgcggcataaggagtccatatttattttcttccaaatggagagccagttgggccagtgccatctatcatacatcttttccccattgttttatattaaagtctcatttatactgggatttgtatctggctatttctagcagccactgtaaagaggaaacacaaatgcctggaagggtaaccaacattttagccattgtaattttgaggtgttgagaatttaggtaattattcttcattgctttgctgtatggtttttttccataataaacatgcattattggtgttacaaaaataaatggatggtggggggcagggggaggaccagtaaacacaattagtttcatcattcatagtgtctgtcccgggacaaatacaagccagcaactaccagcagcagcattgctattcctggaatggagacctgagaagattttaccctcagggagaaatgtaatagggttgttcccagagacactggaaaatctctttaaatgccagcttgccggaggtggggactgattaagttttgggaagtcatttcattcagtaagctcattgtgaaataagcatgaggtggtgatttaatgtgtgattggcaggcattgcatattcaagcacaaggagtttaattgattggaagagcaggttgccctgagctgatgcaataaatactaaggttgagtgtgctgtttgaaactagtgaagtgatgcaatcatctcccatgttcagcagcagcctaattgctggcaagaatttaaatgcttaaaacggtacttggatgattacagagcacattcaaattatgtaaaagtgaccagatcccatagctccagggcacagcatctgtccttaagtgataagggtcagttaaagctctaaaactgtaaacagtgcattggccccattgaagcccctggaggaaatttgcagagtcacagccatctgctgcctaaaataacaagtagcagggtcccttcccagcgcaaaatggccacctagcagcacagcccaaggtgacctgcacaggctcccagccttttccaccttgcacattaccttagggaaggtcaaagtatgagtattagccaaaaccttctacagtccccttgaaggcctgggatttgcaggaactagtgtctgctgcaaataaaagtacatactgggattccagttcatgccggaggaaccctaaaacagtagtgaatggtttccccaagcctgcttatgttagatatgagttctaaatttcaaagaatatgtcagtatgttcaattatttgtcttctacttttaaacttcctcataaagcaaccttttccgattacattctccaccctgactcattctgattacctgctctgtcataaccatttttcccgccaaaccactcacccccgccactctctttaagttagccaatcggaattagtttagcctgtgctgtctaaccctagccaatagaggaacgacacagcagaggggccacgtg

SEQ ID NO: 49394 - DNA, 2180 bp, Homo sapiens
tacatgtctcacaatgcctggaagatataacaaatttcttaagttgaattgactgcagacagtgggctttcaattcaaactgaacacagactgagaaaagtctgaatctttttacaggataggtccctgagtattcaataaaataaaagatggatatcaaggaatgcccttttgcccactccccacctcaggaaggctagatttgaaagtccactggaatacatgggacccatttttcagggggaataaatggctaccaaggcagtgttcatgcacaaagtaaacatgaacaaagtgaacatgattaaatatcataaattgttgctgaagcatgtaaaaattgtcagcttctgagccacttataataactactaaatgactggctttgattaccatgtcaatgcttaaggcacaatttagagaatgttgttactaagacaaccctccctttcaacaagtgcccaggtttcatatttctgttccacacccccaagatggtgagctgtgtctctccaggaggaaaggctctagtgaagaattcatcaattttctactcaatctctcttacaaaactactctctgggaaaatgacttattgtttaagtgtttactttttgttatttgagcaagcagtaggcatattcgtgaatccattttcatttaactgcgctcatgctccaagcagcttacatggatcagcccagagaggttaacctcaatcaattctctatctctgttgccacgtcactgcagagtttcacatggtcagatttcattgtctgactgtgaaaaaattaagaacttggctttcctaaacaagaatcaattctctatctctgttgccacgtcactgcagagtttcacatggtcagatttcattgtttgactgtgaaaaaattaagaatttggctttcctaaacaagaaacgtattatagagtcttcctcattcggttacataagagtgtgaatgaagaacaaataggggcattgtctgatacagaaagtaaagttttagggctaggtagcttgtggttgttttaacaaaatctacaaattgtttaaaaatgagagtcttgaaatcagtgaaattatgatggcttggggaacttttaccaatagcattatcaaatatctggatatacactctatataggagcaataaatctcaatcatttgtttaagaaagatttgatgagcacctcctatgtggtgtttattgttctactgtaaatgcagaagtgatcaaaatagaccaagttttgctcattatatagctggaagaggcagaggataactgggaaacaaataatgaaaggacaaggtaaagggcacgtgggacacagccagctcagagttgcctaaagcaaacacacactatgcctctatcccacagttccaagaacgatgacacatttctctaattgctatgtatcataactgccagagtgtttccctttctcccaattgcatgtattttttaggaaaaggtataatttatgggattaatactggggattcggaaaatcagtggatgcctgaggatcagttttgaaaattgagcaatgccatagtagttctggaggttgacaggcagaatatctgatcacatactttaaaaaacacacaaacagcttcattgaggtataactgacatacaataaactgcttgctatggtttgaatgtgtcccccaaagctcatgtatgggaaacttaatctccactgcaacagtgttgggagctggggcctaataagaggtgattggtcatgagtgatctgccctcatgaatggattaatgttgttaacccaggagcaggtttgttacctggggagtaagctttttataaaagtgagtttggccccctcttgctctcctgtatgctctttgcccttctgcctttctcagtgggatgatgcagcacaaaaacgctcactggatgcctttggacttctttggcatctttgaatgcttttggacttcccagcctccagaaccatgagccaaataactttctgtttattatcagttacccagtctgtggcattctgttatagcagcataaaatggactaagacactgtacatatttaaagtacacaatttgataagttctgatatatgcatatacccatgtcaacatcaccatatcaacgtaacggacatatctttcacctctaaa

SEQ ID NO: 49395 - DNA, 1591 bp, Homo sapiens
ataaaaatattgcatttttagatagtttataccacatatgaatgacattttgacctacaaaagccctcacctttgagacacagtaacacataaaggcagagagaaataagtttggaaagtaaatcataatacagtcatactttggaaatattgcaagtttggttccagaccactgcaataaagagaatatcgcaataaagtgagtcacataaattttttgtgttccagtgaatataaaagttatatttacattacattgtagcgtattaagtgtgcaataccattgtatctaaaaatgtgcatacctcaatttaaaatactttgttgctaaaaaatattaacaatcatctcagccttgagcaagtcctaatctttttgctggtagagggtcttgcctccatgtcaatggctgctgactgatcagcattatggttgctgaaggttggggtggctatggtaatttcttaaaataggacagcaatgaagtttgctgcatcaattgaccctttcacaaaagacttttgtgtagcatgagatgctgtttgatagcaatagaacgtctttcaaaactggagtcaattctctcaaaccctgctgctgcttttatcaactaagtttacgtaatgttctaaatcctttgttgtcatttcaacaatgttgacagcattatcgccaggggtaagttctaactaaagaaactactttctttgcttatcgaactcctcatccattgatcatgagattgtggcaactcggtcaatctttagcctccagttctaattctaattctctcactactttcgccatatttgcagttaattcctccactggaaccctgccaagtcatccatgagggttgaaatcaacttccaaatttctgttaaagttgatactttgacccatgaatcacagatgttctagttggcatctagagtagtgaatcctttccagaaggtttttattcactttgcccaaatccatcagagggatcactgtagcaactataggcttacaaaatgtatttcttaaacaataagacttgaaagttgaaattacttatttatctatgggctgcagaataaatgttatgttagcaggcaggaaaataacattaatccccttgtacatctccagtagggttcttaaggggccaggtacattgtcaatgagcagtaatattttgaaaggaatctttttttcagagcagtaggtctcaaaagtgggcttaaaatattcaataaatcatgctgcaaacagatgtgctgtcatctaagctttgccgttccatttatagaacacagggaaagtagacttagcataattctgaaggaccctaggatttttataatggtaaatgagcattggcttctacttaaaattaccagctgcattagcctataacaagagtcagcttgtcctttggagctggcattaacttttcctctgtagtgatgaaagtcttggatggcatcttcttcccatacaatgctgttttgtctacactgaaaagctattgtttagtgaagccacctgcatcaattatcatagatagatcttttgggtaacttgctgtagcttctacatcaggact

SEQ ID NO: 49396 - DNA, 2427 bp, Homo sapiens
tttgcattcacaacttggccagctgtggttcaagagtcctagctttcagcttatcttggtttttgttgtgccttcctcactcagcttaatcatttctagcttttgatttaaagagagaaacatgcaaactctccctttcacttgaatacttagaggccattttgacttcatttcaatattgttgtgtctcagggaatagggaggcccaaggagatggggagagatggaacaactggtcagtagagcagtcagaacacacacaacagttactgattaactttgctgtcctatatgggcatggttcatggagccccaaaacaattacaacagtgacatccgatatcactgatcagagatcaccaaaacagatataataataatgaaagaattagaaatattgtgagaattaccaaaatgtgacacagtgaacacatgctgttgggaaaaaatgttgccaatggacttggctcaatgcagggttccagaaaccttcaatttgtaaagtcacacaaaatctgcaaagtgcaataaagcaaagtgcaataaaataaggtatgcctgtaatatagtgtttattgagtgtcatgtgccaggctttctgctacatcttttattggcattatctgtgatcttgcaaccattctgaatataggtattattgtccccatgttacaaatgggaaaaataaaacactggagtatttgcccatgattacagagctaataaagggaaccagaagtttgcaggaaggattggtggagcaagatatttaaaggatctacaatttgcccaatgtaatctctgtgaaattatcaacacattatagaatttcttcctctctcgatattttccatttttgctgaaatgacatttacctatattcatcttatttttcataagaaccataaatgcatttttgaataatgaagatcatttaagctgggcacagtggctcacacctgtaatcccagcactttcaggggattgcctgaggccaggagtgtgagaccacacagggcaacatagcgagacaccatttatacaaaaatgaaagtaaaattaaccaggtctggtggtggtagtcccagctacttgggaggctgaagttggaggataaattgagcccaagagttcaaggatgcagtgagctatgatcattccactgcactccagcctgggtgacagagcaagaccccgtttctttaaaaaacaaaacaaaacaaaaagataatttagaattaaatgttttctgatcctaaagttttggttgaagagactttaggattaaaaaacaccacaaaactaaattaagtttataaatagtatgtgtctgacccaacaataaataaatactagcctttgactcaatacttgagaaatgtgtgtggctccctgacatgtgtcactgagtctgagtctgtaggctgggtgagcaaatatttaagcatgagtaagagcaatgatggcccctttggcagtcctcaatgcactagcatgcactaaaaccaaaacacacaaggagattcagcactgttaagaagagaaatccaagttgacttggcatgaagcaggaggctgattgagagctttgaaacctctttaaacttggacatttcaagaatcctggaagagcactattgtgaaaaaaactaggagacctgccaggtaagcccaacttggggtatacaatcaaattcttttctttatgagcctcaaactaaagttataaacaccaactattttaaagaggaatgccacattcctggtagagggaaagattttcccataaaaaaataagaaaagagaactactatacccaggagctttatgtattttatttattccatataataacttcctggagttggaattatttctcacttacaaatgaggaaactatggcccagagagttgacttaatttatccacaatcacacaacttgtgatggggctgggatttgaaccgtaactttttgacttcagatacctctttctctggtagtcagctgtttactgtggttaaaggaagatttgtaaatttatcatttaatcgagaaaactacagtgtcacaggatcctgagggtgaaagacatgtgatttcagcaccatgtcttatttatccttatagcccttacagtgccctatatatcatagatatgcaatgtgtttgtagaatgatgaatggatgactgtgtggatgaatggatggatgcatggacggatggttggatggatggatgcatgagtgggtgggtggatggatggataaattccattatccctgggctgttcaaattcactgtcttttccatactgagggcctattttccagaagacagcaggtagtatataatattgtgatattgtacttccttcctctaggcaaactcaggcaggaaaaggagtttttaacaatttgtcactaa

SEQ ID NO: 49397 - DNA, 1783 bp, Homo sapiens
aacatatcaggacaccaagaacaattctgatctgttgaagcttttctagttcaactctgacactaacggttgactagtcaacagcttgtgattctatctttaactaggttgaagaaaacgcagctagtcagatatttagagtaaaaaactctcagacactgaagggtaccttacgtcatcagagggaagtcatgtgctgtctcggagtttacttcttcattactgtcagaggcattcaaactagagtgactccatcttgaatagtgactgggtaaaataaggctgagacctaatgggctacattcccaggtagttaaggcattcttagtcacaggataagataggaggttggcacaagatacaggtcacaaagaccttgctgataaagtaaagaagctggccaaatcccagcaaaaccaagatggtgacaaaagttacctctggtcttcactgctcattatacgataattatataatgcattagcatgctaaaagacactcccaccagtgccattgacagtttacaaatgccatgtcaatgtcagaaagttaccctatatggtctaaaaaggggaggaaccctcagttctgggaattgcccacccctttgccagaaaactcatgaataatccaccccttatttagcatataatcaagaactaataataattataagcagccgagcagcccatgcctctggtctgcctgtgaataagacattcttttatttcttcactttcttagtaaacttcctttcactttatggattagcttcaaattctttcttgtacaagacccaagaaccctctcttgggatctggattcagacccctttcaggtaacattacacacagctaaaagattacctgcaaatagcatgtctgtccttatgctctgttgatttttttggttctacagggtaaaatccagcgttgcataaataatgggtgatgccaaaaatcttcactgttagtcatttgtttagatgtcagtttcaaaacctggttgtctagacagctaaaactggctgagtgcagggagtttccaatttccacaaatgggaattgatggaaagagtcagctaaggaaaccagcctgaaagcatgatgtttctggaacctcaaagataagccattagcaagctgaagagtcactggcaacaggttatgctttaaacggttcatatataggagcttcttaaatatagcttcaatatagactccacctaataacaaatgaatagcacagggagtaaaaccgaatcacaacaatgacagcaatccttccagtaaagaagataccagggagataatatatgctgcacaaactgtacatttgacagctctaggggttgccatttacatagtattccacataaatcatgcctgctagagatgtgcagtgcacaacttgtgcaaccataagcagaaaaccccaaaagattctgtcattaatatataacaaaaatgcacatgacaaagagcacaaattttatgtctgaagttataagcattatgaattgtatttatttaaaagagaaagattgataaattggattttgtcaaattaaaacttttatgaaggacacctgtatgagaacaaaaagacaagctacagactgggagaaaatatttgcaaatcacatatccagcaaagatcttttatccagaatattatatatacaagtacatgaaaagaagctctgcagtattaacatttagggaaataaggtgcctttacatatgtaaaagaatggctaatatatatatatatattttggaag

SEQ ID NO: 49398 - DNA, 3597 bp, Homo sapiens
attcatttttatttactcatgtgacagtgtttgtacaatgcattatcattgagtagtgaataaaagactgaggcttactagaaaactggcatcaagttatatatatgtgtgtatatatatatcatattatttcttttaacaagaacactgaaattgaagtcacaacactcctatacggactactaaacttgaaatactcatttcagaaagctatgccatttgaattctaggaacgcaagagtcaaaattgtaactctcattattctcctaaaaagctgccaagcagagataagctttagtattaaagatttcacatgtcaagttccagcccagtatggatcgtttcatggcagaatacttaaatttgaaataatagtggtacaaaaacactacttgaccctttaggtattgcagtaaaagctggctgtggcactgctggctaaaaactattaagttttcctgccacaaatgaccaaaggcacttggataatcaagaattccacactgggccatatggtataaacactataaaagcgtaaagaagggtcagtattctgtgtgtctcgcctgtttgattcctgtggtcttcagctgtcaaagacctagaactgcaaacatataatgagtggcaaaaaggttaaaaaaaatgttgggacaaaaaaatcaactaaaaatcaactaattttcattatgtttgtaaaactgatgaatattagtctagacatttcttgttatccaacaacaaaaacaaaaaggaaatagatttcgcccaaagtaaccttaaccagttatttgataccaagaaatgcctccacccctcttgatcattaatagttctaagaattctaatgggtattctgtttatcattttagtgataatgtttacacacatccatctctcctatgcaactcccattttaaaatacattatccttgtaaaatacattacaaggataatgtattttaaaatactttaacgcataatattcctagatttgtatgttagaccaggacagggggccaaatcatctccagtcggattccagtgactcctgtaaccaaaaccagttcttcacaatttattcattttttttaatcacacaccatatggtttcaatgcatttttttattcaattcaaaagaatttaacaagttaacttttcctaaacaaaagttttcatgtgtattctaccatttttaggagctcagtaaatataaacattgtttcaatacaaaacctttaaaaataccttgaaaatgtttaaacagttgtattttgcatgtctttgtttgtaatcactgagcccatacaaatccttgcactactaacagtcacaagcttgaacctcttaaaaaatatcctcgatcaaagctttggaatccagtaaaaattaggaaacgagtgggcttcagaataccctgagcacaaactagtgcaacaccacatgttcgaacttctgtccacaaagaggggtgacagtgaaatagaaaaagggggagataaagaacaagtaaattctggctttattacacaagcacgaaaccaaattcctttggaaaaataatgtcttcggaggacttccagaccagtgaggtagagtccaacagtgagaaaacggatctgcccctaaggtcctggagacgtctcaatcggtggtcaggaagaaagggacctcccctgcgggtccagctgtcccctccctccgcaggccgggtacgggaggcagcagagggcacacctgccccagcgtccaagacgaccgcgccgcggcccgggacagggacaaccatccggcaacttcttcgcgcgtaaagtgcattgggggccggggtcctggccggatctgtaaacactcgactgacacttgttcattcctccgggcggaaggcctgtcccaaggtcggggccggcaggaggcgccctggaggccgcacctcatgcccggggcaccgggaagcggcggagcctcaccatgggttccaggttcactcgcaggacctggcgcgccctgcgccgcgctgccgccaggctgcgctcgccccacacgtcgctgccgacgcggatggtggggaaggtggtcagcgtcggggtggccgccctccagatctcctccaaggtgcggcccccgaagcagggcccgggggccacgggcttggccgggcagctctcctcggggggcggcggcggtgggggtggcggccggggcttcctcctgcgggcagcggccgcccgggctccgcggcgcctcctcctggccgctgcgcgcggaaccggccggcgcgcctggccgcgggctgtagggggccccggggggtcgggtaccagggcccggcaggaggagtagccgtagacgtccttgctgcgcaggatgtgcggggagaactggtgcttgaggctgcagaggaagctccagagctccgcgtccgagctcatgaactccgtgctgcggggcatgaagagcttgaaggcgtcgcccagcgccttggtgctgtcagccagcgacagttgcgaccgcgagtacaccaccttctcctcccgcgcctccaacccagccccgtcttctgccctaaagtcgccgccccgggcggccgtggccggggcgaccgggcgccggcgccgccgcctcttcatactgcgccgcatcgaaggccgctccgggccactcacgctcgccgggtcccactactgccgccgccgtcccagtccgcgttggctccgcggcggcggctgctgctggcgtctctcgctacttttctcgcctccgccgccgcccctccccctccgagggcggaggacgcgggcgaatatcctgctgcccggtacaagatggcggccggcgcccacccctgggctttgtcattggacggcgcctcgcccccctggtttctctttcttctcctctcttgcctcttttcgccggctgcctttctttaaatgtgcccgcctcaggcccctcccaccgcagccccgactccacccattgggtgctctcagaagaggggcggggactgatgggggagaggccagttcctggaagatggtgctggggtgggtgatggcctttgaacgtaagtcaacggttgggtggatctaggagggctgccacgtctagagtaagagggtggatgttggctacaccatgggaagagtgactcttagagtgagggggtgtgcagttgtggattgagctgggagctctaccagtgtggataacaaagggagatttccctgaaggatgttcctggtatcatcacagctagggaatttgggtttaagtctaggggaaatgggcctttcgcaattcccatccaccctctcaaaggcctcttctggcatcttcattcaaaactcttccctgtcttgaccccagcccatctcaagaagccagtagtaatccagaatcattcaggtaatgtgcgtggctggcagctgagagattttagtctccctctggacactggagccatcttcatatttaagagagaccctgcttatccagaaagcaaaacatgtcataccctataaaactaaatactctttgctcaagttgatcaaagatctattacaataaagccattctgtgaaaagaaaatata

SEQ ID NO: 49399 - DNA, 829 bp, Homo sapiens
caaatacacagtgacactactggaagagactcatttgtttttggagttatgaagcactctcctttttcttggattaatttatctccatggtaattaaccaacaaaattatgttcagagatatagtttctgttagattgcctttcagagattagatctttccttttctacacttccctttattttgagccatgaatagcaaagcaaaggaccattaagtatcctattagccaaatgctttagtttacaccatgatgatctcagaatacctaagtaatcagtcaatacatttttttaaaagccaaataagttaataatcttaatgaagtctgacttcattaagtcatttttgtagttcatttttgtagtttttagtgtaatttagagacatagctcaaatcaacttcctcattctataagtagaggtacacataattatgcccttaaagctaatcaggattttcaaaagtcaagcataccatgggctgtggcttttattagtcacagcctccggaaatgttgattcagctgagtaggaggcaatgggagcattcattgtgacttagttaatagtcatgtgtgggggaagggtgcagaactgggtagaagatgaaagaagataagcacatgtttaaaagaattgcattaaacaactttttactatggttagaaaagtagcatttgtttttttcatgctgtaatatgttcagcttcataatgagttgtgacatttacagcattcttttaaagatatctgggcagagcaaagccagggaggaaattactgagcatgactactggcaactggtgataaatactttcgcattattt

SEQ ID NO: 49400 - DNA, 627 bp, Homo sapiens
tactctgaatgacttcaaaacttctgttaatacaaattctatcccaaagtatcaaaagagtttgcagatgagatcagagaactgctcctgagaatcaaggagaatggaaaaggtgactaatggctggaaaatgtttctacttctaaaaatagtgaaagaatgagatctgtatgtaaactgatgagcctcatgcagacgccaaacaaaattctaaaatggatgatttgtaggcaagatacagtaaacaaatactaaccagtgtgaattcactaagaacaagtcatgccaaccagtctcacttcttttcttagatttggttgcctgtgtgtcaggaggaaggcatgcacatggtatgccttggttttagcatagcatttgccaaatatcgtgatgcacaccttttgttgttaagatggaggaatgagggcccaggtaacagcaagatgactggtggtttgctgcatagttaggcattcaatgtcacccaaagaatattggccaaagacttgacttccaccttaaaaggcaaactccaagaatttatgatttgctcatttctgttcaatatttttgtcaaaaacatgaaaaccacagaatgcatgtttatgaatatttcaatttaaaaat

SEQ ID NO: 49401 - DNA, 1211 bp, Homo sapiens
tcaataacatgaacatttttctatattgtggctttccaaccacggaataaactaccttgcacaggaataagttctgtatcagcatttctatgagtgggtagttgaactgagaggagaaatctctaggtgatttctcagtcttctaaatctaaggttcaataaagaaaacagtttaaaggttaagtggtgcaaaaaggaattcctgagaatcactgactcataactgcaaggaaacttgtagtcatcagcaacataagttaaacaagttgtggtctaaagcctaagtctcctattttaattcttttaggaaggtaagaaaccctcggaacactccacttattctattttatttatcctcagagtgtttattgaaggtacagcagtcatcaacatccccgttttgttgactggaaaatgaagcaattccacagccaatgaatggcagggcaagatgggaggtcagttcctgtagacatctggtaatctttccatgacattactgttttcatctcaatagatgatcccaaggctttttttaaaattaaatatatttttaaagtaattttaattctctcattcatatatatatacacatatatgtaatttaccacttgtgaaacacttaatcacatgattttgatctacatccatatggttctatgcaaattccttaccagctagtaattaagaaccctggttaaatgtaacacttgtaaaagcagtcctggaattttggtgctggcctggcatggtataataaaggtgctcattcctggaatgcagggtcaaattccagcctggctctgccactgacaagtcatgggaccttgggcaagtcaagcaaccactgtgcacctcaatttcttggtttctaacatttgtgaagggcttgaactacactgatctatgtttcttccatcttttaacataagtaagtcattgcctattgagaactcatgcctatcagtttacttgtgatggtcatttcgtctttcacagctcaaggcatgatttagtttataattctattgatttttaatgtttttcagccaggtcatatcagaaggaactttgcatgcatatttagcctgattttagcaatatttttaatctaataaacttaaccaagcagtcttgttgttgttgttgtcgtcaaaatttggggtaaaatttcaaaaacaggaatataactttttaacttttcaactgta

SEQ ID NO: 49402 - DNA, 660 bp, Homo sapiens
taaacaaaaatactgggaaagaccttctacgcctattaatttataacaacggaaagttactctgaaacaaacaaatcacggtaaaatcacatccagtgtgtcagtacagcagttaggattattttttaaatctgtgagtcttcatagtttgctcagcagctgacttcttgcaggccctaatgtttttgtaagaatttgtccactgtgatttcagcagtttttaagctatgtctttcagctcagttctactatttatttagtaaaaagtaaactaaaagatgactatgcctggaaatggaaagtagtaatttctgcgtcaccctccccccctttttttgagtacatgtgttgcaaaagtgcctcttgtttctttggccttaaacagtataaacaaaaacttatttttgtagctctgaaaagtacataagtaagattgaggtttcatgtggagaagcagctactacgtccctaagtcgttacatcattaagctccttgaaacttatgtaaaatccagtggtatcaggaggcttacaacgtggaagatcttgaaatctcattttattcctggacccatggggattcccactaccagggttgtggaagctcatttctcactattagaacttcagttcttttcatgaagtttataaatcctagcc

SEQ ID NO: 49403 - DNA, 3296 bp, Homo sapiens
taattaggtgaacttcacagatttttcttttttgtcaagaaattacatgttggagtagagtttatattttctattctagtacacgatgaccctccattgtaaaaaaaaaaaaaaaaaaaaaaagcatacacaaagtagcagagacattcatttctttgagtcactaataatttctgaaagatgataaattcaaatcctgtcctttttcctcagggaaaaaattaagcattctgttggctctcctctgaattattttaataaaaaatagaatgctttattactatttgtgaacatagaaagtaagtatttgattacacgggaggactactttataatttcacttcacggattcaaatggggaattctcaagaattttaaactcgatttcaacatgtgggggcttattttggatttcttgatttgttacgcggctttcaggtatatttaaaaatccaagaaatgcaggaggttttaaagaaataactagctgtgtgatttctggctctgtccaaaggtttgcttttacagatttcttactaatgtaggttttcctcatcttaattctaagcatatatttagtgatctaaagttagaaaatctaaagcacaatttaaatgattaaacactaaaggttcaaaggggggaaaaagcttaatcatgcctttgtaatgtgaatggtaaagacaccaattattgactagatgcagccgactgtgaatggacagccatgtttaaagagaagttaactataaagcagggaagcgtctctggtgagtcagagaattcgtaacttgaggaactcctagtggaaatgaagtggaaagacagtttctttcatcaatgagaaaacgtctagaaggaaaagagggttaataaaactcaccagagaaacttactgataatgattcacaaattaaatcagtttacgtcatacattacaccctttgtattacgttaaccaacgagcatactaatcagtatggaaaatgccgctttaacttgcctcaatttcgtaatcgcccgcccccgcccccgctttgtaaattctctagactccagcttctcgcttgctcacagtccatcccccagcctcactcttcctggcacttaggtggcggctcaacaaacttaggtgaactgaacagagctgacaaggcaatctcaagttgctgtcctgggagtggtgaggcaaggcacaagagaaaggacttctagttcttcccactgccagtgcagcccccagcatcactttcgaccccttcgtgcctggggccgtgatttgtgggtgatcaagtccctcgctagcctgcagtacttccgctggtgcagtcatctccttcccctcgcactaaaacaataccctggcctcctgccaaactcttgagcagcgagcaactctggctgtttatggcccggattgggtgctgcaagaggcttgggccgctctaagtgttagcagaggcccggaggaaaagaagaggcccaagctttaaaacactcccttcctccgccccctcccttttgtcccagacaccaaaacaaacgagctgatacacgtgtccctatgactcttgtttactatcaagactgcgctgtgcgagcgcctctgggatacgtagtccagctcttccccggccagcagtctcccacagccaaggaccaaggcttgagactacgaacccacaatccatttcggggacaaagtttggcttgggtccccggactctcggcaatagtccaatccgaagcacttactcttgtgattgacatgccatcttctccagtaaacacaacacaaaagtcaatacatgcccgccccccgagacggaccacggtaccacccaatgggaaaggggaagaaccgaatggcagttctgcagtccaataagagggcgaaagagctgggcggggctcaacccccagggggttgaggggagggggaagacgaagcttgaaagacttggtaatggcgacgggtttggtaagtaggaaagtttcggttgaggagtaagagctgccgcgggagcagtaacccgcgcgggggaggccgacgtcggtcggagagggggtacgagagctgctggtggtgttgtcgtggccggagcggcccgcgcctgggctgccggcacttcgcggcaggtttgttgtctttcagttagggaagaggtgggggtggggaagggaggggcaggagcgcgggggattgggcagactggagggctcgggtcctcgttccttcttctcggagggttgcccttggggtgggggcagttaaccgttcgattggtgcccgcggcgagcccaccggagcagcgtctcccgcgagctcacctgggcttcggggcggcggcgctagggggtctcgggcgggggccgggaggaggcagggggagggcgaagttccgggccaggtcgcgcggtgggtggccgggccgggtgtggagatggggcgggccagggcgggggaaggggccgacgcagcgccggggctgcccaggaaagtttgacttcaactccccgtttgtgggcggagggtcggagcttggccaggggtggggggctggccggaggtgggggaccccagtgaggcgccgcctccttctggactgagggggattctggctgagctgaggagctcgcggagccgctgggccccggggctcattgttacgcagttcgaatgaatgggctcccaggcgcctgcgcgctggggctgagccgaggggaaaaacaagcccggagtccgggctgcggtcacatgatggggggaagggaggggaacgcgatgaatggcgaaagagggtgggggatggacttggcgtgaaccgggaggcaccgctctgtgtgacccaaagaggaggcttggcaggcgattccagtctccgcctttcaacctatgctgccaccgcaggccgattgaaacaaaacaaaacaaaccaggcgaagtggacagccaggtttttgtagctttaaatgctgcgtgctgtctagggtgtttcactctccgctgtgcactctacactcgagttcattcttagggagttttcagctacagtcgtttttagaaggagcactgacagcgaggtaatactcaagttttctgtttgttttgtttttggctcatggtgccactgatgccaggacgagaggaggcttagaaaaggagttatacatactgggaagcgatggagtcctactaacagctcggatggaggctttagctttattaatacttccctctgaatagccgtaagcactcctaatagtggttttgaaattaaaggtactttttgaga

SEQ ID NO: 49404 - DNA, 644 bp, Homo sapiens
caaaggttggagcgcagtttgaaaagaggtttgtaagacatttgaaatgtttaaccatatctcatttaacccaagaaattgcactatcagctttatgttacagaacaataatcctggcagctgtatagaggatgatggaaaaaggattagtcacacagcaatgtgctgaagttgcctcttattggctcttgagcacagactgttacattttcaggaattctgtgagccagttgacctttcacacagatatcttaaaatctacgatggtgagagtatttacaccatggtaatcagcaaacactacaaaaatcagggctttttctattttcccacaaagccaattaaccaatacacccaagaaatagaaccacagaggccagtaaagtactatgttaacagcctaagacataatgaaggcccgactaagacctgaataagtggcactaagaatgtcaaagtgacaaatttgacaaatattcacactgcacaggatgtaggacttagtgacaagctgaaaatgggtgattaggtagaacaaacaaggattcccaaatttctggattaagcaactgatacaggaaatttagttttacactaacttagaccactagacactgaatataccaagatgaacataaacttct

SEQ ID NO: 49405 - DNA, 2272 bp, Homo sapiens
tttagtacaaggtagaatgcgatggccactagagaaaaaattaagaacaggtgagaagggctttatttttatgcttataaatgtgaactttattctgaaggataagagattcgggacatggtaactggattgacacaactgaatatgcttttcaagtatattatatctaacttttcttattttgggcaacttctctccaaactgactagcaataaaatctgactgctagattctgtacaaatggttaatcccaacctgaacaaatgtctcaaaccctcccccacgtgtcactgtagataactgcctcataaaggaggaaaaaaaaaaccagcctgtaagaggggtcacctgtacagtccatttgttaaaggagtaagcgtttccagctctactttaaaacaaggccctatttcattatgcgtctgccgtctgttctagagcttacacttttgaagagctcgaacgctacaccccttcgtcaagaactgcggcagcagccggtggctgccaacgcggtccacagggtttgggctcccgaaacttcagggaagctggaggcatggggggggggggggtcgagttgaaatgaggaacacacagaaaccaagtgtccccaagactccagaaaagagggagccagtcccagagtaaataggttggctagaacagtacccaagccagggggccgggcggaggggagtggtcacgtccagactggaaaactttctgcaaagcaacgggttgggtccacctcgctgtccaggtgcggagcagcgcagacccccaaccccacgacctggtcagaccccgtctccttaccgtcctgcagaagttcccggactgtagctgcagccgctccagagcctcgagctccgaggccagctacagcgacgctgccgccgccaccttccatgttggcaggtgccgggttgatgtcgtcagcagcagaacggctccgcccaggtggtgacgcagaatcccggcgccgcccgcccacccagcccatggctccaggcccacctggcgaactgactctcagcccgcgcctgggctaagcctggctaggagccgcgcaggtactcgagcagtgggcgcccagggtccgagtgctctgcgcccagcgcaccgagggagccaaggccgtcgggccggcgctttcagctgtctctcgcagcagctcagggccgcgccccctgggctggcgtcgtgccctagccaaggagaaggtgggcaccggaacgtggccgcagcgcttatctgtgaagcaagtattaaacctcagaacaggggccgcgcggcgtaaggcaggagagcagagcggaggtttcagggagcttcgtttgccctccacactcacaagagtcacgcgttagttgctacacagctttatctgttccacgccttgattggcactcctggggtaataaaagcccgcaggaaatgcttgggaagaaaagttgctggggatgaacagtgaagagaattagggagagtcgatgaagaaggaagtctgaaccataaaaggaccaataaaactcactgtctctaccctccttccttcccatgagacctttgaccttttgccttttctacttcttcctcagtttcagtcacgtgccagactttttcttaattacaaactgatagatggtccacatctcaactaacagtattgacgctgtaagagcatcaggttggttcccattgtatcttctttactaatacgttcgcgtttttgacctagatttctttcttctaagataaatactgataaattaacagggtcaggcaaccacaagtatgcaagacagtcttaagcttcttcgcaaaaagaagctggaagatgactttttcattttgtacagtaggtatgtatccaggaaaccaattttatccagttccagagctacgtggttttctacattctgtttcaaaaaggtgctattacttatcctgtgcttatcgctgttctaagtattttataactcaatgcatttcatactcataacacctcaggtaagcaagtcttatgctacactgcattatgctctctttgtctcagaggattttccctagtatgtaagatcttagtcatgatgggaataggggtgattcattcattacttgtgaattaggaattgtttttccttccttggctttattccccccagtggaagattttagaagagtgagtaatattcattcatacagcgaaagttttgacccctctactctgcatgctctcatgagtttacaaacataagactcaatc

SEQ ID NO: 49406 - DNA, 1859 bp, Homo sapiens
gatcgcaccaccacaatccagcctgggcgacattgggagactccatctcaaaaaaaaaaaaaaaatcttccttatggttaatttatgttcaaagtctatttttctattttttctgttacatgtgatccagaatattagtgataaattaagaaaaagcaccaacttaaatgtgtttttgaatgttttatattctataattatcaattttcaacatttatttactattccccaaataattgttaccaggatagtacttttattaaattcctgatacgttgtcaatattgaaaaaactcaacaacttaaatgtacacgcacagtttgaaaagctggaaaatagtgaaagaatatccccatacccacctttcgtaccagtccccaaacatcacggtaaagtttactgtctcttcccagcccatggacgggaacgggaacgcctacggaatatgttgtgacatacagttgatcctaggttctccagaacaaaatgctgcacgaccacctcatcctggccctttattaaatatagcttaattctggacacaaacagttcccaccatgaagagagagtaggtgaccggaaaggagtgcgtcttaagcgcgttcgctgaatttgcaccacccaatccagccccgccgcccggcgccgctccttagacctggaccccggcaccctcccgccggggccgcacttagcagtggaaagtctgtcctcctgaagaagttgcgctccgacctccaagcatcaggtcaaaagtctaactcattctctgacctgccgccaattagaaaacaactgttgccaataaacgtggtcgcgccgcctgtgacctcagccgggacggacccgcgggcgggagcctgcggggcgtgaggcggggtggggccctggctcccctcccccgcccagccgcggcgtctgacgtcccgcgcgtcggcggccgcggagcagcgcagggagccaggcgggctgccggcgggtaagggcttctgcgacccggggacccgtggggcgtaggccgcggagggagagcgccgctgcctggtctggagaaccccgcggagctggcctggcccgacccggcccggcccggtccgcggcgcggtggtcgagggcccgcggcgccttctgggagcgggagggccgggaagccgggcgttggtggagggaggcgttgggcttctgtcgccgcgaagctggcggaaaaggcagtggccagcgagccgcctcgccagttcccacgactcccagggaggtggcgacacccgcttcccgggccacccttttccccttcctgaccggggtccgtgcttgccttcccaggtgggggaaggtggaacactgtccatcccctggacaaaaacgctgcgcctcggggccttgaacccggttttgtttgaaaggaagcaagagaaaataagtgtttttccatttaggtgtgaagaaaaaaatgacactccaatgggctgcagtggcaacctttctttatgccgaaataggactcattttaatcttctgcctaccttttattcctcctcagaggtaggaaaccttcaaatcgttaactaataaatattggatcgctcttaatgtaaaatggaaaaagttttctgaacattaaaaagtttcgaaagtctttgaaaataaactcacctaacgaattaggtagtatataatgacaatattaaaataacattttatataaaactctgttacgtgtacaagtgaaataactttttcttcccttctaaaagaaaaggcgcctatacttttgattctgttgattacagatataataaagcaacgattatacttttaacacctgccctgccttgtctcaggttttacctttgtttta

SEQ ID NO: 49407 - DNA, 2365 bp, Homo sapiens
ccaaataacatggtgcacttaaatcgcactgatcatcacagcatgattcacaaataataccgtacaactacaaagatataacacatcgctacacatactttatttgcaattcagtaccatgaaaacatttctctaagaggtcaatgtaataatcttttattgatataggaactctggcactgaaagcttgaataacccaaggtaatgatgtcgtcaccaagggaggacaagaatagaacccaaatcccttgactcccaagcttgtgttttccattaattgtgctcctttctattcatccaagagcatcaagtgtaaaaggctggagaaaggagtggacacaaatgagccaagtccgcaaggtggagactgcactgaaggtcctaggaatcgccccttggcactttccttttgtgttggctgaggaagatgaaagcagcaacaaccacaaactcctgggaccaagaactggaactaggtactgcttgttgtggtaactctcttcctcattttaggcctttcctttttaacctctccttccggccaagccttcgcgctctcttcccctccctcggtttctatccgctcccgttagctccactccgcacattcctgcaaggtgtccccgttaagaggaggcagctgcgccgcactggctctccaccctccatccggccctggcgcccagtcgtcaggtgttcgagaggttcgtagcgtcacaagcgctctccctagaaagtgagtggcagtcaagcattataaacgtgtttcaactgtaaagagacttaagagatgggaaccggggcatataccaagttagctctgcgtgggtctaggtagctcgtcacgacaaagcaaaatttagacaagcgttgagactttccttctagctccgagtttcacagctccgccatcccctgagcaacctcccactggagggcgccttccggagcgcgcgtgtttacacttttgctacaccaggcggaggaaacaagcgctcgctgaccccgggggattccaaaccgttactccgcccgccggggtggggccagcgcaacggccgagcctgcgcagccagccggctccgggggccccgcgcactacaagtcccagaaggcagctctccgcggggcgggcagtcgccttatctgcttctggctcatttttaccactgctctccccttccccggtccccctggtgtcctttccacagttaaaggctactttctcttgaagcacatgaggagaagccttagcaacctcaataccgaagttcttcgcgcgctcgctctttctgcctccgcccgaactatgcctgagtccctcacaggagttggatagtagaggcgagagaaggaagtctttgcaggccaaaattgggacaacctgcttggacttccgcctcccggcctccggaaggcagtgcgcacgcgctcgctgcgactccggcgcggttgacttccgctcccactgtgctctgcgagccgaatcatggatcacactggtaaggaggcggaggcagtgggggtcccggttccaagcccccttggccggcctggggctggtcgcacagcaggcaaaagggattatgctcgccccacaacactagggtgtggcagtgagaagaaatctcacagatgccttcctgtgcccggcaggggcctgcggtttcctggcctaccgtctggtgtggtacctacctcctccgtgccggcaacaaccgctcctactctggttctgctgagctccgagcccggaccagtgggcgatgtaggccttcgggaagggagagccccggctctgttttatttagcccagctgctctggcctacgttatggagactggcgggtagattgcggtctccgagtcgcggaatcctctttacgctgggagtggacgggcgagaatgggttggagacttcctgctgtctcagtcagctttgggcgggtgctgcagtggtcaccccctgtcgtctctccgatcctttatggactagaggggtgaaagaagggagtctgatagagtttttggaatcaaactcggagcagtttttctacctaaaccaaaagcatgccccgcgcttcggctgaggtccttactcatcatttgagggtatttacaaagaggagtttaaaatcaaggcattctcatacttttctccaagtaagagtggctccaccctttgttatgtattttctggcttttgcttctttgtggttcttggatattgaatgagtgctcttggagttatgtgccccatacatttatagcgaccgtatcacaaatagagaaaaaaaggctttttcttgagtattgagttgtcctcactcatcagatatctacttggttatataattaggtgtgt

SEQ ID NO: 49408 - DNA, 534 bp, Homo sapiens
agtacctacctcataccctgctgtggagactagagagatgagtaaactcaataaatggttagcccaggctctgcctcatgataagcagtcaaaaaacagttgctattcttttcaaatagttcaggaggaagcccaaataccaggtggaccgtggagaaaatcttttgcccgttgccaacagatgaactattttcccaatgtgcgggagatattgagttagtcataaacgcagcaatgtgttaatcatgttgacgttatcaggatacggctatctttttaagtgtttgctgtgtgctgggttatctgtcatgaactgctgtcgaggtcacatgtcagttggcttggaactactgataaatgttattattaagtatctgcttcttccacatactatgtggaagcctgagcagcctaagggatgtgaggcaacctgacaaatattttctggagagaaacttcagggagaaggattgttaacacttaccaagctcaaattagggtgtgggcaatggtggagccgttatgcagtcgctc

SEQ ID NO: 49409 - DNA, 976 bp, Homo sapiens
gggagcagcatggtggagtagaaaagtatgagctgggcattagacgggctggggtttgagttttggctttgttgcttgtgtacttcagttaggatttcttagttgcaagcagcccagaacagctctggccagcctcaccatgccttggctatgataaaagccataaagaggaatggcaccgctccttgatgcttgttggcagcaggtacctggaattatgctcccaccaagactgcatgcatgggagggatgggattcccccagagaaaaccagggtgctcttaggatgctaggcagcccaaaccaacaaacatctaatgtattgtgtgaccttacataacctctctgaatctcaatttcctcatacttaatacctacctcttagagttttaagaatttaacaagataactatgtagaaggcctagaacataatgttgctttataaatgttatttctcttttcttcttccttttggtctacatgtctgaaacgtctacctctaagcactcctaaattcagttaaaagcttagtaatttatctacctctccaagctagaagtcaggagtgagtgtcagtcgattttctcattgttttcacctcctaaataaagcatatacatctctcctggactattacataagttttacaactgatccacctgcctctcctctctgactctctctgccgctctccctgaggcagtataatataatgacaaagtgcatggaccctggagccaaaccaactgcctctaaatcttggctttgctccttaactaccatacaacctcaatcaagttgcacaatcttagtgtgcctgtttcgtcatgtgtaaattggggataatattcctacctcaaagagttgttcggggatcaagtgatttactatacgtaggcacttagaacagtgcttcggtaatggcaagcgctatccatgcgtttgttcagtaaatccacctttttactgcttcca

SEQ ID NO: 49410 - DNA, 936 bp, Homo sapiens
gttgtgactatttctatcagttttcttcactatctgtgaattcttggaaacatagatacgtatctgatttatctatgtatggccagcacctatctatccaaaggaagtgtttagtaaatgactgctcattgaataaaatgagcaaaatggttgatactgtccactgagcaaaagacaagctattgatttcaaatatagttttacttaaaattggagggctggtatttctgtgactactccttttactaactcgccataaaaatccaaagccataatactaaaggttaccattgtggtgacataaaaatagaatctaaagtactagcacaggtgtggcactgtctggctagctccatgcagagggatggagcatatggaattgagccaagaggatgattctcgtggaccttgaaatttgattatgatttcaatcggattttatttggcactgaagagcagagagttccaggctgtattgcttagcaggtcctgaaatgtagaaattctgttattaattgaaaatagactcatctggtttaaattccaggcatgccagtgggtaaagtttttaccttgttgtgaaatatagagacctgaattcttgcctagatctggagtcttctcacatcatacagagggcacaacaggaagccagaggcaaggctggtgttttataaagaggatctctggaattggctcaaatgtctgagcaagttctcagctggaggcccagagttcagcatcaccgagcgtgggagagatggcgctggccaagaccactgagggccatgaaagtactttgataagggaggagggggtaatgtttgctttggggaataactgcgtcctgtagacccgaaagaagttggttgcctaatgcagctccaaacagtttgaatttattaatattgcatcgcctgcagagtctgaaaaaat

SEQ ID NO: 49411 - DNA, 2016 bp, Homo sapiens
aaccagtgtttagcccagcacaaggcctgggtggtagacttccaataaatgtagaattaagtttattcacactatatagacttattgcaaggcaagaatgagaccttagactttcgtgctcaatcttgaagacaatgtttttcaacccttttcaacagattctctctcaaaacctaaaatctcatccaccatcccactctctttttaccagggagatgtgtttctcaactaaagaaatagaagaaagtgtgttctctacgtattgtcagttagctaattagagcagaatgctggtgatgccaaaatctgtagccccatcccttatatggcatttgagaggagcgagtataaagcagtagataataccaaaggttttggcctcagggccgcagttatctctcctttgtgagaccttgggggcactgtttaacctctctgggtctcatccaagaaatggaaatactaataatactccatatggttgttgcaaggatgaaatgagatgtctgtaggaagtgccgaggaatgcctagcacaaccaagagcttgttgaacttgtcacgctttactgtcgataatgtgcattaagcaaacgctagttttatttgtttatttcatcttctaagtataagaatacattgtagctcgacattttggcaccagcccctaaagcattcccaccaccacccccgctgcgacaaagccctgcgctccttacgacagcgtacgacgccgagcctgacaggaacgcctcgtgcggtagaaccgcgcgggccaatcgcgctgctcccgggtgatgacgtaggctgcgcctgtgcatgcgcagggaggggagaccttggcggagcggcggaggcgcccagcggaggtgaaagtattggcggaaaggaaaatacagcggaaaaatgcagagctggagtcgtgtgtactgctccttggccaaggtgagggccgagtaggtgaggtcgtgttgagccagaggcacggaaggtcccgctcagtgggtccggtacgcggcttaaccgtgttgggctggcggaggcgggcgcctgggccgcaccacccctggccccgcctctgcactggctcagcccggccctgggctccgaggtggccgctcatcctgcagcaggcgagggacggggctgggcccaggctgtggcgagtcctttcgggttgtgtgacggccggcggtcacacatgccacacccccaagcctgggccgagggccatcccggtcacacataggcctctaccttggaggaagtgtaagccacccatgtcccgtatagtctggctttttataccatttgcctttttctcatcctaattctgatccctgagtggcctaagtttatgcagtgggcaggtaaccctggggtcacttcttgaatggtttagatccagtcagctccaacagatagccctcggaattcccctaaggtcttgtcagtgttggcagctttcaactggtgttcattgccatctctcacgacttcctggaggcttaaatctttaattgcagcaggttatcagaacaactctcctttttaatctgcttaccagatacagccaaattgtgtgtatgtggcaccgtggctgggtactatgttagtggagaccttaaaaataatatagcgatcaaacccttttgtttcagagatgaggaacctgagttctcaaaagttaatgtaacattctgcaagtcatgcttttagggagcggcggaggtgggactgaaactcaggattgtcaatctgctgctttttgggtttgctgtcctgacctcaaatgttaagagttgccttggaataggaaacatcagtgtaggttttgtcactgccgcccattttcctgctgtgagcaggggttatttgcttgcttgctttctgcctcattgcccttaggaaatggtagccgtccacatatagagattagggagattatgatgcaatttgtcaaactgtagtagcaccagaacgtaagtacattacttggtgcattttcctaagttac

SEQ ID NO: 49412 - DNA, 1099 bp, Homo sapiens
ggctccaggacctacactcttggctatgggacctcttcatctgtctgcatccctgctgccctcgtgccaccgggattggccagcataataggcaaaccataaagccatgtgatctttgtagttcctccattaactaaatttctatgattatcttacagaaaaaaaaaggaaatgccaaagggaggagtaaaaaggaacagacatatccagtttcaatacattctccttaaaccaggtttccttgcagaatacttagtttctgttttttatcggttgtttgcttttcctgatgaaaagtttcttacgtaatgagctgacctttcttctggatgaaaggaacaaagaagttggcgaacaatgatgccatgaatctcactctttgcagagtttctaaaacaggatctaacttttgacccaaacaagttgacaaggtttctataagtcacaatttccctggcagatttagaggcgaaagtttaaagaaaagataaaagggtaaggagtaaagttctaaggaccacatgaacaattctctgattgactctgactctgggtagcaggcctttcctgctaacaaagctaagatggagccaaaggtcagaaagctttggcagagaaagctattttgccaatgacacatgctgacagaatcagggtatgtgcaacgatagagccattatctggaaaaaatcaagccttggggcattacaagtttgaggaatttaacagagtagtgattagagccctggaaaaaacagattttaagcagagttttactttcaagagacatcttggagaaactggtccactggatttcaataccttctaatggaagaggggatgtcagatctcattaagaaccaaatttggagaatgatgaaagaaaagtacctgtttattgacatagcaaacattatccccactgtgaaacaaaccttaatctaagaggtccatacaaacccttctggctaagcctcaacttaaaaaacaaatcatatctaatttgttctggtcttgcccactgacctttttctgctgttaaggaacacatgggtttgcaccctgaaggaacacagtttctaggttcctgaccttctgt

SEQ ID NO: 49413 - DNA, 1254 bp, Homo sapiens
agatgtttactgagacaacaaatatccaaaacatgaaccaccaaagaagaaaacaactagaccttcacatgcaaccattagagaacgagcaaatgaaggtgaggacaaaggcgccagcaggctcccggtgctgcctctatctgcagcacaattctaaacaaggaatggctccatgagagctgatcatgtgaaaggaattcccttaacagcggccctgccaatcacaagtctgtgtccacaggcttgaattgtcatcacagataggcatggctctgattcaacactggctccttcagtgaactcattcttgtggctttcctatgcagatggccctcaccctacagctctcagcacccagcaggtggctgggctctgcttctctatttccagccatcaatgggacatttccatggactggccagctgtcatctctaattcatcttgtcccaaacagatcatcaccacccacactgacttcttatcctcagctctgctgtttctgccagtagatttaaaattcttctcatggtataggtgagacatcaccttctctttcctttatcccaatactcagcttttacttcaaaatgtttctcaacttagcagcttcctctcattgtcactgccactgccactgcgtcagtccaggatggcatcaccccatacctgttactctaacaatctcctaaactgacctctcaaattcttcttcctcttctgcctagtccatcctgtctaccacgggccaaccgatcttcctacagtgctgctttcattgtttcacgaaaacccacaattgtttcttatgatatcaagccatgatgcctctgcctggctttctgcagcctccataacccatcctctgaaaacggcttctctttctggtgccgactctttgctttccaatgagccacactcctcatactcttcagcaaatatttactgatcaaatattggccctagcagccttgcttcccagtgcaggtattctcacattttagtccattgtgaactttgttctgaatgaatccttacttcctcactaagtctattatttctggctaaatgatatacagaaagagaaatagaaaaaaaaatagtccctgtcttcaagaacttacagtctaattggggataaacaataaagaaattaaccaatgcaacaaatcaaaatgcagtaagaacctatgcattgatagagttacaagcaaagcactaagggagaagaagatatgattcatctgattgagaaga

SEQ ID NO: 49414 - DNA, 1505 bp, Homo sapiens
atttttgcacaagagattagagggcaggctagggcctgtgcgtgggtggagacagacaggaagtgtgtatggaatagagaaaaagaggaagggagtgtaggaacaaaacttacttagggttaagaatcataggacattcctgagtttatgacataatttggggaattgcatatgccacttttatctcatcaagaaggactttaggagtgatgacagctttgaactgaggagtcatttactaaaggattcaacatgtgttctgggagtcacaaaggaaaagtcagaaaagtgattccacaagcagacagcattctgtctttcttccctgcttttatggaattatcctagcttcctcctctctggaggttttctaagaacagatattcacaccggatttcagaggctacatgctgtactgggtctatggcacgacctcgaacagaacaaacccaaataaagaggacaaacacaacatgttcttgctgctgaatacctcattccttcccagcagactactatggtgttgggaaataattgggaaagaaagtccatttttgagtacatgaagcttgctcaatgaattcagagtgttctctctgggaagactcaaggccacagggaaacatctgtctattctctcagcagtcacttacactatctgttccagatgttctgactctgagccaggaacagagaccaacattctctttgactcgaaggtggttaaactcccacagatttaacatcttgccaaatgtgtgttctgatagcttctggtggagctttatgcttcatttattcaaggaatactagcatatttaagtagctcaacattatctcatgtgattttcattaatggacttggaagtcacaaaaaaaaaaaagaaaaaaagaaaatgaaaagattctctacacaaatcaaaacaggagtccattttccatgtgcttagattgttgaaaaataaaatggttgatgataccaactgttgctggggatgggggaaaaggtacttttgtaactgataggaaaataaactagttcaatatgtctggaacaacctaacattctctattaaaattaaaaatacatatgtactttgacttagcagttccatcactgggaatctagtccatagaggtacctacacacatttatcaagacatacaaaaaatattttgcatgtctttttgagaaacaactgaatgtcacccattcctgtaagtcatgactttcctggaagactgaggacaagagcatacgtagagctccatttacctgttgtttaaggctcccccaaggtcacagtcacatggtcgacatccatccaaatcattgcttaagccccagtgctctggctgcagaacaaaacgtgaaacatgtaacggtaggtttctgtaattatgcaacagactcagcaacaagcaagttaaagcttgtttcggctgttccaccaaatgctcattttcatcattaaagcagaaagccaacaaaaggaaggagtatt

SEQ ID NO: 49415 - DNA, 577 bp, Homo sapiens
cacagtgtaacctgcctggtgaaattaggggtacatagaaactcaccaccttctaggggttggagagggaaaagaggttggtgacgggaccccaccacccattctgctacccttagcaatggacagagtcaaagcttggagtcctgctctgggcaaatgtggctggaattcagggagtatagttagttgtcagtccagtcaggagacttggcttgttttccagtcatttccgggagaagagtttaagcggctagctggtcagtttttaacttagctgtaacgaaataaggcccagagaagtttaatcattagaccatagagtcagctgctttacgagttcgtaagcctgcacgagtctgaggcaggcgggagccttggggtctaggtgagtgaggcattaattattcaccaaatcagcacttgccctgctacagcctggggaggttttgcctctgctgaggcttaggatcctctgcgccggctgggtagcctgaaagcgctgagaaagtccttgctgttgggaggctgtagaattgcaatggagggtcttcagggcttaattaaaagaaaaatatta

SEQ ID NO: 49416 - DNA, 1020 bp, Homo sapiens
ctatttctataaacaaaatataaacacatttctataaacatatgaataaagttctagaaggaggcatagcaaatgataacaggaggtactttatgggatacgtggactgtatttgggatgggggttaaggggactcttgccttacctgtatttttttaaacaaggagaatgtatttgtctataactggtaataattaaacacaaacgtaaaaattctaacaaaaaatcagttttgaaatataaatgtttgttataccttgaagaaagtagactataagttttgattaagtctgggttgtttcttcgaaatacaaatgtaaaggtctatagaattaaaactcaccgtttattcagtcactaatgaatttactgaatgacaaggcaagctcttaaattgggatcatggtgacttacatcacatctgtgtgcttcagcttccttatctgtgaaacaagtacaaagttcacatgccttagtcagcatataggctcttagtcagcaatctggcccttatataatctctcttttgtctccacattctcagtttatcagcctcccctgccaccctcaatatactcaccatttgcaaaaaccaaacccaattttttggctcctacagctccttctatctggaatgccttctccttctctgccaagccagtgtttatggatgttcaacaccccgctctgatggcacttcacatgtggagccctttcagcctcactgcccaggcacaatatttggacacatgcttattggagaggatctttctagattattctagaacagatgtgccataaggccaggcaccccacctctcacactcagtgctgtgtccccagcactagcacatctcagagcacattgtagctgtgtgaagagtattcattaagtaagtggttagtgtatgaatataattttcttatgtgccaaattgcaagtgccttgagagcatcttagttttcttagccctaaacacagagctggcacctggcaggtgctcagatatttgtcaagca

SEQ ID NO: 49417 - DNA, 1027 bp, Homo sapiens
aaaggccttgggagctcgctgggtccccaagcaggccattcctgcctggcaccacagagatccttcaggagggcagccagaggtgtggggaaaatgccacagggagaaggaagtctccagctgaactttataacaatttgaaccagacgagaaacctcctggccagaactcgggaaagggcatgaatccagcatgcagactccataggctggggaagaactaagcccttttcttttgccgctgggaggtggatagtctggggcaagttctcaagccccgctcacccactgcctggaaacagacttggggctgttagggtaggcactgtgggagtgagactggccttttggtttgcgtgggagctgggtgaggcctgtgactgctggatttccctcgcttccccaacaacctgcatgactcagcagagggacaacttgcatgactcagcagaggcagccttaatcctcctaggtacacaactccattgatctgggaacctcaccccctcccccacagcagccacagcaagacccaaagagagtctgagctcagacacacctagccctacccccacctgaggggccttctctaccaactctggtagctgaagacaaagggcatataatcttgggagttctagtgctccactcaccaccagttcctctccatactaccagaactgatactctctggaaagcacctggcaggaggccaaccagcacaaaaatagaacattaaaccaccaaacctaagaaccctcacagagtccatttcaaccccctgccacctccaccagaacaggtgctggtatctatggtggagaggccgatggttcacatcacaggactctgtgcaaacaaactccaatagcagcctggagatgggtagacttgccaggtggctagacccagaagagagataacaatcactgcagcttggctcataggaagccacatccataggaaaacggggagagtactacatcaagggaaaaccccatgggacaaaagaatctgaacaacagact

SEQ ID NO: 49418 - DNA, 2700 bp, Homo sapiens
tgatattcataaaaaccccagaaaacagaaaaacaggtatttctacccatttaacagacaagaaaataatccagtcctaatggctaccattcactgagccttttctatgtgccaggcacagcgatgagtctcctccaggcattaacttatcttcccaacaattccagaaggtaacttttattacatttcttaacttactgataaggaattcaaggtgtaggatggtgtcacctgcttaaatgtcacgtgatatgtgaagtaccagatctagagctccagttccggaaggttctggagcttttagccatctcacactgcctcaccccgagaggtccctagcatttccctccctcctatatcctcttattttttaattagtcaataagcaaacagaattaccaagtttagttactgatgttaaaaaaagaaaacctctaacggtttctgaatatctatagaagatcttcacagtgttgcccatggcacaactttaggagcttcttcacaccagattctatgtgaataggaccccatggacttctaccacatgcgggccctggccttctaaaggaagaacaatttaagactatgtagacaagatgtactttaaaaagttaattttaaaagtaggcagtgtgtgtacatggtacaatattcataaagtacaaaagaccacagaatgcaaagtaagcaaccagcaaccccctttctcccttaggaagcagtcattattaccaagttttgtgaatccttccagagagagttcaggcataaagaaacataaaaatatattaagcaataatttaaggacattttagatttagaaaattattaaaaagcttttgggacactgacattagattatcaaagataccaaggtcttttggagtgaaatccagttatttgcaacacacatgatcatctgaatacaggatttttcacatctcttttacttagcacagcagtaacaagaaagaaaatagaacaatatgaggcaatgatgtaactgagagatctaagacaaatgatgaagcatagttaatgaaaagctcatgtgtgtgagactaatagcaaccctgaccaaggatggcacctgttccacactttccaggcttgtccagccagctatctgatgacagttgtcaggattggcttctgggatgagagagctgattggaaaaggaaagatggttggggaaaaagaggaacgaactagttctttgcaaacgaaagggaatttccttctttatcccaccttccaatccaatcacaattcactaaacagagtggggaggagactgctccactctgaatgcctgccatgctcacagtctttcttctgcattgacctcatcactctgaccaaggcaaaaagaatcagggtgggtgttcagcctttgtctgaacaaaggcagggagccatgtagagcctgtgagttgacttggctgcttgtgaggcactgaagagtgaccaactaagtggtaacaaattcctttgtcatagagagggtgaatgtgagacagagagagagtgagtcagcggtttggagcaggaacaaaagccaaaggtcaaatagaggcaaggcagtaggagcaagcatgagtaagcaaaagatatgaggcatccagtgcagaatgaagccagtgggcagcagaggatcaatagaaacagaaacagagaagagctgagtggccatgacatcaccagaacactggataggtgataacaagcacctactactcttgcattataatcaccaggcctgtaaatctcttggtaccccaaacaatgttccaattctctgtgaagtttgccacactagtgactgaggttgagacatcttcctgtccttctccagtcttgtgtattctacaacaaaatttcattaatatggcaggtagactgttgcattggtggccccaggaagcacccttcccagtatccatgcccttgcatagtcaactctcacaatggctgtgggcttggccatgtcacatgctttggccagtgggatttttagcaagcaatatgtgaaaagaggtgtgatgaccatttgcacactgcagcttatcctcttgtaatgttccctctgggaagtatgagccatactactagatgatgagaagccagtggaaagagaccctgggagatgagagaccatcctggactctctggccccagctgagctcccagccaaaaatagctgagccagtgactttttaaactacatgcaacagaagaaccatcctgccaaccctcaggattataagaaataataaactgttgttgtttgaagtcacaaaatttaggaatggtttattatatagccatagatatctgcaataatgaattaagataaactgagattggctctttcttgcaaccagaaacatactaacatgcacatttaggaggactgatgatccaaatgtgcaggtctccttacaaggtcatggccgaacctaaattagtaaatagtgtggcaatgtagacttctcttcaaaactaatctatcctttttggtttttctagatacttctctatatatatgttggtgcagccaaagggcacatacttaacttacatttctcacacaaaacttatagtcagaataaatagaaggtggttaacactgaccattattttagcataaatttgtttatgctaaattattttagcataaatttgtttatgctaaa

SEQ ID NO: 49419 - DNA, 608 bp, Homo sapiens
aaagaaagaaagaaagaaagaaaagaaaagtaaaaaaaaaaaaaacccaaaacactgggtgaggacgcaaaggggccagggaaaggagtaaaaagtcacatcaaagcagctatcagtaaatttcttctgagaagcagtagttaccgagctgcctttgaaatcctgtgtgaataaaacgtggctcaagttcctgggtgacagctctaggaaagaagaggtggcatgggttgaggaaaaggtataaaaagtgagctttcattaccacgatttctattactgtggacaaaggtcagacctgtgagcaaaccacaatgacactacagtccaagaattttttttcagatagaatcagtcatataaaagataagaatacccaatgtaatagcaggcaagcattcctaaccatattatattgtttggtctggaatttgtttttctctttctgttgcacctatttattctctgcaatgcacacaaacatggaatagatatttagagccacatgtgcagtgcaacaaccttgacagtctttagatttattatttgatgtgaacgggcagccgggtaataactttgacttccatatgagaccttatttgtcatgtaca

SEQ ID NO: 49420 - DNA, 944 bp, Homo sapiens
cagtgagccgtggttataccactgcactctagcctgggtggcagagcaagaccttgtctcaaaacaaaaaccaaaaaacccccaaaacttcctgccactgtcccagtattcctacgtatttttttttttctttttaaagagaggtagggagatgttggtgataggttggtaggtttcatacagaagcttcgccaatgtcaggtgatgtctaatgcattcacacacagattcccatgactggtaatgcacagagctcctcctgaaagcttgcatctctgaagcctgagccaggctttcaagtacaataactgcataactgctggcgctctgctgcttcagccccagcgtatgccctgaacactgtaagtcactccctcctgtcaaggggagtttgtttaccctattagcaaaacgaactgagtactgcctctgggtatgtgaatgcggcagatgtctggtcaggaattctgcctgaggccaaagtctaaaggcactgccagatgaggacatcacaaaactcccagcagttaaagggctgtagcaggggaaatgacttaacagattgcatgaaattgtttaagaatcattctaggggttgtcatgcttttcagatttgcatagatatgtctataagctcaggacctggctgacaaccaccagagttatactcacctcctaccatattttgtctagttcattacaccttttatcctagccttacaagtaggatgtaggctattttagagtttttgaaatggctttcttttaccaatattccctccccattgccccacaccttccaatccatcaatctattcatccattcatccatccatccatttaatcaatgcttatctaggtcctatgggagacagaaatgaagcagatgtaagtcttgcctttaatgtaaccgaagtgggaatcagatgttcataaacagtgct

SEQ ID NO: 49421 - DNA, 1869 bp, Homo sapiens
gtttcactgtttaacagcattttcttaatacactgaaacatttgtcatttttgaactctcagaaattaggactgcagaaccaggatacaactgttttggaattgaaaacagtattttaagcaggattatatgatagtcccttatgtcacaactctcctgagtttttcctatgagtcaccattttaaagttatcattgtattaggcgtggaaagcaggttccttccagcacaatgatagaaatgacacagggataggaagcactgcaacacagtgattcatacaccttatccacttaagcaacagcggtcaaggatagaatcaaatgtggatggggtcagaaagagattactgacaaaaaatatcaggcagtagaatcaccaggtgcacactgacagtcgagaatgatgtagactagggaaaccctcctgagagtgaccagttaactactggagaacactacagtccaggggaaggcagacagactctggaaaattgaggagggagtcgtggggatgggacagggggagcagggcgggacctgcgaaaccaaatacggtttgcgcttctggggcagcaaagcccacgggggcggagggcgccgagtaccaatgagctccaggacctgcgggctccttccagcgccagctcctccccaaagcctggcgtgtccccaccctctcgctcgggaagtgccctccaaagaaagaaaggacgacccggagcgccggacaagggtccagaacgatcaaccagcctcctatcgtcccgcccctgtcccctcgcggctacttaccgggatgcaggccgcagtcactagggctgcagcggcgactcgctcgttcccggcaatgacgtccactccaaccggcctgcatcagctgagcttccaacacaaacactggcgcagcagctaggtcgccacccactcagccccgccccgctccgcccccagcggaagtgacgcgctagaagtttgggtctacccgcgggccggggtgaggattttccgcctcgctcaggcctctgcctccttgtcaatctccgttcctcccccgccccgagatatgcgcaatagagcatgacggagcgcaaggcgggaagccgcgacagacgtgtgtgcgtgcgtgcgtgcgtgcgtgatgcgcgaggcgtggcttgctggtggggcgtgctgtgccttggttggttgccgggtgtgagagcggtgggacttcgttttgccttcctgggcgggacctcggagcagtgtcctggtttgcttgtttgcgggccgctattccctttcagcagagataagcctccctctccgcgtccctgaagcccctgcctgcgctgagttccttggagctgggggctgcgataccagtctcttggagggtggtgcccggcgcggccgcgcccctttctctatatccattcctgggcatggccacccagactaaatgtcactcaaaagcgagttgacatatattactgtattggaagttagcataaaccgccccacaaatggtcccacacgtaacacatctttttaaaattgtggcatttcatacgtaccacaggggcaaactacagccctcagggcaaatccagcccaccgcaggttctgctgtactaggagctaaaaatgggtttcacatttttcaaaggttaaaaaaaaagttttgcgacagatgacaattatatgacattcatatttgtgtctgctttttaaagtttcattagaacatagctttgcattcctatacatgctgttaattaaagcttttatactacaatagcgaatttgggtagttgcaatagccccttaccctcttgaagtgaccttgcaattacgttgaggtcgggaaaacagatcagtttcaact

SEQ ID NO: 49422 - DNA, 3236 bp, Homo sapiens
caaagtgctgggattacaggcgtgagccaccgcgcctggtggggttatcaattttttttccattaattaaaatactggaaagcagccgaatcattaatgaataagtccttcaggtctaaagtaaaatgagcacaaaacaactgctgaaaatctgaaccaggttagatctaaatgaattgtttttaaatacaagaaaaaatggaaatgcagtattttaaatatgttgcttttcatgtgttattaatcatgtgagtactattaacatctccatgttacagatgagatatgtgagacaccaaagcttaaatactttccaagaggtcattaagctacagaatagtggaaccaggatctagcattgaagcctggacccctaattattatacgacactgcttgtctgtacttctgaataaaaatcagtgcttcagtagtttgatggaaatatatcgtggctctagtaattcagagtaacagaataaaaccttgttctccgcagagtatctacagccctaagcagaagactagtttataattctggctctgacactaaactttcaaggtcggttacctaatcattccgggcctcagtttcctcaggagaaaagtgggatgaaattatacctatgcgacctacctcgcggggggtgtaaattaactttgcgtgcacctttccacttcgcaggtttcacgtatcttaaatggtggttaatgttgttcaatgaaatgagatcacgtgaagtggggaaaagactgaaaaccacagaagcccgcgcaaactttactgttttaactgttaacacccaaacaggctcctgggcctcgccaccagccagcagtcctcgcgcaagaagggcattgctagctaaactgaactagcgccttccctccgtcttgccgcgggcgacgggccacgtacggagagctgaggactcactggcagagcggacaggagacacccaagcccaaaggccacaggtccaaggcctcacggcgaggctgacgcttctgctccagaaacaacttacggataaaaactcagcttccggtctttattgtttcgtccccggcggttcttacaacaaatcgctgcgcaatagcggggcatgactcgggtgaggcccctggagaccggggccggcgacggatgcagggcggccctcctcactgaggatgcgccacaggtccaggcctctcgagcccctgcgcctgcgctagcattctgccgggaaagccgcctcgtctgtcgactcacttccgcctcctccggtttaagcaccgccttttcgggggttgaagccggaagtggcgcacagccctagcagcaacaacagttttccacgtgcgcgtagggcgccgggatcacgtggggaggcagaagccaatggggaagcgtttcgtgtaggtcttctgaggtggtggcgccagcggctacctcctgcctgtgaggagctggctgagaggggactgggcgccggcggggaaggaggagcgctaggtcggtgtacgaccgagattagggtgcgtgccagctccgggaggccgcggtgaggggccgggcccaagctgccgacccgagccgatcgtcagggtcgccagcgcctcagctctgtggaggagcagcagtagtcggagggtgcaggtgagggacgaggccggggtcgtggggaggggagttcggagggtccccgtagcccaggcctgtctttgtgagctgacttggcctcggtgtccgccacggtcgccgcagggacaatgggctgcatgtttttggccgagagaatggaagaacggagacagccgcatcacagaatcgtgttttgggttgtggcgccggctttcacgggcgccggattagagcccgggtctcgggcagcttctgcggcggggcctgggcgggcagggaaagtgccagtcgcctttaggtgaaggttggagggtctagcccagccgcccaccgaggctggggaataaggcacgggctgctggctggcggggccgtcttggggatgagaagtctgtacaatacaaaactagtctgctaaaaaaaaatcattagatgtccaccttgagaccgtggaataacgtctgctgaaccagtgaggcgcctccctgtcagttttagatccgccctttgactagggagcaacctgcagttgacgcagcgtccatgggacacactgttgtgttccttaaaccgagaagtggttcttgattcttggtacccgtgactacgagtaactctctggaaataagtaatctacctgcctgctaattactctcaggaaaggccgctggagaggaagccaggcaatttccacaaaccgtagtgtttttcgtcagccttattatggcattataggttactaaggactctggtggtcccgtattcaaaaaacaggatccatcccttcgttttgaatctcaagtcattgaatacatattgtcaagaattctaagttaacatttctttaatggtttaaaggtaaaagaaatattttaactactgagtttgtgaaagtaagaatctgccttaaccacagtacaaactatcaaagttcatttttctggcagctttagcagaaatcttaaattctgttcatcatgagttttaaacaatatttagccatgcttcctggttaaacatttgggatcttacatttgggaaaaagacaacattctattgtattgtcagtattagtattgtgatattaagattctctatttgcagtccttggctcacctgctgaaatgaaagctgaatttttggagcgagattaataatactaatttagatatactgggctatttaccttggtgcgccaccttttttttttaatgttttttttttctgtgaagttaaatacattattactttcaggatatgaagtcttgaaaggaaagttgggatcttatattatttggttttctttttttttcttacaatgcttgcatatgatgaatcttcaatataaactggttaaaagtcagttattgataattttctatctcctctgtgtatggccagagtattagtagacagacaaagccaagaattatttttgttctcaataaggttaagccagtttgagagttataaaactaaaagtgaaattacatgtggacaggtaatagatactgtatgcttactattttgatactgcattaggtttaccttgtgttggatttcttttaaaagaaaaacgttttaagattagctccatccataacatttttt

SEQ ID NO: 49423 - DNA, 921 bp, Homo sapiens
tcattggagcaaaccatgtttgtgttgatctcatttgtagatatgaaaaaggagtaagtgttagcctgttttaaactgcaaatgcagtgattaaaaaaaaggtatcaaaatgtgcaagccagcaaagtgtggctaaaaaaatgtttttattgattaataaacttcattctcttaagcaaaatgaagtattaacctcataattattaaactccaatttttttgagtgaagcttatggttaaataagccaataaaaatgaactctgcttttttgggtgcagaaggtaatttgaagaagatggaccagaaaactgagcttgagtcttaacctggcactgctgtttctgccattcggagaagctgactggcctcttcaactcttgcatgggagccttagtggtgactcagcccagggacagtccaaaaaaaatccctttaatgtgaacctgctgccagccacatgtaccttgagggtggaacatctcaaccacaagaattaccttctttgggagtgggagagttggagatgagatggactaaagttttggtgtctattgattcctttccttcatctaaagtttaacctctttctccctttcaagagattggaatagaattctcagttcaataggcccatgtgatgaggtcaagagagttgtgttcaacattttatctttgctttacttctcctggctcactaagggatcattcacaatgagaggctggaagtaagctgataaaattaaaatgtagcacatggcatatccagacagaaataacttgtgctaagaattgtgtctggcttacctggttttgcctaccatgggcatcttcaattaaccagctaagatagctggtataagtattcaaatatagtaatgtctagacttattatttaatcatatatatgtatgtgtatgcat

SEQ ID NO: 49424 - DNA, 567 bp, Homo sapiens
ataggtagcctaagctaattcttgttaatgctagcaaaaagaaaatttattggaggtattcaccatagaatgtataagcttagaaatatgttggcttccatgctatcacagaacaataacagaaaccagaatagttcggcagatctctaggcagtggagattatctgaccatcttttataggctctgctcctgcaatgaaggtgccctaaacttaatttttaaaaaactatccttgtatcacttctctctatgttcaaagtccagggagagagaatttcattccatgacttggtgccaaatctctggttagggtaaggtacagtttgactaaggctgcatggagaggtggagaagtaattctcccaaaaaggacttgatataacactaggaagaaggaagcattcttggttggccaaacagtaacgataacaatgacaataataacagcaagaaatgtccactgtattttaactccttgtttctgatttggtgatctgatgagggtggctcctctccagtgtgtcttaggatgttttaaattcaattaaatttgtttccttttagag

SEQ ID NO: 49425 - DNA, 1777 bp, Homo sapiens
ccctaaaaaagtaaacaatcgaatgttggagaaaaatgtgcaggccacttccacaggttgtttttgtctgcctctagatagtactatacaacacctgaatgaaagagaacaaactctacgaaccatcagatatttcaaaaatatctgaatttggatgatatagaaaaatcaatgaaataatcggtggaatctgtcaatctttatttaaacttcacactggatattaaagcctttgctgttcgttgtcagcctttagagttcagaaagagtgaaattctaattttctccacaaggtgggagtagaacactaaaagtgttttgaaatggccctcatgaaaaggtgtcatatatttatttgtgttaagaaaaaccatactctagcaagaaataagaaaaaagaattttaaaaagtctactaaaaattagtaatctttgtgtcctcatgttcacattaattttagcctctttagagtttgtaaattttctacaaatttcaccttcaaactaaatacagggtttacaaaatggacaaagaaaagaaacaacaattgccagtgaagggaaatactacacatttcatcttgagtcgtaatatgtgaagtctcaagtgttttggtagtgattatgaattttctcaagatggttggctgtctggctgtctggctggggaacgtatatttttgaggcttgaagatcagtagaaaataggttgggcaaaatagttgcatgtggttaacaatttggacagagtctaaacttacatgaaaaggtaaatatttaatctgtctttctggtcttgtttatagagccttttatcaagagagaaaatcaggccagtcttctatttcaactctaactcaagattcttttctttcaggaaaacattcatgatctcattccacctgaagccagtgcctctgtaatgtgtagcagaatcctatggagaagttgtaaaaacacaaaatgttggccccaccccaagagtttctgattttgcaggtctggagagggcctgtgatacgtacttctaacaagctcccaggcgatgctaatgttgctggtctagaaacacactttgagagccactgttttacaatgtattcacccagcttatgcaatcaactactatcacagcaaagtccaaagaatgctccttatttgtttgttatactggagtttggcttggctaaatattatttgaaactgaatggctgttgattgtggctcagaaactgttttcttcatagcgctgcaattggatttatttattagaatttgagctgaatgttgtcgtacattttggttacattggtttctcaggatattttataggtacatgttgtctctttctaagtgcactgtcacttgaggtgggcctgggccttttgttcctgtttgtccttactcttccacggagctagcagtctccagcacaggggtgatcagttcttaatcactgaagactaattaatctttcagtatacatgctattttagtgagtaatttttgccagaaatactagtgctgatgtaaaataagggttaggattagggaaggatttggcctgaataattcaatttatatgtataagtcagggttctctagagaaatagaatcaatagggtgtgtgtgtgtgtgtgtgtgtgtgtggtggtggtggcagtgcagggacagagacagagagacagggagggagagagagagagggacagaaagagagagagagatttatgagaaggaattggctcacacaatcacggaggctgagaagtcccta

SEQ ID NO: 49426 - DNA, 816 bp, Homo sapiens
agggtggtagttgggtaatagagaaaggatgaaagccttttatgggatatggtaaaaaaaaaattaatggagaaatggttgcagaaatctttctagatgttattgatgctatatctaaaaatacttttaggattttgctgcgataatgctgcatagcaaacaccctcaaagtctagtggctttcagcagtaagcatttttttctaacggggttggaggttagatcttacttgctggactctgttgggcttgcctgggcttgggtgctgtctgtgggttggttcagctttgatctacatgattctcattcagggaccagggccaatcccaggtatgctcttttcaaggaagatgatgtaagcacaagtgtttaagccaaaccactgcagcacatataaagcctctgcttgcataatgtccccttacacaacccactggccaaagaaaatcgcatggcttagttcaacatcaacgggtcagagtacacccctcctccagaatcaggagagcaaccacgtatctcttggtaatgaatttcagagttacacatggcaaaatgatccactgctcttcattggcacctccctattaaacagggacttaatatattgactcatagtcaagactgggtgccctttagggttcccacttagttcatgcttactttgcttacttcatcgtagcacctatccttgcgctatgcaattagggtgttcagagaggcttcactgagagggcgacatttgaataaatgtcccaaaagaggcaaaggagagagccatatagatatctgaggaaggatattctaggcagagat

SEQ ID NO: 49427 - DNA, 805 bp, Homo sapiens
ataagactgggcacgaccagcagcactctatcattaaacgtaagtggtatatacatgattgggcctgagcaggccctgaagacacaagtaagttacatgaaaatgtggcccaaatttcacagctcccaatcttgccacactgccttctgtctcccagcccacacctctgggctcatggaaatttccctataaccagttggcagagaaagagaacttgggccggctttacagatggttctgcatgatatgtaggcactacttggcagtgaacagctatagcactgcagcccctttctgggacatggctaaaggacagctgtgaagagaaatcctcccagtgcacagaactttgagcagtaaacctggttgctcacttggttttgtaggaaaaatggccaattgtgcaattatttatgaactatggcctctgagttggctggatgactagtaacagggagctgccagtgatcaatgtcaggagtactcggaacattgaagacttaagggaggctgagaattccagtgttaccggcaattggactaacatttgcccagcacttggtaaacattgctctaaaagactacataagtacatttgtattattcttaaacaatatcaattaattatgtgttatgatctgttcctgaataattgctgatagctgttttgctctatcatacatatataaacacatcttataattgttcagcaagtaagcttttagaatatactataacataaagaatttcatacatttatgaatggatggagaaacatgtaaatatcccagaccactttgttact

SEQ ID NO: 49428 - DNA, 1107 bp, Homo sapiens
gtatcctaacaagtcaagcagaggagaacccatgataatgcggatgtttctgtgcattacacacccaggtgaaaaggtgaagtcaagtgtacagtgtctctgaatttatgacaagaattcaccacctccacttgagaaaatatcacacaatctcattctcctctttcagagccaatattagaggtgatggcccattttcggtcacaacaacaacaaaatggttgcactggttttaaataagtttgctaaagattgcaagtcaatgttgtattgtcctcattttttttctctttatttcaatagttttttttgtttttttttttttttttagcctctgctgtttaatgcaggctgtatgccaaaaccatcttagaaagtctgttatgccagatgtcacccttttgccctttcgctctatctgcaggttttcttttaacaacagctgaagcccaagttagcaagcatgcatttttttacagtaaaagaggtattatgaataacaccttttgtattttggatcacactctcaaagagcacagcactttgttcatgcacaacatctttcaaaaaggattattcatggttctttagatttaaagggagaactttaaggttttggcagtttaagatcagtttttttacccacagtagaagctgataggtttgtttgccttgaaactgatcatttctggacaaaagaaaaaaaaaaaaaaaagactgaactctacgtaagcgctttatgtctgctctctgttgtcaaaacagacgtgtaaacagtgacattgccctccaggagagctagctcccttgtaaacagacctactcaacaaagtgtgtcattcaaacaaagcattgggtggggttttctccacaacagagagaagaggccctcaggtcaatgattaattgaggcaagggggagtttctggataagttgttgggccaagttcagcctcccatatgtttgcatactttgtcaactttcacctttgaaagtgtttctgtttggaagttggtcagccactgtaacggctaaatgtaatccagtcagaaagtaaaacattagatattctatatttcggagaatttaaaagattccccccaaag

SEQ ID NO: 49429 - DNA, 1347 bp, Homo sapiens
cacactcatgataatagaagtaaacaggaagctaaggccaccaactacttgccctgtttcattgaaaaccgatgtccaggaattcagggaacaaacccaacactcatcattgagccacatttgctatgttttatcagccttggcgtgcaatactcttaaacagacccctatcttccaaaaaacgtaggccccctttctattctagaattggcactcagatccctctcctgttccctgtgcctaagtcccctaataaattgtctcatatactaggcccttgccctgggcctcaccttcttcttgctaggttcttaccaacaccgaatcctggacccacacccagtgtctacggccactgcagctagatctgtgttcttgccatcaacccagagggtgacagagctcacagagccccacatgcctggtttgactaccccacacagcagataactcagcatcctgggctctgagccaaggagtggtgagataacccctgaagacacttccaactctaacattctaccctgtaagcctgaatactcagtcataagctaagaagatatttttttaatgttaaaaaaaaaaagaaagaaaagaaaaataggtttaacttacagtcctaggttgtactgagtcaaggccagggtatcgtcttagaacacagagagttgacaattaaataaacacgaagaataccaggcttctccccggggcctgggcagggttagacagtgaaataagcacaagcccgggcttgtcagcctggaacaaggaggcatctgcctagagttagcctaatatttgctgagtaactcctgcattctctcaccaggaggcacaacatctagagacagcaccagacaaaactgagatgtcaatagagatcttcaaagtcagcgaatgtctccttctctccaccctttgtcctacttagtgaattatctgagatcaggagttaaacagacttgggctgaaatccaaactctgctatttaccaacaatggacaagtcatttaaactctttgagccttaacttctcaacctgtaaaatggatatgatgcctatctcacagcaatgttgtaaagattaaatgttactagcatgtttggcaccctgtaggatttcagtaaaagttattataattcttctttccttatcccctgcttcagcccaaccctttagtaccagagatcttcctactgtctttagttactcaaagtttcccatgcaaattttcctcctgtcactttatattacttagatggacaaactcctaaatcacctatttttcctccctacttactacctgccaaaatgctgataactttaatgctaatgagtaatct

SEQ ID NO: 49430 - DNA, 1063 bp, Homo sapiens
ctaaagtacagtgtcttctgtaagtgtcactttctagtgcagattcttaaccccagtctgggtttggagacaaaaacctcacagattgttgatgtattccatttgatcactatcagctggcaacaagcatggtctggcctgcagccacatcaaaccaattttctagaggacttttctcagtacttaacactcaattatattaatgtttattattgctctttttgttgttgatacagctttttacattaattctgaaagtctgtggcactttcaatcattaagaatacattttaacctaaattacatggttttctatgttctccaaatacaaatgtcacaaattttaagaaactaatctgtatatattatacccccactacactgtgctattactagagatataatatataaaaatcaattgaaaactatatctcaagtaaaaaagatatacgaacaaaacatacatatctccattagtttcctcacaacagatttattcgagatataatgagagtagacattggcttagaagaaatttatgattctttttaaacaatcacagatttaattatacccttctaaagtgggtattgttacacttttgtaatctcctgaatttaaaaaaaacatatttatttctgtttgccaagcttacatcatcactcaatagttcatgcatacaaaccacatgagtcaattcagcattcaccaacaaaacaaaggtcacaaatgagtacctcgtacagcaaatttttttaaatgtataataagatggaaatttataattaaaagcaactgatattcattcattcattcagtagatatttattgaacaacaatagcaggcaatattctagctaggcattggagatccatagctctgaataaaacggaaacaactttaataaagctaacattctagtggagatgatgggaagtaagcaataaacaaaaagcaaataatttctagcagtcttaaatgatctataaagaaaacaacatggtgagaataagaatgactttaggggatattttaagtaaggtggtccgtaaataaggtatt

SEQ ID NO: 49431 - DNA, 1738 bp, Homo sapiens
tctgagttccttcagagtaatgttcccctccaaaatataattttaagatttctgtaataatattgtaactaaaatgttcttcattctctatctatactaggtcattggactcttgtccacaggcttccttaccttctttacaaaccagtgactttctattctgtcaaactgagttaatcaaggaatacaaatgagttgaaaacctttttgctgccatccttttacagcatatctatgcttcaaaaccatccctcctgagattgataaaagcatttacttatggcaatcaatatagaatagtcttttttttttgtatacatgtctatcatgtcctcccatgtataaggccctagagagtagtgcttgcaagatcagaaagcataaggcagcatacttgtgcctgttcataaaatcaactcaagctgcaatcacttcatttatttttttcttttaactataccagggagatggacagtcttcatgtgacataaagaatggagacttcaaagacaggatatttggctatcttccaataaaaaaatgacttaaaaattgtttaaattatctggataattaccccaaatgttttcatctgaaatgcaggataattgaaagagggtctacatgagacacacatttcccaaaccattgtactgcaaggcacaatgtaagtctgtctcctgtcattcaagcaggggaatttccaaatctagttggaaattcctttgaagataaaaggatgacatcatttaccagtcatactaccacactaacttctcaaataaactggaactaaatcataagaatgagcttttagagaccaaaacttacgagagaataaggaaagcatatttgggcagacttttcctctcaatttatgtgaaatgtgtaaaatacaaattaaggcctaattaaatccctctaaatatctattgatagaaataaagagtggacaaaatgggaaattttaatgcataaatttagtcagtcacattcaaaattttctgaacagaactgaagtctctcaacatacacatacacataaatctacacacacacacacacacacacacacacatttttgccaggaaaacaatgatttctcttacaagtgtatataaattactcctgacatacaaatgtttaaaattcttcaaatttttcatgaatttgtacagctcctaaggatctttttatagactacttctgatgtaaatgaaattagcaccttgtctatctctatgccactgtttgacagacacataaaacgtgaataagcatgaaaaactaaaaatatcataaaatctctgagtaaatcctatcggtatccatccaagtacattgtattaagtttgcacaaagaaatatattggctgggcacagtgacccacacctgtaatcccagcactttgtgagttcaaggagggcagatcattaggtcaggagtttgagaccagcctggccaacatggtgaaaccccatctgtactaaaaatacaaacattcgctgggtgtggtggcaggtgcctgtaatcccagccacttgggaggctgaggcaggagaattgtttgaacccaggaggtggagggtgcagtgagtgagccgagatcgcaccactgccctctagcctgggcaacaggcgagactccatctcaaaaaaaaaaaaaaagaaagaaagaaaaaaaaagaaatacattgaaaccattttgagaatatttaagggttactacaaaaatta

SEQ ID NO: 49432 - DNA, 871 bp, Homo sapiens
tgtcaattagtttcaaaaaattttatttttatttcctgctattctaaagccccaaatttgtatttagtctgaaaactgagcaatccaaacggccagcaatcataactccttttcttttcgcttcttccaacaaaacttagtgtgtaaaatacttaatcttaataaaattaagtgaatttgtttattttgaaagatagcaatctcaattatagttgacaacagatacaaatcagtaagacatttggaacacaccaattatgaagtgccttgtccatccagatggagccaagagaacagagctcaggagaaacccaaacaagagctctggatttgggcatcacatggcaggttaatcaaagaaaggggatgattgcccaagagagtgcaaagtacacaaagagaagatcaaatgcagaactaaaacaaatagccacaattttaagcaggataaaggcagaagacacaactaagactaaaaacaaattacagaggcaagaagagagtggtagctgatgaggtaagggaggagtttagaaaaatgatggctaatcacatagattgtacagtgatcaagcccctgaggagagtttgagttgggcaattgggaagtccttggcaacctgagacagctctggatgatcccagcagaagccagacttcagtggacagagaattactaagagatgcataaatggagatattgagtaaaagcaactgttcaaacatgggagaacagagagaaaggaaaagattgaggagagattaatgtgagggatttcctcttttgtttatttctcttttgtgaagtatgtggagatgtagcctctttgaggactaatgggaagaaattaaaatacaaaagaaagtcgat

SEQ ID NO: 49433 - DNA, 1105 bp, Homo sapiens
aacacaattattgtttttatgaactttaaagaaaagtcaggatatagaatttttcccaaaaaatttataatattctcccagaagcagcttagactcatgtatagaatgaagaatattcaattaggagaataaagaattcacaaacaccaataaaaatagcccacaaatcacacagacattaataattagttcactatattgattcattttggagggttttttttttttttttaagaaaaacatttaggtatgtgtgaactcaggagtcataacctgcaatgaacccaactctgtaacacaacacagataccacagatggactgcaaaggccagtcctgaggttagctagatctgacatggaaattttcaattttctgaaccaataaattcttttgttaacttcttttttgttagcccaagttacattagatttttgacccctgaaatcaaaagagaattaaccaataacaaatactaagaactcttcactcttcacactctgagtcatcacttccttctccattccatcgcataggatgttttcagaatgacagtattaaaatgaaaatgtgattagatcattcactctacagtttctccttgtttacaagataaatattaaccctatagcttatctctgctacctttacctccccacctaccattctaattcatacacactgtaagccaacaattctgaacatttacccattctctgtgtctgcaatccccttctcagagtcagctcctctggaaaggagttaccttcctcctcaggcagcattaatactggtacgatgtactcccaatgcatcttgcttcgatctcactgtattgcaatttctgctttgccaggctaccacctacccctactagactataaactgcttcaggtcagaattcctccatattcccagtgaaaacactgaacctaactcatcttagatgctcaataaatgtctgctagatgaatgtacactttatccaatgaacgtagattacattcaatgcatgcacataagttagccactttttaaaatgagtaatccctttacagcatgattaataaatacaatctctaaaataatagtttattagtaaaaat

SEQ ID NO: 49434 - DNA, 1029 bp, Homo sapiens
cttaattataagcagcagaggtatgcaagatggaaatacccaattaggttttcctggaccaatttagcttgtccagctattgaatattttcacaataaatagtcacagttgagtttgagagagaaaaattagccctttagttagcactaaaactagtctaaaattggccatctggcttgtctctgatatactctgatatcatattgtatcatcagacattgtaaaaagaaataccaggcataaactgctaaccttagaatacaatttaacctcagtattctccacaaaaaagtaacagaatctgtttctctaaggtacctgagttgattctaagtgaaaaatatcaggttattctcactactatctattttccatgtttccagaatgagagtgcaaatctgagcaccgtatttaaaaataaatagatctgagaataaagaaaaccatgttttcacccagatgcctgcatttccatcaacaagtgctgaaacaccacgcgaactgttgtagctgattaacccagcatatttctaggaagtacattagtttggtattagtagggtgcaaagtacaaaggtcagagagggaagtagagaagggccagaccacatcacaccttacagcagatactactaagctgagatttttttgacctgtaagacatgggagtcactgaaaaagtgaaaacagaggagcaatgtaagcagagactggatgagattttcactctgctagcagcgtagagctactttagtgaatatggtattccctagccacgtgtctactgagcatttgaaatgtgaccatgaccacaagttgaaagaatattctggataaactagatcaaataaactatattattataatcaataccacctgtttatttttatttttaaatgtagccactagaataggtaaaactgtatatatgccttgtataatacatctcaattggacagtacttgtatagatgaaaaactgtgaggaggaaaatacactaacaatgatgagaacaaggtagactattgc

SEQ ID NO: 49435 - DNA, 882 bp, Homo sapiens
cacatatatcacaaggtacctgaataacagctgggattcattacatctgtataatcatctatgcatgatgtatagccatgctacttaaaactatatcttaaatatgaagactcttaacagagtaatttcatacattccaaaatatttctcttcattgtacattaattaaaactatattttcaacattttataataaatcattctaaaagccaaatattaagcaattctaccacaaaaccaaaacatttgaaacaatcaccatattttgactttgcaacttttgtaaaatatgtggttatttgggtcacagaattgtatcacatttgttgactaccaggcaaaattctttgacaagtgactttcaggtttacacagtctgctgccattatagcaattatatggcataatggaatgctagccatgtgtacttctgacattcctctaaatccaggtcattagtcattacatgaagtcattttaagtttccttcatcaattgccctctgtagttttccagctgtcatttcatttgttagtttcaactgaaatgtaaatgtaatagatgtaaatgtttatttagggattgcttcccctttctgtttttcacataaacacttacatacttcgattccttaaacacaacatgttttggcaaaactaatctatagtaaagggggaaaagtgagaaatgtggttccctgtgaggtgtgggagcagaaggtgactgagaaggaccatgagaggactttctgggatgatgttaatgttctgtatcttgatagagattagggttacacaacataggcatatgttaaaactagcaaatgttcacttaagatttatatacactattgtatttaaattttacctcaaaagaaaaaaa

SEQ ID NO: 49436 - DNA, 552 bp, Homo sapiens
aagcattctggcagataaaaagggggaaaaaaggatatataccttatatcatttatctactgctacaaaacaaaccactccaaaacttaaaacaaaaatcatttattggttcatgattccacaatttaggctatgcttagctatgcaattagccagcttgtctggctgtgatcactcaggcagctgcagccatggaggcagcagtgttccaggagcaaaaactccctcgtgtaagcatctaccaagcctctgtttgcgtatttgctgatattccaccagccaaaatgagtcataaggccaagtcaagaatcagcataggtgaggatgacatagagctcagtaccgaggagcatgactcatgggggatggggtagacagggaatatcaatgtaataatctaccaaaactctgccctctagctccaatgaatcatatccctcacatatgcaaaatacatataacccttcctaagagccccaaggtctcctcagatgtttgcaataggattcatatccgttaattcatgatatgcatcaggtcccaggtcccagt

SEQ ID NO: 49437 - DNA, 1167 bp, Homo sapiens
tatcttggaagtgcaaatttaccaggtaacataaaactccataactctatcttaaatgctggtatataaatcacaatgtatctcttttcttaagagtctgtatccagcttctcagagttcaaaataagttacaagcaataatgactgttgagtattattaagctgactgtaggttaaaattttttaaaaaaaacatagattgaaagagagcttgctttttgatgatacttttaatttcaaactcagcaggaaacaagataatcacaggtagctgaaagtcaagacaatttaaaacccataaatgtatgttattgatgaacaaagacctcaatgctaattaaactgcattttccttcatattctgtaatttcctaatatattctgcatacattatctctaaggtctgacctagagatacagtattgtgtagcagtgttttcaagtatttttgccctctggccatgcaaatgaaaaaaggaaaatggtacactatgtaaaaattatgtatcaattgcaaaaaaaaaaaaagataatgacacaaaattatttattttacttactttttaaagtcttaaatcttagttttaaatgtggaaagcatataccttttatcaggaccagtgaccccactgcaggaattctcactcaaataaaatctaaaactttggcatgaggtcattaaactattcctagggcacccttttacgctaaaagcctctgtaagcgattaaagttctaatttgaataattacattccacctacataaattccctctgtagtttcaactgtatgcaatatcagtcttcatttcctgaattaaattaatgtcgtgtaatgtggtgcttcttttttaaaaaaagaagtacatctactttcataggtaacctttcagcaaccagtaaaagtgattcatgtgcatgaggggaataggtcagtatgaataatcattaaccaacaatttgtgccagcatttattgtgtcgagcattgcaaaagggacaactcatataatgaaatgaatgcagctatacggctttataaaaatcaaatattttataaactaaatcctattttccattgaatttaccaatgcatcattagaaactttattttttatttatggcttgcctttaattagctgatacttcccatgtttgatcaccctta

SEQ ID NO: 49438 - DNA, 445 bp, Homo sapiens
tctataccgaaagagtaaagacgtttctgtatagtatctatatagatattgaacattaagcattgttctttggaattattccagccttgagataaggctaaaagggccataaaaataaaatgaagaaagatggattttataaaggatagaggcaattggggatgttatggaaagacaaactacacagcattttatactctctggttcttctactttcagagaatgactctatcatccaaacagctgcccaaaggtcaacatggtagtgagccaaagtgagcattcatgaaaaaaatagaaatcatcctaactttctcttactttaaatcgttcaataactcctcattttctataggataatatcaagctgcttagatttagcatataaggctaattatgattagattcctagtctcatcacttccactttttttttttttttttt

SEQ ID NO: 49439 - DNA, 1644 bp, Homo sapiens
agtaagcctcagagaacttcagtgtcctttttggcaacttttcaaaagtgaatggaatgcttgccaggaggtaccaagagtgaaagcccagagaaaaaggcccagcctggtcatctctctcccctcaaaacatcttcttctgtaagcttgagagatcccaaagaacttcaacacttgtaatcttgttactaactttatgctttggggtcctaaaggattttttcaggagtacccttttaaaatgtaaacatccctaggggggttactgttcattatcaaacaggacctggattctttagtgctatggtctcagggattagtcaaagctggctaataagataggggccggagacagacaactagagaggaccaatgttccaaggtaaaaacaggtaaaggggaagtgcagttttctgtcgggtcaaggggctaaaagggatccacatgcccaagctgttaaactctatagactgtgtgaggctgaaaacagtccggggcctggagcctgtgactttgaaggtgggtcctccagttcccgatgaaaaggtagaatctgggcccaagttccccacgagcagttctggacatctagcccttctctctctcgctcgctctcaggataaagtcctaggtccttccacccctgaccattccttacttaccctttctcccgctcttcctcggtgagaaggggtaagtggttattttgtgccctcgcccaatttggccaaaaccctaaaagtaaaaaacgacagacagacacgtgctttaaaatcatgttgttcaagcctgacgctctcccaccacctgcccaacacttccaggcagaaggcagcgcgcccccacagcgctccctcacggccagagccgggggccggactaggcccctttgtgaggactgggagagggcgcgttgttggggcgccggctcggcggggaggagcgggccagctccgggccaggtgtgccgcctgtggcgccggtttctcaacctagttagccagtggcaccaagaagaggactaggctggggtggccgccgcacgcgcctcagataaacacgcgcacgcacacatgctcgcgatcacgcaggactcgcggccgcgcacccctccgcctcccggcaacgcccgccccgccggggccggggccgactcccagggaagggtccccagcccaagagaccaccaagggtcggcggctacgcgcccgccgacccctgccagcctcacagccccccacccgccgccggacgccgggcgcccgccctccgcacccgctgcgcagctcagcccgggggaagtccccgcgcagaccccgccctccgccggcggcaagctccgccccgctgccccgtcgcgcgctggccgcccgaagctccgcccccggcggaaaactggtctctggaccgcccgcccaggtcgggctcaaaatgcggcgtggatctgaaaggatcaaacacaacactaattcagcaagctattattgagcacttgccctaagctcagcaacgtactaatgggggagactacaataaagagccgaaaagtctatgaaactgtgtcttcagctcttcctcttgttttagaagccaggaaacagagaaccctcacagttacttaagtacagggcagtagtggcaaag

SEQ ID NO: 49440 - DNA, 608 bp, Homo sapiens
ggtttcccattcatggtattatcatccccagggtttccagagaaagactaatattacacttaaagattccccctctatcccccctctagtaacagcaccccaaagagcagttggcatgaagtgtaatgctttgggtttataaaaatcttagtgactatggcacccaagggctctcacaagtaaacatcatcacctcgcttctgttacagggacaggatgccaagagatgaacagcaatgttttcatataaaactgcagtgcctgccagagtcaacatgatggactgaagttaaaacaagctttttctctttcgttttcatgttaggagaagtatcgatgaactgctgacatgaaatactgtgccaaaaggacagagtcagttcctgccagttgaataaattccttgttgggatataagggattttatgagctgttacaggtttatggtattatctcttaaatggctacctcaaaattaaaaggcaatattgtactcttttttttaatgtataaaaactgatgatcctattttagaaaccctgaagaactgaagcactcagcaggatcttgtgtattacaagatgacacaaacgttcatgttgctcaag

SEQ ID NO: 49441 - DNA, 856 bp, Homo sapiens
aaataaaaattccttaaattaattaaaaacccagcctatattaaaatttcctttgatggtcttaaaacatgtcatgtatagctggtttctttcaatcacaattcaaacaaggtccatatactacattctgcagcctgattttttccattgacagttaagaaggtcagagaagccacacctacatttaagtcattgtgcaggaatgcatgagaatagcttatttgctgaaaacatactttgggaacacggaatctgcaaacctgaacaggctctccaaccacagaaaatttaattcctacagaaccagcaaagcaattttgagctatgtatggcaacagcaaaataaacttcatttaaatgatttctttttaaaccatagatttagtatactttctctacctctaattgttggccacatggtcttattttgaagtatttagggcacctgctacttggactgttggagttttatatttatgcacacagaacagcctgctagggaagtattgatttttttttctacagcagttacaagacactgtgtttgcaaatgtggaacaaagagctcactttatatttagtaagaatgttagttcatctaaaaatagaaagaaaaacttaaccttgaagaaagataaaagccaacactggaacattctagtaaagactaacctttttctctgttcttgcaagtaggggtacagacgggtaaagttttgggggaaaatatatgccttcctctgccacggctcttgatagaacattttttagtccttcaacttagaaaatgaaaacgctgaggaataccatatttaagaaaaggtgtttacttatcactagttggcttttatgctct

SEQ ID NO: 49442 - DNA, 704 bp, Homo sapiens
atctgaattgtttctatttcactgcttctcctgcattctgtcaaatgttttctgattgcctaacagtgtaagatatgtccaataatctgctgtgggagaccagaatacggcaccccaaaatatacttctttggcataagaattgttgagctaaaggcaattaagaagtaggtgctgtaaagctctctgccttccctctaattgcctaaaggcaatgcatagatttacaaaaacaaaaagaatcttgcctctcttagaccatgtaagtactaacaggcctggccttgcttagtttctgagatcaaacaagatcaggcacattcagggtggcatggtcatgggcctgccccttcttctaccagggagaacaaaggttaaccacagatgacaattttaaacgttacaggcctggagatggcaccagaggtatccctaccaacactctttatcaactagcctttgtctgccagttatttgccttcctagaagttgcctccctagagacttcaagtcctgtttggtcttgtcatttctccaaaatgtactgttctttcttgaagacactatataagctggaattcaaagccacctctttgagaatttctcattccctatgtattaatatatctcatttatgtatgaaatatacatgttagtaaacttctgtttttctctttttaatttgtcttttgataaagaggacca

SEQ ID NO: 49443 - DNA, 532 bp, Homo sapiens
tcctcatcattgtcaaaataatattcaaaatgattctacttggcacaggtcaattccagcccagcacatgctgcccttgccctttacaggctgaccatctaagaggaatggaacataatgcaggaaagaaatcattaaaatgctttgtcttttgtgatacaaaggaaggaaaacttctctcttcaggccagattttggcttcatctttctgctaaaaggatctccaactcatgaacaggttgtggtttaaaaggtcacttatgagtcaactgcttacaacacagaacacacaaagctactcttctcaagttctgaggctagcccacagaatcctatttcatggcaaaaggaaactgttgtttttcacagcaaaaataagctgactgcaccagaattaaatataaaattttatatcagtgcttgtaaaatattgaacactggtctgaaaacatagcagtgtccatcagaaggcagtgatggagcaggcatcggtgttgtagacattctaaaggaattcttagacctctgaggt

SEQ ID NO: 49444 - DNA, 693 bp, Homo sapiens
agagacccagcctccacacacaccactttaaaatgcccagcttatttttgcagcctcttctataacgttctctccagcataatattcggtcctgtatcagctccaatcactcatcttcctcatacaactaagcatttatttttctgattttttcttcttaggtattcttttttccaatgtggattttgactcccattcccagtgctgacttcttaagaggtctgctagattattacctacaaattgccttacagtcagaagaagtcaaagtctaaattcttacaattactcccccttttgctctgatgactaagccaatttccaattttgaacaaataccaatttttaccggctctggccattgacacctagtcaaaaactatttctcaaggagataggggagccagtgaacagttcaacggagaaatagaggaacaaagtccaaagttctttcaaaatctagctcctgcatagttttccaatctcaccctttacaactccccactcaacagtcccactgaacctctcttatctatgcctttcccattgcttttccctccacttgacatgtgggcctcttactcctgtccccttaacaggtcttcttcaaaacaacgcaagcatcctcctcggtcacacgtgtccatgtgaagagaccagcaaacaggttttgtatgagcaataaagcttttg

SEQ ID NO: 49445 - DNA, 709 bp, Homo sapiens
agcagctgggcttgtacatccactccctcccaccatccccctttgatatgtctctgcatttatttcacactcctctccaatatcattattaaactcttaattctcctctcaacattcttattttacagctttacaaactaaggcccaaggaaagttgaaataatatatatcaaatataaagtcagtctgttttcaaagcaattgacagaacacaccaatatgattccagtttgtagttctggtttctaattcaccaaactccccggagttaaaaaagccaagtggaaaaccagttaaatgctaaattttcccttacccagtgtttattcattccaatcattctttcaaagaacaaacacataatatgattctgttctcttaaccattgaaaacctggagctaaaaaagcgctaattcttactgtccagccatcattcaggaaaggcaatgacaggccataactcttactaattatagtacaatatttggccacatgcaagaccttggggtgctgtttatatcctactcctcagatcaggttcaaggatttgaagttcaaggtaaggacaagcaaggtgccacaatcagacttcactggagtagatcatgctgcaagaccaaacacaaggcaaaggaaaaacagtcttgcctgtctcatttttgtgactcagtgcatacaaatatctttaaaagggtttttctgtaagaa

SEQ ID NO: 49446 - DNA, 2103 bp, Homo sapiens
accagcctggccaatgtggtgaaaccccgtctctactaaaaatacacaaattagccaggtgtggtggtgggcgcctgtaaacccagctactcagaaggccaaggcaggagaattgcttgaacctgggaggcagaggctgcagtgagccaagattatgccactgcacgtctccagcctgagtgacagaaggagattctgtctaaaaaaaaaaaaaacctttcctaaagaaagggaagaaatgtaatcactgacaagaatctgtgtccataagataaaaacaaagggctagcaaaggagaagcacaatgatacctaatactatgatcagaggaaacttttccttctatcttgaatccaactgtgctttgcaagccttgataggaaggcaggagagcagcaggtgggaaagggatacggcaggtgatgagaccaggtagacttcagctctacaaccccctttcaagaagagcagctcagcttatttttacataattagcccctctgtaagatgttatttggaaaaggggttatgtggctttattgtaaacaacaaactgacaatggttgatagagttaggtccacaagaagagccactgaggcacaggagaacatattaaaatttctctgtaaaaaataagtgtatgcttttaaatatgctaaatgtactatacaaaatagataacagatattaagtatataataatatatatgttaaaactactaaactatattaaaaatgtgtaagctctcctaatgtttattatatgaattctcatggctgcctttcctgcatcacagggtaatggaaccatgacgcattcagaaagaagaggggaattcctcccaagggaagtgttcacactcagttcttcactttcagcatattgtgaaagactggagtgcacctgggcccagctaagtggatttacaaacaagattatcttggtttaactgaactcatttacaaaatggacaaatggcttaaaaagatccctggaaagaaaacgtggattaaaacagcactaataatataagcatgtgcaaacaaaaactagtaaaatggacacttctgtggttttactttagtcagccatataagtaaaaactgaagatctaatcggatcttaaaaagagctgacaaaaacaaattttatatacaaggttgaaataatcaggaaaactttttaatatatagttttaatattttattaaacataactatatattgtatattagacatcagctattaaaatatcaaaataagctacttaggtgaaaattcttcaaactgtatactttaaaatggttgcaatttattgtatataaattataacaatgagacaaaagataataacttacttggaaacttaaaatccctgtatcacaaagaattaagctaaggttaaaaataatggagcatatttgctgggcaaggtagctcactcttgtaatcccagcagctcagaaggcagaggcaggaggatcacttgagcccaggagttcgagaccagcttgggcaacagaacaaggccccatctcttaaaaaaagaaaaagccaggcacagtggcttagtctggaatcccaacactttgggactttgggatgctgaggcaggtgaatcaactgagctcaggagtttgagaccagcctaagcaacacagcgaaaccccatctccaccaaaaatacaaaaaattagcgaggcatttggcaggtgcctgtagtcccagctgctctggaggttgaggtaggaggatcacctgagcacaagggttcaaggctgtagtggaccatgatggcaccactgcactccagcttgggtgacaaaacaagaccctgtcccaaaaaataaaaaaaaaaaaaatgaataagccttggaatatagcaagaccttatccttgcaaaaaaaatttaaaaactagctgggcttggtggtatgtgcctgtagtcctagttactcaggaagctgagttgggaagatcgcttgaacccaggagttcaaggctgcagtgagctatgatcacatcactgcactccaacctgggcaacagagcaagaccctgtctttataaaataaatatataaaaataataataatgaagca

SEQ ID NO: 49447 - DNA, 2010 bp, Homo sapiens
gagtaaacaaattaaatccaataaaataatgcacataactggttacagcaagcactggttatcattaataacatcatcttcattattttctacagcccccagagggcagacttaggaacaatgggtagaagttaaagaaaaacagattttggctgaataatgggtataaatcttactttcctatttcagattccatctcttcatttttaatgtaatatagctgaagttatttctgataggtcagcttttaaattcctatggttccttagttatctaaattaatttctattagaggaactaaagttagaaaaatttaaaaaaatacattattttcattcaaaaaagaatcagtattctaatttacctatcaggtaaatatggattattagattttcttaaaaggagggttgccagacaaaatataggatgccaagctaaatataaattttagattaaataatgaatgagtttttagtatatatatgtcataaacatttcatgggacctacttatactaaaaatctatttgttgtttacctgaaattaaattttaactgggtatcctataatttattcgctaactttagcaaccctatgtaaaaggataaatgttaacaaaactcaagtaatttaaaaaagtttttacataaacaaaattttgagcttcctttttcatgtaggatgatttcttgcattgatagagaaatgttacatatctgccagtttttgtttaaacaacatttcagaaattcttctttcctgacacgtcatttagtcatgtctcagatttcctgtgccagcttaagttgctcaagaagaggttatggttggctacgcacttgtgacaatgtgcagaaacatcacttcccatttggctaaaggcagacagaccttatggtagacttttgttttcacctctgttagatgtggatgacacagctccttcgttcaacgcatatttacacaatgggtatatccaaatacgtaagacaaccactgtcaaagaaaacatcttatgtcattttcctcaggctctacaaatacagccactgtcacctgaatgctgtgaactagcaactggatgcagacagcaagatattttgatgtttcaataatatttacacttatgtcactaaacacttgtgtagatttgtggggtatgaggaatgaaaatagacttaaataattgttccatctgctcaacaatataaaagaaattgttaaaagacatgaacaactgtcgaggtacatttctagagggtccgccaagtagcccacaggccacggataggaggctgacatctgagaagacaagaaggatgagccagcaacaaaaatactgagacaggaaggcgggtagtggtgcaaaaagcccatgaaaaaagaatcgaaacaggaagaaggaacccgcagtcagacaggaatgcgaatcctgtgggcaattcaaggaagtagtgaggtttggaggagacacacagaatgcaggcaagcatgactccgtttccacatgacagctacttctcagggctctaagacactatttcacatggaaacaagacaatccatgtgaagatatccctaacaccaccaactttttaggagaagctggttattacagtcacaaatcagggtggctttcatcccagactcagggtgaggacagagtccttgagggaagcctgacacgaaaagtgcagatgaacactcattatgtcccacagagcaggtcaaggagacaaaacaagaacatgaagaaccactctcaagtgggattcttctagaaagatcccaggaggaaagtcactatgtcttaaaggtcttgcaacttatttttatccctttcttattttacgtactttgtcagttatctcaaatgttttgtagacagaaaaataaacaaatcttggtagttccagtgcccgtcaatactccacacacagctgatgtttaataaatgctgattaaattaaataatttatttgtagctgttctcttgaaggggtcaaaaag

SEQ ID NO: 49448 - DNA, 995 bp, Homo sapiens
caaaaaatacatgaatatatagtacgttatctttgtacacctttgtgtacaaatttccacaataaataaggcagaaagggaaatccagaaaaactagctcaccacagttcatgcccatttaaatatagggaccataagtcgtgcaccagttaacgtctgtgtctgtctgttctctctttcttctctttattctttagaattatagtttctatattaaatagctaagtttgggaaaggttttgttttcttaacaggagagtcaatgaaacagaaaacgttttaaaatcagaaccgagagcaccaaaattcattaactcaataaatacttattaagtacctaccttctccttactgtcaaaactcaaagctgtggcaatacagcagtgtatgagacacaggttcctcctgttaaaacagtggttgccaaaaatctagcaaatgttggtttcccattaggatcagaagtaaggatgtggtaacagaggcaatttccaaaatcaactcgggcatgtaaaatgtcaataaaacccaactctgaagtcacatctaaccgattctgacagagttttacgctgagccaaggccatcctgcccaagcacactaaatgttgactctgaagcacatgtaggggaattaaacagtaaccaaggattggaagggaattttgtcacagtttacacagtcagtagcaccaggatagaaaagcaaaggcacctaggagaattggaaaattctgtcactaccagcacccccaccacccctgaaaaaacaaatcagaaaaagacaggattttaatgaataaccttgcatgctgaaccctgggtaagaaggaagaaaagacagaaaaactgagataaccctcaggagtctcagagttctatattttgtggtgcagacagggcagctcaccaggctagggctgtggtgagctatttccttttttaacattccaagatgccaatatagatgatgtccttctccaggtacccatttc

SEQ ID NO: 49449 - DNA, 583 bp, Homo sapiens
attggctcttgattcctcctcaggtacctttcagtagcctctcatctctcccaattgcccacacagaaaaattgcatattctattccagtttctacctcaattcttgtatccctgacctcagcactgtcttcaaggacgtgacaggctgttgttgtgaaacagctgactgtgtactcaggaaaccacagattttttcccgactagggtttttagaaggcaggagtggattactaataggaaagagaaattatactactgcatattcaataaaaacgagcatgcaaataaagaacaacaacaaattaggtcagaggctatggtgaaaggagccattattaggaaattcctgaggcaaagtggggtgttggccaagttctagcagtttaaaagccaaagagatctgttcgtgagttcccaaatacaaacgccagtattgaagaccaaggaagaaaatttgtagtgtgtaggaacaacagaagaactaggaccctggtaaaacagctgggatgaggaggagagggcaactctgcacaagatcaggggttctgacactaaggtcagtgggccagagaggactaaatt

SEQ ID NO: 49450 - DNA, 581 bp, Homo sapiens
ggacaacattcctccttttatggggttgtcatttcccccaagttactcaccctagcagcagaacagagactagatctcatgccaccaaactcaaaatgcaatcctctgtcacaccttttatagtgggataaaatgaagaagcaaatgcattaacatatccataatcttgggctttcagtaaagccattcccccagtgacaagtccttgggattcctgatccaaatgaacagggccttgaacacatctagacacggagccacttttaactctgcctggaaaggtcaggggaggcttcccgcattcagggaaatttgagccgagtttgaatgttgggtaagaggtcacctggcaaacctggaaggaaagagcaatccaggaagctgcaggcctggacagcatcccagtcttggagcactacaggatgaggacgggggctgtgtgacagtacaggtacccgttggggagagccaatatgagcctggaatgaagtgggtaccaggtccaaaaagtccctggtgccatctgacaggtggtaactctcaaagctcaaagatagacacccactatgctcaccaatgac

SEQ ID NO: 49451 - DNA, 789 bp, Homo sapiens
ggcatcaagagagcagagctctggaggagtggtttcctgaataacaaacactctgccattcatttgcctggagtggaagtgttgtctctgcctgccagcactcctcccctgcagagcctcccctcctccactctgcagggcctgggctgggctgtcactcttggtaccccagcccccttgcctcagaggaaacacatgactcagactggaccaagctctcatcatccccctggatacagtggtacaaccagaagtaggaatgtgacccaagcaggacctgtgccctttcacttagttttgtgtatagatgttgggaggaagagagtgtctgtctgtctctttctttctctctctctctctctctctctctcccccctctccctgccacccacacaccccactcccctctctctttttctatccaaaatcctaaccatgtaaacttggagcaaaagcaacggagtcctaagaaactccatataacctctgcccctggactactttgaggagggtttttatcactttcaactaaaagaatactggttcacacaatgtacaaagttcatctggctaaactttacctgatgttataggaaacctcaaaatgaacagcatgcttctctaccttgaaaaaagaagccatagtaaacacgattttatcttttttatctagtcacttacttaaaccctaacatataatgttctcaagcactattgaattatccaaggacacttgactttccagtaaataggcagacacttctttgtaacagatttctttgttcatta

SEQ ID NO: 49452 - DNA, 935 bp, Homo sapiens
aaaatgtctttaacccttctgcttgggctgccatataaagtaccacaggctcggtgttctaaagcatggaagtcccaaatcaaggtttggcaggactagttcctggtgaggactctcttcctggcttgcagactgccaccttcttgctgcaccctcacatggccctttctcatgctacctatgaagagagcatgtgagctctccaggatctcttcttataaagacacaaatcctgtcagatcagggccccacccttatgacctcatttaatcttagtaacctccttactccatatatatccatattgggagttagggcttcaacatatgaattttgaaggaatacaaacattcagtttatagcacccataaataagcaattattcctattattctgtaattgctaaataaaacctcttcaaattgttgactctctatgttgaaaggtctgtcctgcacaaattatccctgggtccatagtccaacaggacagagtttatagaacaaaggaaaagtgagcagtgacaccaacatcagtcttctaagcaaacatttcatggagagagcagaatttttaccttaggtgaattcatctgaagctgtttcaacaaattaaaagagcaattagagctccctttcaaaggcttagaccccacagctatatgaaaacacatcttcactgtggatactggaaaatgaacacagcagtgacatcacaggcagtcaaactcatataacaaggaaagctactttaaaattttgaaacacagtactttctgcacataaatgacaaactaaattcaggctgtccagactcaacttctaccagtccaacctctaatcctgaaaggaaacctcacaaaggaaataatgtttggcttatagaagaacttacataatgattttctgattataaaagaaatgtatgctaattta

SEQ ID NO: 49453 - DNA, 1713 bp, Homo sapiens
cttttgtcatttaacactagatacctggaatatatttttgaaatagtgttgtttatgaaaatatttcatttcatgattgtctgatgctccaacgtgctcataaccaaaactgatttaacgactacatggtcatgtaagttgtttcacagacaacacggcaagggacaactctgtgcataaagtgttttgttgctattgatttattttgtcacataaactttaaggggtgggattactgattcaaacttctgctaaccactgtcatactaggtaacatggcgtaatggctaagagaacagtttctatgcaagacaatttaggttccaatcctagctccaccatttacagtatgaccttaaataagttacttaatccctgtatgactcaatttcctgtgaaatatgagtgataactgaatcctccttcatgaggtatcatgaagattaaatgacaatataagacaagctcttagaactgtgcttgacatgtagcaagtgctccacaaatgctattttatattgcagtttccaataaaagttatataaaagtttccaaaaggatcatgattaccatacattcctcagggtactgcatatcagttttactgcagttacgttaccaaaggcattccacttttttgatgatttttatttacttagtagttacccaatgtcatcttggcacaattttttttaaatgccagagagtccaagagttgttcctgaagtaagtttaagttgcttaaatgaagctaggcttggggaactttaattccttatttttttgtcttatatactctagccaaataagcatatagttcacttttttaataaaacaagttatacaagttgccttgtctttctaataatgatcagcaacataaaaaaaggtacaaaagaatagtgagtggtaaacctacaactggcaaagtacctcagtaaaccattatctttactcttctgttatagtgaccagagagtgttgtcaaaggacatgatacagaagagtctaatattggtcattatgtaatccttgtcaaaaaggtcctggtaggaagacatacaagtactaaaagagaaaacttacgcaatgcatgtgatggctttaaatatttgttccatctttaataagaaatactacagaagacagactttgacttagactgaaggaaaaaaggataattaaattctttgttaaaataaacccacatatctgactatcaaagacaataaccaccaccaccatcaactccttgccaatgtcatgaaaggaacttcacagaaacccagtaagatgtgagttgcagtccttctggtatcacaaatgtagcatttaaagcagtgtttttcaaactgtgggtcaggacccattaacaagtcaatttagtgacaagtattttttttaacaaaaaagaatagaacattacatagagtataagcaagtgctgttttaattatatgtgtgtggggtggtactgggggatatttatatatatactaggtcaggaaattaactatatttcttatgggtaatagtcaaacaagattaaaagctactaatctagagtaagtcacttaaactctatgaaactgttttctcatctcttaaatagaaattaccattcaacttcaaagggtagactcagataaaataatttcactttttaagtaaaacattgtattactgtgttacggttacagccttttagaaggg

SEQ ID NO: 49454 - DNA, 4064 bp, Homo sapiens
cctccatggtgaaaaataaagtccacacataagtatcctagcaaaaatttcactacacacacacacacacacacacacacacacacacacacacgcctaacagatggattctaaaaaacagctaagcattccacaatccaaatgctcaaaaattaataataaaggttaattaacattctggcacatgtgatattgagaacaacagcagtaatttggggcaaaagaccctctctctgctctcgtccttcatctcattcaacctctttttctcaattgtgagcacacccttctgcctcccctactctgcaatcaaatcacaaccacccaaaaccgaggtgtctgctgcagcccaaaacatttgactgataatatccggtttgccattccaggaaatcccagagtggtttttaagcctctgcccaccgcttgtaaagaaaggcaagagaggaactaatcgataccagcaccccagctgtgacctggcacatgaagaaatcaagaaaataaatcccatccataatctgtataatttaacacttggaagaaagcaacatctgggatcgactccaagcaggacagttttgcctggatggatctgagcttcctgcactgagtgttaaagccgcttaggaggcgatgccctcgggtccctcaccagtccagcaaagggactatctttttccctagcaagggttaatctacctcccaaaaaagagaagagtgaggagaacgaaaataacaactactaacatctactccttgccagtaaagaggctggcaaagactcctctgacactttgaaggagggaaagctggaaacctttcccaaaggtgggttcaggtcaaactattgtcttggtaattagtcacaatccagaatggaagctaacgtgaaatgtgggaatgattttgttgaatcctacagtcctttcaatggaccccaaagtcctatccccaggcaaagttgggaaaaaaaaaaacaaaaatcccctcggactacgactccctgggaaggctttccagatgttttaaattgcaggaaaatgaatttagaacataagcagatatctacacatcacctaaatcactagacctgtcctcaattttaaaacacacacacacacacacacacacacaaagtacaccagtcggcagaacagggcattataggaaataaagagtgttagtaaaatccataatgctttctgttagaccttctgggaggttataattgcatttggccggctgcagccttgtcggagagcctggcttcttaatagtctcaaccctaaaaggagtaactgtcaaggggcgacccagctgaaatcaaacaacaaaaacgggaactgtaacccgcctgaaatgggaggaggaaaaggaagggagactcctgtattcatcagtcaacattaatgtcctttgttgttcacctttacacagaacagcgagagctatcctgttcctttttctccgaacgccagtgtcagggtatgctttcctaaaagctatctccctgcccccaagaaccaggctttccgatccccctccccatttatcactcagcagccctgtaccgccacaccgcccccactgcgctcacccggggtcgagagggtggccagaagtaaaaacactgctgaaatacccgttcttctccaaagaccaaagaaccgagcggcgcagatgttgaaatttaccaatgcccccgccccgcaacatacacaccccataaatccgggatcgcagagagggaggagggtcagagagggctcagcttgtcagagcggctctctccaggaccctgccacattccacactccgggaatgtcgatccgagccagagggaagggtttgcgcctccctactgttttgggggtgttctctctgcccgagtgttgttgtctccctctccacccagaggaaccgttgcagctccctgtcgctttggggaagaagggtaaggaaggagagaaaccccattcgcctcctcttccaacttgacacacacacacacacacacacacacgcccagtcgccactccaaactccgcaggcagagcccgaagctagcgggccggccgcgcgctcccccaagctgtcccggcgcttcgggaaccagtgcggggcgcgccgagcaggcggtgcggggcgagagcctggtgcgcagccctctgcctggagctggctcggcaaagccccgtaccagctgcgcgatgccaggattaggcattttcaaccgggcggagcgagaggggcgcgggggcaaggacgagaaatgcgcactcgctcgggccagagcagaataaaagttcgccccgcggagactcacccacgccgtatttctcgtgctccgtaggtatccacatggctaaaggggctccggggtcttcaggctttgtaatccccgcgccccttctccggctcacaacaatgcacagtccccgagcagcgctgcagtgccggagcccagcggcttcgcgcgggctgcgggcgctgggcaggatctgcgctggaggctcccgagcccagcgttgacactgcgccgcccgcagctctcccggcggcggctgctcacagtcctccgacgcgctcccgggtacccggcggcgcagtcattgttctgattcactgaactaagcgaacacgccggggcactctccggcgcacccccgcccgccagcgcctagtccagccctcccgtcccagggccccgcagcacgctgggaattgtagttcttggcctccccatcccggaagtgggcgcggcaaatgtggttcggggcggggattcagttttactgattgcgtcctattggtccagagcgcggcgtaggtgtggagaaaacattacgtcgacggggagttcgcctccagtagcgtttctactggtgccaccccgcctccgacccgccctgcggccctcccttttcttttctgccgggtaatggctgcttccaagacccagggggctgtcgcccgaatgcaggaagaccgtgatgggagctgcagcacagtcgggggtgtaggttatgggggtgagtacggtgccccggaggcgcggctgatgtgtcttcctttctctatgaccgggtgtgcaacggacctctggtctgaccctaggagcccttcagctctggggccacctgggttcgactgggccccacgggtggtggcccagcgggatgggttggagccggtggcggctacttggttggggctgcccggggatggcggagaaaatgccatgggatggcggagaaaatgccatggaatggccttcccctccgccggggaagctccctgagcgtttgtcttctggtttggagctcccagctttgagctagctgctgagtgggtttggttcagatctggttcgcgcgcgtgtgtttataattttgggattagcagctctttctcctcaccagtacactgccttggtttgcttggtttgacctcgcaggtgtgttttatttagcttccggagtatttccagtcgcagactggtggtcactgctctccactctacagatttgcccagtttgtggctgaggtgacctctgaagggaaagtgtgtgtatctcacaacctccctgtagatggttaactgctctgggtgttcttcagatttgtatgtggagcctgagagatcttcccagtctctgggtccttagagaaagaaaaggaaagtgatagataatttgcactcgtggcttcaaagaacatttgaaaagagttttgaaaaccatcacaactttggctgtacctgactttcaggttgtcctctgatccactgtaggaataaaaaaccaaattttgaaagctgcaggtggattgtgtttaggactcttttacctttagtctatccctcccccattccccccaccccatttttgtcttgatgtgtaatttagcacaagttgtctttttctgatgaacatggtttggggcttaaatatagttctcagactgttgcgactttgtttttcgatttatttgtttttgctttcacagttaaattgatatcatcttaagtatttacctcagcggcacagagttgaagtgca

SEQ ID NO: 49455 - DNA, 922 bp, Homo sapiens
atattttgaacctgttccctctattcatagctacagccactgtgctaattccattactaaccctcaccattactgctgaattacctacctgcatctcccatgccccagaaagtgctcttgagaaccagttgtatgtgtgtttgtcagcctgattctgttcttggcacattgttaatgtttaataagtgtttgaccagaatggaattctagcctgaacgattgcaaaaccttcctgttgatctcactgactcttgactttacctcctttaatccacattgtaaaacaaatatattcatggatctccacttgaaatcttcagtgtaattctgctacatgtataattaggtccaaactctctgtgtggcatttaagattctaatctacttgtctagcctcatcttcagtcaccctgcttcctttcccatatctccattatccacttaccatgtcacactgtagttattttttggcaactttgtctaccccagtggacagtgaacttcttgaggtcaagagttgccttatttcacttttgtacatccagtgtttatcaaagctgcatacagtaaacattgtataacagtctaatgttagaatatgcttgaaatttattcaaggcatttagagtggctactattttgagcagaggaactgaagtagaataaaaaactgaatagatgttttatgcttgtgaaaggtatgcataccaactaaaatgcaaaatatcaggaggatgatattctgtcaaggtgatcatagttagcatttaaggatagtatttcagttttttaaaataaagttttaatgttgtttaaataataattacattttttaaaagaatactttagatctggcctttataactttaagcctgtaactgaatgacctaccacatggaccttgaattctgtctttcatcat

SEQ ID NO: 49456 - DNA, 568 bp, Homo sapiens
tgatagaggctcgaagatgagattcggggccatttcaggatctgctgttggactgagggttgcaagctggcccaggggactcagaatggtgtgtctccctctgtgtctttgttccaggaacactgatctaggactgtagctgagaaggcctggagccaagttaaaggatccttttagggtccacagcagagactgaggtcaacaggtctgtctccctaggcactagtatgtgtgacttttcccagtctccatggtggatagttttggaagaggcccaaatccaaatggggctgtagccaagtccacagggagacagggtcatttccaagtccggagccaagatcacagttcatgagtctgccacctggtcgtaggtttgccctctcaaaatgacccttctaggtttttagactccactggggttttagaaactcctgcctaaatcccaaggctcccacaaaggcgcttttgtccagggatggctgcaaaattttttgagagaagcagggatataagcagaggacctcctattccactgtcttgccgacccagaattctctggttagaa

SEQ ID NO: 49457 - DNA, 1109 bp, Homo sapiens
ttttgtgttagcgcagttgtgtatcaaatgttttttgcagtgtctaagtcaaaaatatggtggtgcacgtcctatcccattgacctcacttcactatgctgaagttttatctatggtcagtggagtactttgtactcttcagagtgatggccagtaattccaaaagcctaaggttttctgaatgatctactctcattatctctgcatattttgaaaaagtttatatttattatcttctgacctatctaaccctaattcatatattctctctgcctaaaatcatctcttccctgcctgcctacctcaccaactcctgctcattccttaagatttcatttagatttcaccttcaacttttctgtgaaatgttcttgctgactactttcctccacccaaaaggtaaacttctatccagaattttcttgttttatcttgttaatgcttcgttttcattatcagtttctgatttcagctcagaaatagggatttcacaatcctatcgggattgtgattgtgatgcactttgctcttgtattttacattcagatgcccagtaaatgtcagtgttacttctttggcacttggatgagattagacatgtgcctgctatgtgtccagtgcagaagctaagtcacctctggttccgtcttattcttctgtgcctgttaaccattgcaagatactgtccttgcagggccagtgctacattggctttcctccacagtcctacctacactgttagcaagtcatattttttggagcatcattccatgcttgatctcattttatcatctcaactacttttagcatataagtgaattagaaagcaaaagccagaggtcatacaactagtttctaccagcagcactgtcatgggaactcctagatctatttactcttagcatgtcatcattatgcaatgatattactcccttaccagcaatattggcagtgctcttttttcaaagcagaggcacttaaaatggttagaatagttggttttggttttcaaattgactacagggttattatattttgttgaacagttttctgcacagaatattctgagacttcacctctaaatattaaatcacaggttccaatattct

SEQ ID NO: 49458 - DNA, 1708 bp, Homo sapiens
ccatctctcagcagtggcagcttagcgcagagagtgcttaggggagggagagcgcagtaattgtggggcattgcattggagctctgtgctgccctgtcacagtggaaagcaacacagggcagaattcagccagcacccatggaaggaacatttagaccagccctatagctagggggaaccatccattccagcctttggaacctgagttccagctagccccaccagcaaggctacagtgctttgaggtcctaaagaaatcagaaaggcagtctaggccacaagtagtgtgattcctggacaaatccttgtgctgtgctgggcttggagccagtggacttgaggtacatgtgacccactgagacaccacctgtggtggccagggaggtgttcgcgtcaccccaccccaaccctatgcatcacagtttgcagctcccgcagagactccatccttggtctgaggagagaagaatgggagagtgaagaagactttgttttgcaatttggatacagctcagccacagtaaaataaagcaccatgctgagtcctaaagcccccattccaggccctggctcctggatgatattttttacttaattttttttttatttcaatagatttttagagagcgggtggtgttaggttacatgaataagttatttagtggtggtttctgagattttggcgcgtaccgccctgaacgtgcccgacctcatccggatgacatttttagacacatcctggaccagaagggtacccactgcctgaaggaaacaacccagtctaagcaggattcatcacctaatgactaaagaaccctggagccttgaataaacatcagcaatagccaggcactactcaccaatgaaccttggatgagacccagtactgtgctggcatcaggtgtgacccagcacattcccagctatggtgtccacagagaaagactccttcttgaggaaaggagagggaagagtaaaaagactttctcttgcaacttgggtaccagctcagccacaggaaaagaaagcaccagtagattcctaaagtttccagttctaagccctagctcctggacagtatttctagacccacccttggccagaagaaaaccccctcgccctgaagggaaggacacacgtctagctggatttattactgctgactaaggagccctagggctcagtggtagccaggcaatagttgccacaggcctctggtgagacccagtactgctccggcttcaggtctgactcagcacagtcccagtggtggtgaccacaggagtgtttgtgacccctttccccccaattccagacagctcagcatggagagagagattctgtttgtttgaggaaaggtaaggaaagagaacaagagactctgcctgttaatccagagaattctggattaggcaaacaaaagccaagagatttttgtcaacaccagacctgtcctacaagacatgctaaagggagttattcagtctgaaagaaaaggatgttaatgaactataagaaatcatctgaagatgcaaaactcattggtaatagtaagtacacagacaagtacagaatagtataaaaccataatcatggtatgtaaactactcatattttgagtattttgagtagagggactaaaagatgaaccaatcaaaaataagtactacaaccacttttaagacatagacagacagtataataagat

SEQ ID NO: 49459 - DNA, 1094 bp, Homo sapiens
cgggcacgcgcccgccttagagccaccgggcatgcgcccgcctcagaaacaccgggcacgcgtccgcctctgaaacactgggcccgcggctgcctcagaaacaccgggcacgcgcccgccttagagccaccgggcatgcgtccgcctctgaaacaccgggcacgcgtccgcctctgaaacaccgggcccgcggctgcctcagaaacaccgggcacgcgcccgccttagagccaccgggcacgcgcccgcctcagaaacaccgggcatgcgtccgcctctgaaacaccgggcccgcggctgcctcagaaacaccgggcacgcgcccgccttagagccaccgggcatgcgcccgcctcagaaacaccgggcacgcgtctaccttagaaccaccaggcacgcggctgcctcagcaccaccagccatgcttctacctcagaacctttgcatttgctgttccctcttcctggaacactattctatgtccacatggctttcttcctcatttccttcagggatttgctcaaatattctgtttttagtgaggcttcccctgaatatcttttaaaaaataaaaatcactctccctcaggccttcctgatcctctcttccaatcttatttttcttcattgaaatttttttttttgagacagagtttctctctgtcgccaaggctggagagcagtggcacaatcacagctcactgcagactcaaccttctgggctcaagtgatccttctctcaacctcccaagtagctgggtccacagacacgtgccatcatgcccggttatcttttatttttatttttttgaatagacgatgtatcaccatgttgcccaggcttctcacaaactccccccgagtgatccgcccgccttggccttccaaaatgctggggttacatgtgtgagccaccgtgcccggctcctccgtcccttaccctttcacatgctgtgtagttgtttacctgttatctgtctccactcactaacttacaagctccataagagcagggatttttgtcagttttgttggctgctttagaatagtgcctggcacaggccgcgcgcggtggctcacgcctgtaatcccag

SEQ ID NO: 49460 - DNA, 3439 bp, Homo sapiens
gagtgctattttaaaactaattgctttgcgggtggggagggggtggtgcatcaaagggaaaaaagactatgaatttgagttttggaatttaacatatgggaggataataaatagtacagtgaacaaagggaagacaggaagaaggaaatatagtattcgtttcagagatgttgggttgaggcacaagtggaacattctggtggaaatttgctacaggcaattgaaaatagaatagagctcagctgagaggtggagtggcggatgactcacctacattgaggtgagtcagggactttgatctgtcataagcatagtatatgaacctaataacaggctctaaatactagacaaatgtcctaacaaggaagacagagatctaggagtgccttgagaaaaaaggcagcactgcgattattgatctgtataacttgtgtttgttttaccagctgtgaaattctcagaactggcaggtagtattgtcaagggacacattcttgtatagaaacccacaacgctgaatcgtcatatattcctagtctagaatctgagatatacacgaactccacaactaagtagacgaaagcatccctttttttggggggggggggggatggggggcacataaccctgaaccacggtccaattacaggtacagtactgatgatggcttaagtagttcatggaactagttaaaactaaaaccatggaaatgttacccaggagaggtaaggctgcgtgcctggcaggtgccgcagggaagtaggggaaaggttaaggagaacaccagcctccggagaaagagaagcaaaggtgattgcatagctgccagctggaagccgactctcgtcatagggcatactcgccccactgtgcatcgccggtgcctacctcacccagttccaaggcgggggcgcgccgaggcaggggtggggtcaccaggagaaaagcaagtgggcagaaaagcccgttgggaagagacggctgggaggaggccccggccccagccttactacgtttcccagaattcagtgaggccacgaagacaggctccctgggcgcggacggaagactggccgcatgggatttgtaggtaggatccgcgccccgcccgacggaggcgtccagtggggaggtgtgcagggattggttgggaagcgctcaagccccgcccacagagtgacgtcaggtggcggtattgctacttaaggcgtcgtggcctcccctgccccgccttagctcccgcgctagagagaaacatgtatcgttttcgatcacagctcttcacggggatttctgctgccgccaccgcccactcttacccccgccgcttctcgactctgttgttagccgaagactcgcctctcagccgcccgccgcacagacgcacgagtaaaaagtgcagctccatcggctgatcctcgctaagctccgactctgggcggcaccgggcgtcccacgatgccgaagaacaagaagcggaacactccccaccgcggtagcagtgctggcggcggcgggtcaggagcagccgcagcgacggcggcgacagcaggtaaggggtatccccgccgccggcatcccagttgccggccaggctggcgagtcttccatgcttcggcacggtgggagttgtagttctttctctgatgtacacatttgcatttccagggtgcgtggtttggctactgaactacaattcccagcgtgccctgggcgctgctcctcgcgcgatttagatctggcgtgcgaaccggactcttgggcaccggccgtgggggcagggaggaacgggtccttgggcctgagagtgtgtcgggacaggggctgaccgggagctgggcgggaaaggaaccattgtcagagttcctttctcggcggcgatctcgcccgatctctccccgaccacgggtggggaagaacggggagttgagcccgtgccgtcactggccgcctttgacaccctggctccaacatggagctcctgggatgccagacgtccggcgggtttggacgggctcttgcgtcacgcggcctgggccttgcgcggtgggcccggggtgacgcagaggcgctggggaagctttccgtctcgcaggtccacctggccaggcgaaggcgtcggaggcggggggaccactttctcccccctaggctgtgctccttcccctaactggcacctgcagaagccctgaacctctagcacctctgcgaccacccgaggcgacctcctgctcacggggggaagaaacgcgttctcctttgtgctgcattctatatgttctctgcagtgagccccagagaggcagggtggtgaggagcttaggttgcagttggctaaaagttgaggttattgtgccctcgctacgaagttgaaacttttcctgggtgggatgagtaggtgcttaactgaacttatggttttctacttattatatggttaagaaaaaggattccaattggaattggaaggcccttctaggagagaccccaataaactcaaatcgagtattaaataacctgggtaatattttatttagaaatttaaacaggagttaaatattggagtattctccgacgttatcacactggaactattagccatcaggtatttttggacacagttgcccctctgccacggctgccactcagaatgatatgcctttgttcacaagaaaagtaaatatggggttatgttgttaaaggttattggaaactggcatttaaaaaagctcaaaaactcgtgatcatgtattaaacatttaataattgaccatagggagggattcttaaaacagcaattttttacattttttaggtgcctctttattttgaatgctctccatgttgatgaaattcattctttatcaagatgtaaaatatgtaatttattgtggcctctggttgctctatgtgaattgaggatactttttttttttttgttaagggaaagagggagtctggctctgtcgcccaggctggagtgcggtgtggtgtgatcatagctcactgcaacctcttaactcctgggctcaagcagctctccctcctcagcctcctgtagctaggactacaggcatgtgacaccattcctggctattttttacattttttgtggagacaaggtctatgttggccaggctggtcacgagtccctcgtccccagggatcttcctgcctaagcctcccacaatgctgggacggtgcctggtctgaggatatttcttaccactgtgtttcagcttttcctcatctgaatcaaacatttgaattctttctagaaggtatttattttattctattacccttttgttgatgaaatggaaaagtttgaaagctaaagtttgaaagttataatgatgttagtaatggcctagatcacgcacaaacctttaatcccgtctaaagtttctgggcaagcctccttccctctttgtgctta

SEQ ID NO: 49461 - DNA, 1064 bp, Homo sapiens
tgtgtattttttttctttccctcgaatcttagaaatcattaatactgatgagttaagggagcagagtaagagctgcataggaggaatactcttagaaataggctatgaaaaagaaaaactgtgaattgacttgtgaataaatgttaataaaattaatcagatgacactcatctgttgccattacttcagtcataaaaacgaggaagatagatccagaaatagagtgtgatgtcataggtctttgtttattcctgtcctaagcactccaagaaattttgagattttggcttcattgcttaatctttatgctttactactttggcaccacgcaagcaaatctgaaggccacttgcttgctgtgttaatttaaaaatctgctaaattctctgttttgattttaaaaaagacaactccgttaaaaaaaaaaatccagcccaacagtaacaggcttaaatttggagcattaaaaaaaaaccgttaaggtggtgacgtttgaacatacgaactttgattttactgaaagggaattaggttcagaggttaatcaggtgactcacggtcacttttggggcagaatttgggacttaatttaactcagtgctgaattgtagtttatgacttggcagtccttttattaatacaaaatccctaagtgactgtatatttattcctgaagttaatgaagtttaaagaaagattctagtttttaaaaagaagattttatttttttagtaacagcattggtacttttttttttttgagacagaattttactcttgtccacaggcaggcagtgcaatggtgctatctcggctcactgcagtctgtgccacctgggttcaagtgattctgtgcctcagcctcccaattagctgggattacaagcgcctgccaccagggccagctaatttttgtatttttagtagagactgggtttcgccatgttggccaggctggtctccaactcctgacctcaggtgatctgccggcctcagcctcccaaagtgctgggattataagtgtgagccaccgcacccggccagcattggtacttttaaactctt

SEQ ID NO: 49462 - DNA, 493 bp, Homo sapiens
catatgcccaatcaatgaagtgaagaaaaagcttgagatgtatgtatttttagtttcatattttataaaagcaacatttagtggacataattggttgtattcacatagtaatgactaactattttttaggcatttccataagcttccaagcctcctctcttgtgatgatgtaaacatgagaatagctgctggtgaatctttggcacttctctttgaattggccagaggaatagagagtgtaagtatctaactggcagaggaaaaagcttgtgtcacaaggcccattgttccatcattaccttgcaattgagaattgggcaataactttggaacatggccagcttgagaacccagtgatttatttccctacttcttggcagtggtggtgtaatactttagagagcagaaaccagtaggggttggtacagcagtgtttgactgtggttcattatacttaatttttgctatctatagaactgaagtttagggatcc

SEQ ID NO: 49463 - DNA, 1565 bp, Homo sapiens
acataccatcacttatttcatgtctgcatttcccactagatcaaaaggtctctgagggtttgtcttcaatactgtacacccagtgactagcaaaaatccggcatcaagaaggtattcaataaatacttgttgaaaaataaagactaataaagaaataactacatttaacaacaatagtcaccattggacacttactaatgcctaaagagaatacagaacttagctatatcccacaactaataactagtagaactaagggagagtccatgaatgtttggtttctatttcagctttccaccagtctttacttaattcacccaaattcttccaaaccaattctctctccatgtcctacctctagggaatggcttgaggcataccgtatcacttgcattatctttcactcagaaactctgtcccatctagaagtgtcaaggctgaaagaactacactgaaaaaacagggaatttcagtgcttcagttctgaattactgataactctttgagccatctcatacgaggaaaatgtcatctagaatatcaaactcctcagcactagagcagcaacagcaatttctctccctttcggcctccttctagcgagatgtgggaggtccgacaaggagcttggctgttctccaccatcctctgcctcggagaacgcgaccacaacgtggcgcccagttgagggggaacccttgcgaaatacggagaggcgctcccacaccctccaatctccaaccaccactgtcaactcctccagaggcaggtatcctaccccggccctgggaggccgactgggcggagcttggggtccggaccacgcggagccctggcagtgtctatgcctagatctcgccgccctgccgtccacccatttctccctacctgactcggccgtcgccaccaacgcgctctcccaaccctcggagtcagttccaaaaccaaaccaaaaaggaggagagcagacaaggcttcagcctgcgactgagaacagggaggcggcacgccttggggaacgagggcccgaggccatacgcgctaatacaggccagtgtcggcgtaaactttctccgttaccggcccggccgcgaccgccatgtttccgccgccgaaatccgcgacggtacggaacgccgccggggtcaaactgcgcggcgcgcctccttcccgaggcccggccccctccccgcccaaacccgcgcgccgccacacactcaggtgagcaaggcgctgcgcgagtgtcaactgccccacctaaggcgcctgccttcctcaagccaaagtcgactcctgggacctggaatcagcagctgagaacagacagcgggaagaccaccaaagatcaggctgacagtgcccatcaagcatctaggccaccgcctcgggctggaccgaacggggacagggtggacaggactgccacgcgtgggctgtaaatactgcgggaggcgttgctgctcattaatatatatggcataatatatggctttgtaaccagctaaggcccaagctccttaggccctccctcagacctttcagttcctcaaatgcagggacatgtc

SEQ ID NO: 49464 - DNA, 1717 bp, Homo sapiens
gacaactcaggtttcttttcgtcttttacaaatggattttacctgtcttgttttacctcggcgtctcttgcaaaaagcgacccccacctcctctgtgagcgtgtatgtgtttgtgtgtgccgagacaacaacctcagcaccccggctggggacaggggcttggagggggtggggactcaattcctttacaggcctagaactctcccgaagggccctcaaagaaaagggggcggggaggagcgcgtctgatgccgactagggggctcagaccaggcccgggagagcagcagcggctggggggacgtgcagatcctttacattttaatggtggcctctttggaggagggaagaggtgacaagcggttgggggtgatgaggcctccccttcctccctcactcagcgcgctgtttaccttctcggtacttcttgcggagccgccggtggacgctcttcaccacaccggagagcttctcctgctccagtttccgctcctgctcccggggcggcggagtgttcggggacccggccctctgcgcacgagcagtatttcggccgccggcccctggctccatatcgcagccgccgccgccgccgccgcccctcaggcccccgcagacgctccccagatggaggaggtggggtaggaggagggagctgcggaggcagcagccagaggaggcagaggaaccggagcgacagccttggaggtggaccctcacccaaaagtgcaaactgattggtggattttgagggctgggcggaaacggaaaaggctaagggccaatgggcagaaagcgccggcggcgaacccggttgtttgggaaggcgagcagctggaggaggcggagcttgcggggatagggaggctgaggcagtgggagctccaggcctgggtgctcatctcttccccaccctccccggattctgtgcgcaggcgctgtggctcggcctcgggagacgagctgtgagcaacgcgcttgcgcgtctcagtttgcttagtttgggcttttttacagctcggctttctgatgtcttccatcattttcatcccctacactttataatctgttgcgatgcggccagggtgctctgcttgaacctccgctgcaccttgtcacatgtaggttccctttagttacttgcgctttgagatgacgttacacttcagggacctcaagcacacaagcattctaaggctcaaggagaggtctggctaccaaatgctaatttaattctcaggtcgacaatggtttatgcctgcagtactactgctgggcaaaggacatagaaaatgcgaaaaggagagggccaagaaaagcaacaggagatgcaggaggacaataaggaacgatggaaaactcacagcagatgccctcaagaacttttgtagtgaccacggtgttaataagcagccttccctgatcttattcgcatcagcactctgagcttttatggtcagctcaggtgacctcctgtcctttaatttggagagttagtctatgcggagtgtatctaagtgggtttggtaacctgttcaccctcctccacttcttttccatctcttggggaacgcgattgttgacttctgtcccagaaaggtggaacactgctctctggagagaggtagactgcattggctcctgaagtggtactgaggctgctggagtgtcagagattgaatagactgagagcccctaatgagttgtgttggattgt

SEQ ID NO: 49465 - DNA, 947 bp, Homo sapiens
agaaggatttaaaaattaattattattactattattattttaaagaggcagctagagtcagtgcagagcgtggaggccatatggacggtagggggataggtaatgagttgagaaaagtctgtccaacagggaactagacttaaaagttggtcagttcacccacacaagaaaaggtaaaaagaaacagaacagagataatttcatttcaggacttgatattaagatttgaaaaagaattcgtactttggcccggcaaggtccaaatttgctcctgttttacaaatacactggtgcaacctaagtatcctttggagacgagttcgtacattaccttctaggaagcagccattacaggaatggcgaggagggcggagtctccaaactacatttcccacaatccctgccgccgccgactcctatgatgccccggcgcgttccccctataagtagcagagggcgtgacggtcacgctctagcggaggcgaagagtcgcgaacgcgcgggacttcctttccctgcccaacgttttactattaaatagatggtttcgtgtgtttatataaaagctcacttcaaaataaaagaaatgatagcaagtgttttctaccctgttgagtctgtaaggcgcacatgtaattttgtctttttcttcgactgaaatgacacagcggggagagagaacccaagtacagccctctgttccgggtgcttttaaaccagtggcttccaacgtttctgaagcaggaaatctctgtcaccatcttcctaatgaaacatatgccatttattaattttttagtcaatggggaaaaagcgcggttaataagacatatcgtaaaaggttaaaaaacatttgtagtgcaaaataaagtttaggaaaaatgggtttagccctgttgcagaagatctctcaggattcaggtcctaaagtgacaatctattcagga

SEQ ID NO: 49466 - DNA, 6751 bp, Homo sapiens
agtgtattgttcactggaggatatgggtagcccctgttgttgagtctccatggttcctgccagcagcctaggagaagctaggggcagggcagcggaaatctgcaggcccatagctgattccaaagggctttatgtgaaggctggcagatgtggagaatttttttaatcttctgaagatgagagaacccgggtagaagtgtgggtttatgaacaaatatttattgcttcagggtccaggtaaattcagggtatatgctataaaaacacaaatgaaaaatatagtctgtgacttttttaaaaaaagttgggagagctcattaggatttattataggtcccaaattttgtagtccctaagcttaacgacagatggtggtgtaactccaccaatttcacaatatctccattcagtctgatgtaacatagattacccttgatttgacttcggtgaaattagaattttctcttttccctaaatgtgtcagggaggagaatggggaaaagtcgtctaaaaggagtctgcttatttgctcatcttcagaaaactgtagtggatgtgaaaacacaggaaactgatatgtgactgttttttctgtgtgaaaggaaaaataccttgcatttaagactttagttacaggctatttgaagtgagtagcacaattttgaagatgttatttataacaggaaaaaatagtaatttaaaaacaccccctttcctttctcccagcgatttctccaagtcagttgaaatttaagtacaagtcacaattacagagataaaacggctctgaaagagaaaaatgtagttgttgtttgaaagtgttggaaaaaacagacttaagtgtgtgaaaaattatatttttataaaaaataactgaaaatcaaagaggttcactgggagaagcagtaaactaacatttctaatttgtcattcgcgtgcgtcgctttccttcatcttggctatacttcctctcatctgcggtgttttatttcgcgcaagatgcgctgacagaggccatttcaaacgaatttatctttcactaggaccgtactagagcagtgtctcgaattttgttgatttgtggtttcgtcgtaaaataaacttgaaatcaaataaactttcgtgaggaagctttgatgtccacttggtgaaactcctcattcacccagttgagccgttgaactttcttctggaacctctttaaatgacttttgccgatccacgtgctgcaaagaagacctgaaccgtgcctatgaccctgcgcggcgactacagggacagaatttggctttccttctctttccaatatgcagcgtttcgtttaaaggctgcctcgatccagtgggctgaccagtgacttgtgcaaaagaaaactattcgatcgctgtttgccctttcagcgttttcctcggctgcggaaacccggttttcctattattatacttcaactttttttggagtcagctagcacagagcgctaaaccccggccagttccagcagcagccgaggcgaacaaagcctgcagtgttcggggccatgctggggcgggagtggtggacgagttcaaggaattgcaaataaatatattttatgaccacccatcaacaaactacgtgccaccgtggcggcccctggtagccgggccgtgtctgcagtgtggccaggggcgggggctgaaaaggaggcggccggagaggcgaagcgagctgcgagccccgggcctgaactttcacctctcgaacccgggcccagcccattggctgcagccgaggggtccaccgagggcagcggctcctgacaggacctgttttcccaactccctggacagcttccctgcgggatgggttggtggcccggggcatggcagcaggcgaggaggagataatgggggcgaagttgagcgggggcacttgggagctgcgggctcagtttcactgagaaaaaggccccggaagggtacgcgtccactctataaatatatactcctccgactgagatgtcctttcgcacctcttggctatctgtactctccagaaaggaacgttagaggctgcgaatttcaccaaaacgtttctttgtgtacagaaaagtgaaaggctaactaaactcgttcctctccaagtcttgagaccctaaccctccttctcctcgttgggaacttgatcttccaagtggccctagctcttttacaataaacctttcccgctcacttactcggtacacctggagagaaaagggaagtcagtggggtcgatgtacgcgggggaagaagaagaaaaagaagtgagaagctgtccaccttttgattgttctattcccttcatttataacccccctggaaaggtacatccccagttttccaaggatttccacgtcgtttactcttcttttttccaaaatagtttcaagtttattcagaatccgtttttattgaggtttcctagtgaagcataaacgcagattacttaacataaaattatccccacctttcaaaagggcgaggtagggccatttggggctggcgttttctaatgataatgactgttcctccttctgtctctgctcccacttttaaaagattcggattatttgtccactgttcagcctgcatttcaaaatagacgatttaaaaaagagtgagaacacagtctgtaggcacagcacttgaggactgccggagttgaaaagctcagggaaagaaccgcaattcaaagtccaactctacctcgttcctcttcctcctggcaggggccatcttcccagggccagccccatggctttttgacttaattggtttcactaaaaaaaccctgacggtgtgtttaccgacgtgggtgccagggctgcttcctccctgggagagccgcgggttctgaaggaaagggttggtgccaagtgtgtgtgtgagctcgcgactgccctttagagaaagggcgcgctgctctttcaggaaaggaaagattcaaaggcacaagttagtgcggttcgcccgtctccccaaccaccaccacccctccctcttctgccaccggaggggttcaagttggccgttctttccccagggaggagggccgggaagcagccgggggccaggctctgttcaccacggcctattggccgcagctatttggaggaaagtttcagcgcctctcggaacgccacgctttgcgactgacttgcgagcaaagcagcgggctcagtctgcggcgcgcggaaaaggcggccggcgaagagtcgcccggcccgcgggcaggggagggaccggagggagacggcggggagggagcgctggcccccctctgggctggggctccggaggaagcccctcgccaagattccggtcgtgcgtcccctccggggcccgctctctcctccctcggcctttcccctgtcaccgccctgggtcccaagcaggccgcccagccgggtcacacccggtggatagaagccgggacccagggctggcggctgggcccgtgcatcccccacgcgggcgcctcggctttgaagtgcgcgcggagcaggctctgaccgtttcttctttcctttctttccggttacttttgctcccctcagtcactgataggacccttcccgaaaacctcagactctctaagtcccagcttggcggccccttccttccaagccgcgccccggtgacctgggctgcgcgaccacgaggaagcccgagaactccttggcccaagtgagacaggaaccagggcaacaatgaagagaaagacactcggcctctctccaccccaggccgcagaggcgcacaccgtgaaaagaaaggccaatcagcgctttaacgcacgctcgggtctccctttccgactaccatgtacttttaactccctgccaccgagggctttggatcccttcgaggctttctgcacttcaagtggaatcccctgtttcatttgccagcagctccgtctgctgagaggacgtactttggggactgccaagaagcagcagacacaactcggctttgccaatacagcatacggttttgttctcgcctccctccccacccccttccctgactcgccgtctggggcgagctggagaaggcggagcaggaggtggggagaagggtgggggtgggggaaggtctggcgtagcacaaacaagttctccagcgggttgtttacatagcaggtggacctgacgtcagccaggaggctccgctgcaaatccgaacaatattcttccccgcgtttccccctccttaaagaagttagggaacggggggagataggtggacgggggagaaaggcatcctaaccagctggttccaaacctatcaacaacaacaacgacaataacaacgcaaagtaaaacaaaacaaacaagtggtccggcggtacttcagaatcctctgcggcgtcctgtcccccaccccgcccctccgaggagaggcagccccgcgagcagtgtgtgtacagttcgcattgccaacaacacgcgcgcgcggccgggtgcgcgcgcctgccagcgcacattcacacacacagacacacagacacacacacacacacacacacacacacagatccgggtggggggagcggctgcgcgagacagcgcgagcctccgagaaagcgcgagacacgccggcgcgtgcagctccgcggccgccgcttcgccctagctctagccccgcgccacccgcagcccgcccgcgaacgcccgccccggttatttatgcggcggccgcgtccgctggctgcggcttcctcggccccccccctccccgggcgcgccccccactcgcggcagcagctgcccggactcgcgcgtgggtgtgttgtttgggggcttctgcctcgccgccgcgggtgccacctcccgggacgctgcccacggcgtccccggtcgcggtaagtttcttggccctcactctggcgcgctacacctccgcaccccaccctgtcccagccacctccacgctgggccgagctgcgactttactctgctccgcgctcctcccgcggtggcgacaaagtttcgccccaaaggcagcgccctgcttgccggggcgagtgtgacatgtgtcaaatttgggctcggcgttggggtcgcattccggacccagcatcaccacttgttgttctctttcattttgctttgtgatgggggaaaaaggggtggagaggggagatttgctgttggctcacggatgatttttagtttggataatgcaaaatgttgcttcgtccggagagacctcggctggaggagaatgtgtgtcgaaacaccagatgtgtgtttgtttactctcttctttttaattgtttgttgtcttttccccttcctccccgcacccccacccccaacctcgggaggagaaacaacagtaaaaacatctggcggttagaagcacacactttattgatccaactgctgacctttatttactcagttgggcaagtgcacgcttctcgcgtctaagttgggcacttcagcgttcatctcagaagtacttctccaggaaggagagagatggaaaggggacactcctgtttctggagtcaagaaactcctgggccctactgacgcttcgggataaccgtgcacagggatgactgctgccttgatcgcgttcctttccctgtccacgcgttagcacgaccggcttcccccggtgtctggcctggttttacttttattccgctttagagaggtcgcctggctgtttgtgggtgggtttggggtgaaatcgcacctcgcggcacttggtgaggggacgtgggaggagcgcagacacctttcggtgatagggagggcttctcacttggctgttacctggaagtccacagtggccccggcgggcaggcgggcgggcagagcgcgggtccgaacgcccttcgcgctcgcggcggcgcacgtgcggcggcggcggcggcgccggcggcgcgggcgggacccactgggtggccgcgcgcgccacccgcgcgttttctgcgcgcctctgcccacccgcgaggccgcaacgcgccctgacacccgacctcagtgtggaccctcacttgctgtgggtgttggggcctctctagagcagggaggaaaagttaccctcactattctcagactctggaatctcttaggtaagtctcttagggcacctggcgcatggggtgacgctttgattagaaggaacgtgaggggaagaacgggtgcaagtctggggattggaaagcggagccagtgcgcgttttgcacagggatgagtcaagagaggtcgacctggccaccgcttgggacgctccgcagaatccggaatccccaaagacctagacccatgtgtgtatttgtttattcagctttttaaccaacagatttaaaccacttaatagctgctatctgtaaggctcctgttccccccatctaaccccccctccacacacatacacacttttttttttccccaccacatattaaaatccagtaagtttcttgatcttgaggattattcctggagtactcttcgctccctggtgggcaggctttggccatgcaaggtgcgctaggtggcctgggtgagttctcagaggaggatggagggggaaagggtacgaaggacctgtgggagtgtgtaaggtgtgtgcatatgtagtcatcgtggatcaggagtgcttaaagagctacctcccaacatgtccagagtctacttggaagaatacttaagtagtagcaggtaagcccaagggagaaagtgacgccctgttgtcaagcagctgaagt

SEQ ID NO: 49467 - DNA, 748 bp, Homo sapiens
tattgatgtattttaaaatagattatgtatttgataacatagtttggattcaatgtcattgatgaagttgggagcatttctttttaatcggcatatacattttaattccaaggtcatgtattatgttcatcttcatctttaatgtcatgcattctgtctcatcttcataattcatcctaatagtataaatcaaaataacaacatagtttgtgaagtgtggttgcaataataaaatgagaatgcagtatgtcgaaatacaaacagtaagttttgaaagtttgtgtttctacaaaattgaactgcttgaagagaatttatattgattttatgaaagagcaagtagatgagtcatctaaattttgtaattttaggaaatcaagaagtgttagtcactgtagaatttgaaaatgctgtatgctttatatattaacttttaatcataaatgtaagtcaatgtttcattccaactttagctttttcttagaacttatttttactaaaaatagttaaaggaaaaaatttcctaaaagattgtatttttaacaatgtttatatttttatttgttgttaaatgataaatatctgtcagaacatttacagtcttaatttcatttgaatggaaaactcatattttaagatagagatttctttaatttccatgagagctttaagaatttaggatttgagcatttgctgtggcatatggtgcattttctgtcctattttgtataccagcccattaaggaga

SEQ ID NO: 49468 - DNA, 456 bp, Homo sapiens
ttttatttggaaaacatgttgtacttggttgtcaggtcgcaggctagcccatccatttaaccctcgtgttaaaaaagaagggagtggtccatgtcctttacagagcttgcaagtattatttgttggtatttattttttttttaatatgaacttagttgttaaatcttaaaaattggactctgtctcactctctctctcatgcacacacataatgatttaccagtctgtctgggaaattccgatttggcaagactaaacctacattcctacaaagcagtaatggcagtaattttatgggtcttaaaaaaacacctctttagagactttgccatagtaccatgaaactttcctttgtcctgcgccttgcctaattaatatttttgtctttaggtattttattttgtgacccttatgttgtatgtgatatttatcatattattctttctggtgattgtt

SEQ ID NO: 49469 - DNA, 1196 bp, Homo sapiens
aattcttaaaacatatacacaaaagataatatgatgcctgttgaatttaataatatgttcaatcgaattattatactactaaaacaagtctaattttgattaggaaaaatgattattttttgtatatttatacataatgtacatattataggccatcgttggcactaaagaagttaaaggagtggggttgggggtagaaataacacttgtattatgttaaatcagaaaaataatcacacttggcagttttcctttgcagaatgcaggaaaggctgaaggcttttgtacagttcaaagagcacattccacagatacagcagttgttggttgcctgcagggatcatcagaattgagggggtggtggtagaggtctgtatcacaaaagtccagtctgttgggctgtgtgtttgccaagaaaaaaacaaaaatgtttgcacttttttgagaagttgtttagaaattagcttcatataatttaagtgtattttaaagatggcacttttgcatcaatttttaatctatgcaataatcagatgacattcttatttctcttttgctgcctcttgttctttaataatttggtgttagattaaggtttacatgtttaactgtggaagcatagaactgctgactattaaactgtcagttaaacagagaaatataaataaattatatttcactcttatatatttaattatcatttatacaactagcatattaagcaatttcaacaagttaattcaagactgttaagagagccttctttagctgaaaatatgccaaagggtagctttttcatctggcatgtcaagacttgtgctgaattaacacttgtatgatttccctacagaatatacaagttatactttctactgttaacttaaataatgtaactgaaagttctctgaaaactataaattgtagaacagttataaattcacattattaagtttcttgaaatgtgtattgtacatgatatcatatatgcactttttataatttatatcaagttttggcaaagtatgtcaacatagtttttggctatattcttagctttaaaaatagctaattagtgatgcgctgttataatttttaggtttacgaaaaccccccaaagccttatctggatctagtcttgaattcacaagaatttgggataaagtgttttgttgggtccagatgtgttttatctagcc

SEQ ID NO: 49470 - DNA, 1265 bp, Homo sapiens
cctgtctctgtattcatctaaatcctccattttacttaagctagctcaagctggtttcctctacttataagtagaaatgtcctgcctaatgcagttgagcttggatttgtcaaatttgaagttgcagtaggattcctagatgggaatacctagcacttacataaaattatggcccttggactcagaagagaatcctgtcctgtgttattcagattcagattctattaacttttatcaagcaccttctattggccagacgttgtgccagtcatttttatatgtatccatactacattgtattgattttctgaatttcttaggggattgaggtgggtcaagtatgtgctaggtgtgactaagactagagctgggctaattattgggtctgaaggctttggtcatgactcatcgaagcaatcaaaactagagggagatagcacaacacactgaaaataaatgttcttagccatgagccagaaaaaaaaaaaaaaaaacaagaacaaaggttgaagtttaaggggaaagagaggtataataaagaggaacagagcacccaatcagggactagacagaaaccagatcaaagcacatgtgagtttgaaataagagcccaggttgattgccctgaacatctttgtatgtctttagtttgcttctgtgctctagctagtgcatccagtgtgagtgatatttttagtgggaggaggaggttgctattgagaatgggatcatttttggcactacatttttgaaccaatttttcttggctttcaggaaagctctaagactttatatttgtgtcttactactttttgatttttaaattgtttatccttgagattttttaagattatgttgtgtaaaataatattttcactccctttccgaattgggttgctaacgacctacagaaaataatgctatgttccattatttctgattttcttggaaatttctctgggtatgtgagagagagagggagaaattctcaggaaagattaagctcttctggtatgtttggacaaccataagagtgccaggatattttgaggttaatgagccaaaagaagtcactgagccagatgaagtatgaccttccaggctaaggtaacaagcatggtttttagcttgttttttttttttgttttgtttttgtgttttaggagatggcgagattagaatcactgaaaagttttataggttattctttttcatataatgagttttcatagtacctgttttctttggctctagaatgttttctg

SEQ ID NO: 49471 - DNA, 507 bp, Homo sapiens
gttggagcttctgggctgcttcgtttacctactgaagactcagcaactgcgggggcgcccgtccctcagcctagctgcggccttgcagtttgatctcagactgctgtgctagcaatgaacgaggatccgtgggcgtgggaccctccgagccaggcgggcaatataatctcctggtgtggcgtttgttaagaccattggaaaagcgcagtattaaggtgggagtgacccaattttccaggtgccatctgtcacagcttcgcttggctaggaaagggaaattcctgacccttgtgcttcctgggtgaggcaatgcctcaccctgctttggctcacactcggtgtgctccacccactgtcctgcaaccactgtctgccaagccccagtgagatgaacccagtacctcagttggaaatgcagaaatcacccatcttctgcattgctcacgctaggagctgtagactggagctcttcctattcggccatcgtggaaccgccccggttctagg

SEQ ID NO: 49472 - DNA, 510 bp, Homo sapiens
taaaacaaatagtaatatctattaattacacacttcccatttgacgttcatgtatattggacctgacaattgctaatattttattattagtgctaattttgcttttaggaagaaaagaatatctctgtgagataaatagcctgcagccaaaataatgaggctagtaggcaagtaaaaggtcagataatgtgtaataagttacagagggaattgtgtaacgttaacattggtaacaggtaaaagatgtaatagtgctgcctactggtaagaaatagtagtgtttaaagggtaaatgaaaatgggtgtagtgttaagtgatatacatggttatttaaggttgctactgttatctatgatgcaaactattttttcgttagtatttaatagaaaattcactatgaagtctttgagatttaaatttctggtatgatatttctggattttgaaatttttatttttggaaaatttatataaatagcatattggctctcttgctccctctttttaatc

SEQ ID NO: 49473 - DNA, 2900 bp, Homo sapiens
tagctgtagtttttaccttaacagtttgaggctaccatttctcttcctttcatgcttatggggtccacacaaaccctgctaggctacctacagtataaaatcttaaaactccatgtggtgttgtgagctggtagcagatggactttcttttgcatctgctgtgtacagacttggctttgtactcttttcctgggggagagaaagtctttcttctctgctagttgattcctgtttttgtgaaacagctaagaaaacatctgtggcaggcagaaaaattgacaaaggattgacaaacaccattagctgaaaattttccatttcattgcaactatgcattgtttactttactgtaaatatcttaatacatcatcctctgaatatgctggcagagaagctggagaactgtgatttcaattaaggttagtaattgatggtatctagtgttcaaaggctgaagcttgattaacatctgcttggacaaattgtcattgtgaagtggttttgatgtgcattgaagattatttctttctggcttatctgatgttgtggctgtgaaatgcttgtcttgggtttgcttatttttgtaaactacttcctttggctgtaaattgcagagcactggagctttaccaaaagtgcagtgtataatggtaagcttgtcctaataagggaagcaagaagtgtatttatcacagacatgaaagctaaccgaggacttgagagactcaaactggtgcttttgtctctctctctctgtctttctctctctcacacacacactcacacactcacacacatgcacacacacacatacacacacacaaaaatgaagcacttactttagaaagattatggtaagcatgctggctcagtcttgaacctttgtcacccctcacgttgcacaccaaagacataccctagtgattaaatgctgattttgtgtacgattgtccacggacgccaaaacaatcacagagctgcttgatttgttttaattaccagcacaaaatgccatcagtctgggacgtgatcgggcagaggtgtactcacagtagtgtaaatactgctgtaaatagttgtctgatggtggctttgacagtgagctagcttctgagttttcccttctttttatactgttttctgtgctggcttttttgaatcttcctaatttttcatctctttaacaaactcctatgaagttgaaaccgggaagtttgctctaacatttccagagaaggtacgttactttttgctaagagaatatctgtaagagtttagagaggggtgggattttacgattgctttactggtagatttggcaattgctttacttttttttttttctgagactgtagctcattgaaatgaactagagcattgtatctgtttgcgagggaaaagccgggagaccagacacaggaactgtttttgatctgtcagtagcgtaatgtagatttaagctatcactagtaaagacagcaaataaagaaggcctcttttgtattaaaaaaaaatctgcaagatcttgagaagaataaagacagggttcctgctttcatggtttgataataaccatgtcatcttgcttttagtaaatgccccagtatgtgtcagggcgcaagtttttgaaaagggagtttgaccacacgtttgggtgcctctctgtgccgtgctgtgtagagcagatgtttattttgtgctaaaggggaaactctttttgctaagcttgtacaaacatgaaaggagtcagggctcagatgatctttgtagttttatatgcatgttcatgattttattaaaaattggttggtgggtctttttcaaatcactgattgtgaagaaatatatatatttccaggaatacacattgtgaattgatgagtaatttttagaaactgcattatatttcttcaaataggtgtgatagtttaatactcgtgtcagttaaaaaggtagcttggctgggctataaattaccatttctgcacttttcattctgtctgcttcaaaaaagcgtctcagaacctgggatcctattgggcccatcatagggctacagtaattgcctgatgacaactgaaaatgatagaataattgtcaagagagacatttttaatgggcaaggtgatttaagtatgcatgaacaagctatgagggaagatgagcttgtttatgatgcaagccagtataaacacagtcggaggatgacacagatagctgcacttttcccagtgacatgagcaagttcttactgcaacaccaacagctttttcctctgaccagtttgacattcttcaccttcaggtaataacgcctaaatttcatccatgtattttcactttactgtagcctaagtgacaggtttttgtttactagcctccgcgaccaaaaaaaaaaaaaaaaaaagcactctatttaatgtgtgcttagaatagatcttgaatcactttcaccgtcaatagtgtgtgtaatacaaaactttcattcttattttcgattgttccttatctttgaactgttctgactttaaatctgattatctatagttgattcataatgcccttttaaaggcatatttatttgtctttacagtcagcccttctgctgtacaagtttggaaacaaagtatacttgagaatatgtggagaggtttaatgattagcctgttggttttcacggaaagcagagtcctatacctaacagagattacggtattgaagggttacaggtatctgtttagaaatatggtgctctattagaaaacaacttgtttgacttttttttttaaacccatgtaaaatttcacagaatatgctcacgttttattttaaagatcactaaaattatatgcattgaaatactaataatctttgtaaaaggtggatagataatttgtttac

SEQ ID NO: 49474 - DNA, 2277 bp, Homo sapiens
ctacaaatgaattctgcatttcattcacaatgaaataaaagagcaaaagttatctgagtataccactaaagtactatatatctgtaaattactttacacttgctatcctcggctcatcagattaagctacaatcagaatgtctcatttataaacggaaagttgatcagctttttacttccgaccacaagtttatctcccctcagataccactgatccagtgaggcatttagcttgccataggccaggctggggccagtaccacggcatccgcaagggtgccaaccttgtttgcctggatgcctccagcagattcgcgcaaactgcaactggttttacatcaggaatactgtttgaccaaagagtaatttaggagccagagatgaagtgagtaaacgttcaaccgaggggtcaaggtttcaaacgcacacgttctctatcccaccaggaaagttcgatactgtaacagtgttttcgtttttccttgtccaccctaaaggttttcgtcaggatattcccaaagcctccgtcggtctgggggcaggagtagggagaagggatgaggtgactttttgggcggggtggggggaacgtctgggcagccagggacctgcccattcactcccctttcccagccccgggagggcgcagcgcccgggtggggagcccgagccagcccaggccggctctggcctcctgacccagacagcgcagggcgcgagggatcgcgcggccgagcccgggtcgcgccgctcccagcatcggggccgctagccaagagttcgaggccttcccgatccggatgtgatgaaaaagagcaacagagggagaagtgtttcaggattgtaggagtggaagaggggaaagagaggcagagagggggaaggccccctcgcaggggagccggctggagtgagctggctggaaagagggggcggagtgcgcggagtcagagccgccaccgctgccgcagttgccgccactgcggcgtctgggctgagccggagggaggcgggaggacgcgcaggggcggccgccgccgtcgtcaggccaccggggcgaaaatgcggccgctgccggaggctcgctaactttccggggcggaagaggaggaggaggaggaggaaggggcttggagcgactacggggggatgcggaggtaggtagtggtctccgggcggggaagaggaggggtttgatccccatccccggggttctcccaaacccgatctctctttccagcccctccccgctgggtccacctcggacccctgggaccccgccgctgtcaacttgcgctgtaacagttttcttcgcaagtttcaaatcaaaacttccccggggtggagtttgagggagggaagtggagggggagggaacgtcccgcaggggtggtgtgctcttctctaaaaacatttttttttttaattttgtatatttttccgccagaagcagtcagttccctgcacccagcacctcacagcccttcctccgtgcgccctgccgggcggcgagctaggcggcagcggcgcggcgcgggctcggcggagcggcccatgtccggcgcgggcgaagccctcgctcccgggcccgtggggccgcagcgcgtggccgaggcgggcggcggccagctgggctccacagcccagggtgagtgcgcgcttgcaagtggcaagcttctttgtcattgttgcatttttcagtttgctcacaagtgcacagataggggtggggggagtgctgtgaggaggggctcccactcgtagttgagaacttttgcacagttcgcgttactcaggcaagttcttcaggatccttgccctagatcaacaaccgggtaagagggcgggaaccgttggtccctccactcccccttcctttggttgcgaagaaacaggatgacaggattgcttctttcttaagcatatgcatgtttgggcctaagactcaatgtgtaggttctgaagcgcttctcctctaggtctcttcagcagatccaggactgccgcagctctctgaacaagcgtgcacttactccatttcatctttctgtttcttgttggctcctctaccacccggttgataattcaggtttctgtgaccagtagctttggaatggcttatgcttgttttcaataactggtttgttttgaaataaataaacaaggtttataagaaacactttccaagaatgaattagcttctttgtgttcttccaaagtgtaaacacacacagcctataaaatactcttgtgtctgggaaacttccataacaagct

SEQ ID NO: 49475 - DNA, 1347 bp, Homo sapiens
atttctaacttaaattttctttaaaaccgcccaaaacagtatttctatggtctactttttatatccttgtacaaacccacttttgatgaccccgttcccattttccattttagtaaattatactttctctatgtctatgttagtatttttctttcttttctttgttgcctcttcagtgttagtattatgggtaaaaccccaaatctctgttactgaatgtattttcattattttaaaatattaatttctttttctttaactggctgactttttcctgtttttaatttagcccaacctcagcgcttgcctcagcttcagacttcagcccaggtgccaagtggtgaggaaataggcaagataaagaacggccacacaggtctgagcaatggaaatggaattcaccacggggccaaacacggatccgcagataatcgcaaactttcagcacctgtttctcaaaaaatgcatagaaaaattcagtccagcttgtctgtaaacagcgatatcagtaagaagagcaaagtaaatgctgtcttttcccaaaagacaggctcttcacctgaaggtaagtttgagatatatgtagattttatttgaccagatgtaaaataatatttcctggtaattatttgatcaagcatatataattgaagaatcttgcttatccttcagacaaacaggaattttggtaaaatgcagattaactttcccaaaggaaagcacaagatagaaaaggaagcagtggcagctgacatcctgcttttagataatcgtcttctagagtgaatagtcattactttaaatataactgctatacttctttttttaatgccacatttaaaaatataaatacaacattttgatggcatacatgagtgtgtgtgtgtatttttatccctccctgatgcaatatgttattctatagttcagagataagattacctgcttgtatttttgtcttgcaaatcggttcttaaatagacaaagctaaaatgagagaaagattaggtaattttcatgctcttgccagggaataggccaggtgatttctgttgcttgactgaccagcatcttccagccgccacgttggccagcacctgcaaccatctccactcccatcccatttcagcctcactgtggtctggtcttcacctcctcctttagagacacttggctgtgttctctgtcccctggagaactagttattacctcttcagttctatctcatcctgcccttggctgggttaaaagcaggttaaatactatgaacctgagaaagttctttattaatcaaattgcacatggtgacaattaaaacagactccctttacatgattcattgtatta

SEQ ID NO: 49476 - DNA, 995 bp, Homo sapiens
tggaattgtttgtacactaaattaaggcggaggtatttataccttataatttcaatgtcatgctgtcctgttcatctgtggcttgcaatagtgccttaaaataatcaaatggtattaatagataacctgggtggagagggaggaatgtggaaagagtaacaatgtcatcattgattcacaaattaattccataaataataggatttacctcctgtgcactgctttgaaacgtgctttggtgtctcatttcgctgtaacatttcactctgcttgcttcgcttcatcttgcctggcctgttagaccgctgtgcttctttggttggggcctgtctcttctgtcagggctggggagtgcatcctgggtcttctcaggcgaggctcctcctgcctgtgtgaggtctgcacctcctgctagggatgctgcccttgcctccaggagtcctacaggaacagtcactgttggggacctctcagccctttggattgcaaaagtgccctttggactcttgctgagccctggctggtcaagtgcctggagaattgttgtgtatgatcccagtcctgtgaatattgtcagtatcagtcagccttcttttagtgtgtttgtttcctcccatgctgccataaagaccttatgtcctaggtgacctggccaaccctgtgcatctctgcagtaggctaatatcagtgactgaaaacactggatgtgaccaaggtgttattttactcatcatcatcatcatcatcatcatcttttacagaatcacccagtgggtacattatggtttaagttttgttagcaagacaaaactgatttattttcatttgttacttgcacaatgtataagccaaggacaaatgaaaagagatgaagctgaaatgtgaattgtgaaataaacacagttgggaaaataaaattagaaaatatattaagcatttgggagagattttttgggttatttttaccccaatatgaattttcattaaaactagac

SEQ ID NO: 49477 - DNA, 1119 bp, Homo sapiens
gactaaaggaggcttcaaaaatattgtaaccgtctatttctaaggctggaacgagacattctttcccctttaaaatggatagatccattatatatagttctatgtctgataaattttacgactagtatataaataatttacataatcaataactactcttaggcttttaaaaatattcagttaaaggttcttcaatgtcaggtgggtttttgtagagtccctctctcaatcttgatatttaagcattgcatagtggaatagaaagttaaggtttcagtgaggtattgttggaattagataatatggatattcacttgaaggtacattgaataaaactggcttgctgccagttaaacactatcttctaagtaataatgaagctggctgtttataacattacaaatattttacaaatcatgacgataatgtaattctggaaaaactcaactgaagagagtcatataagacagatgctgagatgaaagtatggaaacagtgttgatagagggaaaccacggacactgtctagaaatccagaacgttgtaaggtcatgggcctttattcatgtaggtggattttagagatcccctgaaatgattggttactaccagaaatcaatattaggggaagacggagagacctgaaaactctcacaactctgtttttgtttttgtttttccagtcgctgcatggaccatcatatgtaaaagtgggcttggcactaaaaagaaaggaaagaacagtgtgtccttctacaaacacaactctggaatttcccttttgagtactctctgacccttcctccttttcaccatctgccaagtggagtgtatgactttgtgtttccacattttctcctttcatcctctgaattctctacaaagttagagactgcagagaaacagaggggtgttcaaggagttagggagtttaggatgggatgcttagggataggcctgcagagttaagagactgccgtaggtaccctggtgtttgtttttctttacctgaagcatttgtagccaaggaagttatagtagagggattctgtcaattcacatctacttgcagttatatggcattctatagagaagcgcatgattttttattatagcatg

SEQ ID NO: 49478 - DNA, 514 bp, Homo sapiens
aggctcaagaacaattctgtgactcctcctcttttctttttagatctaggccactgtcttctcaattttctagaaattcagtatgctagtttcctttggtatcttcacaaaaggatcatattccatgatattgaattttaaaatttagagctagaaagaaaattagaaattattagtacaattctcagattgtctttgtttgggctgctataataaaataccacaaattagcttataaacaacagaaatttatttctcacagttctggagacagaagtccaaagtcaaggtgctggtagattgggtgtctagtgagggctatttcctggttcacagacagcagacagcactttcttgcgacgtcctcacatggtgggaggggcaaatgagctcacttgctcctgttttataagagtactaatctcatacataagggctctgccttcaacacttaatcaaaggttctacctcctaatactatcaacatgggagttaatattttagcatatggatt

SEQ ID NO: 49479 - DNA, 1426 bp, Homo sapiens
tgctactctttatggcttcgcacacacaaaaatcatgtctgggtcaggatcaagggcctgcctttgcaaagcaaatctagaaggctgtctttctatatcccagttctctgagttccatgagggcaagcatggaaaagcatgtgtcacagaccaggttggtatcactttgcaaatcctattttacctattgggtggaagccaaggtcaaatattgggaaagtggagtaggaaggctaattttggccacagttctaagccatgatacaaactttatttagcaaattggttattaatttgatctctttctgacttcctccactcatggagtgtgttacttaccatttaataataatgctataaatgaatgactggtattggatgaatttactggatgaataaataaatgacaggtgttgatcgcttccaatatttcagggtagcttgagagaaaacacttagagggagcttttctgattttccagctgaattttctaaaaatcataagcaatccattaataatactaatctgatagaattgaataaagaaatcattttctcatgctccctgtttcctttcctcttagcatggacccagcaagcagtttcttccataatcaaaggaccttagctacttgataaactgtctccagctagcttgctttactagagcttaccagatgctgggtttgccgatttctttaaatgctacagttacatatatatcaataactttcctatagttccaaataaatcacccacatttatcacaaaacaattactttcagtaagaacttgggactgccaaatagaaacaaatttttaaaaacctcagtacatcaaaaataaagcagacaaatctattttatgataacataggaatagcacttatttatccttgacaatagagaatttaaagcagaaccattatgcagctttgctgttcccttttataaacgataaacattcaacaagactttatggtctttactgtgttttgagcatgattgcagactttcagctaaaagataatcagaacctaaatttgaagttgagctgtaaaccatgataccattggaacatttcctctgacccactccagataacattccaacatcgtgaatcaccttggcagtgttttgactgttgcctttctcaattgcattcccagcagaaaatgcttttatttgaccaattcaatcttttcaactttcacttaccaacaatagctgattgctgttgtcaaaaaaaccatgtcataataacaatgcactaaactcttaacctgcatgttagctgcatatgaagagctgttggaattgaagcaatcctgctgtggatataagggttggaaacatcatcttgttagctctcctttctctttcagaaattaatattatctgttacatttttagctgaggcatcatct

SEQ ID NO: 49480 - DNA, 573 bp, Homo sapiens
ggagagtacaaagagcagtattctggttccggttccccagaagtgggagaaaccaagtaagaaaagaaccctgctgaaaggactggtgcataatcaggtaaaagtctttgacagcagggacttacacttacacatgaggatacaagataggaatccacttacaggaaccagagccccaaatcagattggaatagcaaagggttgagcttctgagttataggattaggcttcttaaattctagatttgtgacgagattggttccagagttgttggatgaacaggtaggaggagttaagtaatcaaagccaacagttagaagagtcaggccagcaagcagatagctgagcagaaaagcacgagtgtgtttacattttctgattctttgatactgtgggaaataggtcatttccaactgtagatttaggaaacagtatcccctctccactcgtttctccccttcccaagctttttacctttacatataaatatgttgttattattcaagaagtgggccaaatttagctcttttgatgagtgtgtttttatactttgtttctctttgaactataaaa

SEQ ID NO: 49481 - DNA, 583 bp, Homo sapiens
gcactgtttgatctctagtatttctgtttctctctcagacctatagttgctactcattgttaagccttgtatagtctggttccatgcatgtgcaaaccagtcctcagccaaagattcatagagaattcctaaatgagcttctgcctttcccactcccaatccctgtgtagctcccatcttttcagtttcctgcccaacagattccagtcacttgggtggcctcaaacgtgtatctcttctttccacatctgaggaggaccaccatgctccacttgaactcaagctccctagactgggaactaggcaattatctctaggcagagagctagaacaaacatgtgagtcaccttgtgagtttcccttctttcagagattatgctcttgtgctgcctactgcccaatgcttaaaagagttgcattacatatttttccagttttataattgcttttggtggcagaatttgtttagtaccagttcctctgttatggttgaagcagataattaccgaaagtaatttgtattttcttttccttgcttattggaattttcttattgaatatgtataatattgatagctatatg

SEQ ID NO: 49482 - DNA, 781 bp, Homo sapiens
gcaattaaaagaggctaattcttgtgttcaagaatttgccctttatatttaaaatttaacttttatatccaatgcaaagtgattctcctctcttcttcctagaagaggcagaagctgtgcaggagggaatgttgtctgcctctcaggcatttttcaggccttctcacttctctcctgtctctttctaccacctttaagtggtgctatctctgggggcagtgatgaaggaaatgaaggaacaatgttctcatgcttcagagccgattccaggtgcacacacacagagacctgcacccttgcccttagcactctgatgaggacttgaccttgtgaaaggttgtggccattcccttcccatgtgaactggcctttatttactctttctctggtagttttccaaatacttgtattggcttctttttttaaaaggtcagtttccctctcctgctgctatttagacttgatcattattccttatgctattttactcaagtccttggaaagaatgttcaatgtaagcaatttccactttgctgtctatcctatgagttacatatgagctattacttgttacaaattgttagttctagcaacttgctgaggaggttattacgtcaaagtactgtacatatggggttgacttttcctttttctggtactgtcttgatttgaggggtgtggaaactaaattgttaaagacatcatcagatattgtcaccacaccttccaccctcttcttttctcttttgttttgtttgtttatctgctattttctcctatt

SEQ ID NO: 49483 - DNA, 746 bp, Homo sapiens
gttatcaattcgttttgctgaacaattggaattttctgccattttaaacatgtgtctgtctgaatcatggatgctaaccatgtttgtaaaagccaaacatactgataatccatgtattttatggagaaaaattacagtctccaggctctgggcaaattttgtgcacatgtaaaaatactcagaaaaataacaggaataattaaatacatgtttctgagttgaatgaggttttaaaggtaatcactaccatatatttagtgacaattcttctcagtgcctaatagtttctgggaatttgtggatggtttactcattaaactgttgcttacaatctatcccaacttgttttgcctactctagtttctctcttcacaaactatcccttgttcaggcggaaaaaaaaatgtgcatgaggaatactttccacgcatcttgccaaccctgttaagaaacatttcatttgttcttccaaagctaatgtttacctttccgcatagataggactttcatctgaaatctgatattttagaagttttcatttaccactttagaagcaatattttgtccatgttacataggtattcaccaccattactttcactgaattctgtatcaaatgtgattatgaaacaaatcactgtaatatactgataagaaataaattagcatacacctatagtacgctgcatttgatttgtgtagctatgtggataattctacactgttgggggaatgctaccataatt

SEQ ID NO: 49484 - DNA, 818 bp, Homo sapiens
atattttatgtgtttatgcatttttaacttgtataaatggcatgatagtttagaccttttattttcttttttcttttgcttaaactatgtttttaagatctttccatgtttatttgtatttctagttcattgcttctaagcaaggcataatattttatggtatgcatttaccatactttacttatgtgtttttaggcaaccgtgtgagtgattctttctggatatactctggagacgaattactaggtcattggttacaccactctgatttttactaaatactgccagattgttctccagaatgactgtgctaatttcatttctacattttggctaactcttggtattactcaacttctaatttttgtgactctgatggatataaaggggtattttaatttgaacttttttctagtattaggttgagcaattcttcaatatttgttcagctatttgcattccaatctgaattcctcttcctgtcttttgctcattttttttttttctatcaggcttccagtcttttccttgacttcttgtaagaaactcttttggggtgccaatattaattcctaattaactcttggttttgaaaagttcttccaccctcctggtctgtcaaccattagtctatggtaattttgacaaacagaaattctaaattttggtttaatctttgccctactggcctttttggatcttaacaagtccttcttcattccaaagtcacaaagatttttacccataattgcttttattagcttcatatttcctccactaatttttcccatgaaaactttattttactaaactttaga

SEQ ID NO: 49485 - DNA, 899 bp, Homo sapiens
gaaataaaaagactgaaagttaattaacaaactgagtggaaaaaataacatcctctaaaattttatagaatgtaaatttataaccatctggccataaattgctgatgctgatgagtagcaagtgaagtttgtatgcacagcctggcttcagcgtctttgggaggggtgaacttggcgtgactttttgtttatttgccctggccttgatttttttttgaagcattacatgacctgctctgtgaaagaagcccttgtgttacaacgtgaaatctgttacaaatatttaccattggggaatgcaggagcgtggataagtgccagccagactaactataaaattcactgcacattttggaactagttactcagatcacactgggctaaaattccattttctaatgagatcatgctgccacatattattggccttttgtgccatcaaattatgaattccatacttttccctagataaaatatttacttttaaatatctggatgagggcctgcatgccttaacaaccactgttcatctgacgacggcggcatgctaacgttttaaactgtgactctcccatttgaaaaataaatggaataaagagtgcttttcctgagatttcagcggacttttactctacaactcaaatcatactgcatagcttagaaggggatgtgttgcgctgtggttttttttaagaaaaatttggttttgcttttgaaacaaaaagtcttcattttcatttccatttctgttgccttctctcgcttcattgcaagggagagccaacaagtgttctcatttgtggctttggcttgatattgctgcccatacctgccataaagacttctaagattaggtaacatgtttgctttctttgagtggatataatactgcttttata

SEQ ID NO: 49486 - DNA, 843 bp, Homo sapiens
gtaaggctgggtcacatcttacagttgctatcaacctatcagtggtttgttaaagcaagagacaattgttagtacctcttccaaactccatattcactgacattatttcagtaggttgaaattggccaacttgggagtatatacaccactgaagtcagcaaacactaaaaaacacgggcctttgttttccctggacatctggtggttaaatatttaccaccacactactgggtgctatggaattcctgcactgagtagtttgacctctataattgtactgccaactctgtaggactcagattctttttgacttagtctagtggggagtaaaatcaagagagatgagtctaaataaagttaaaatgccttcaacataagacttctagactcagcttcctggttgtacacactttctttttcttcccctgatggtgattcttcaaaccaccttgaatatcctctccctttcaatttctttttcttctttcttatcaaaactaagatagatctgacaatcagacaaaatggacacacataatagattttcaaataggtgaaaggttatcatgtagaaaagaaatgaggctattatcattattaaatagatcatgtagtagggaaacattatcgtgtgatttaagcaacatcaaggacaatatatgcatcaacatcattcattagctgctattgattagctacatagtgtgagcaagtcacttactagtccttggattctgtttcttatctgtgaaataggactcacaatttctaactcaaaaggttttctcagttctataaaagatgattaaacaaaaatattttgtcaggtgctatacaaataaa

SEQ ID NO: 49487 - DNA, 1905 bp, Homo sapiens
tccctacaatctctctctctctcttttttttctctctttaccctgaaaataaactgagaagttagtattgggataactattccccttgacccaaataaaaagtcctgggcaaacacaggtacaaattgccaaatggaaaaagttcttctccatcttcagctagagggaggctggggatcccagctctttagaagccggcccgtggacgcccagagaatcccttcggagaccaggtcagggtcactgagcttgcccagcagggcgccgcctcggacgccgccccgcctctcaccttgccagcgccgcgctcgggccgcgaaggtgcgtgcggcgctcggtgattggcggcggcccggagctgcccggctgccattggctgcccggccccctttgttcccgggtccgggccgcaggcccgctgcggcggactgggcggcggaagttcgacggcgccgggcgagtggctgttgagcggcgccgcgggagttccgcaggtttcccgtgttcgcagcggagccggaggccagctgaacccggccgtgggatcccggataggaggaggaggggacccataggacgcgttaacatggacctggaaaacaaagtgaagaaggtaggggggcgctcgtggcgggcggcggctgcttcacctgcgcgggtcgcgcggcgcgcggcggccggaggtgccgaggtgggtggggctcgcgggccccccggtgtgagcccggctctgggtctgcggtgccccgggcccagggacctggccccctgggtagaggaggtgctcggcggccccgccagctccccacactcgggagcgacagaattggaagcgcgagcgagggcgggcgcgggactcttctctccagtctcacggaatcccagtggttgtaggtgttggaaactttacttaagatgtttcagctctgcctgtgcctcctcaaaaggaaaggacgagcttagggcgagtgcgggcgagaccgtgacacttcctggctcaggaagttgaatttcattaagcctttgtggtttggggctctgctgtgctttgacagctctgatctcctcccttccggctgggctgtctggggcgctctaaaatgagtgttgatttaatgcactgccttcgcacccgtgctggtgataacttctaatgtgatttttttttcggtcattcattacttgtctaccgaccgaggcagtgcctccctcttagggaattatctgtcaaagagcgcattctccttgtttggcaggtagtcccaaagggcggttgtcaccagcgtctcagcgcagggagacattttcagcttggctgctgcctcgcaggcactggaaccgacggccctacctgagccactcccgggttatgcggagcctggtgtcgcctgggagaaaagggtggggaccagactatgactcagaaggaatgctgatgtcacattcgagtgaattgccctgtgcgaaagttctcctcgttccaggggatttgctcatgttttactttgtggtaaatttaagctagctgtcccttatcaaatagagaagttttgcagagagaggaagggaaaaatacagaaaacagtttttgtttttctcatactcatggttcctaatattttatcttctaaacacaaagtttttgacttgagcattaattctattttatgcccagaactggatttttgaaaatggatacaaaatattgtgttaggactgcagagttttcggttaggaagctattgaccaataaaaactcgaaatgagaaaacagtttttttcattccttgcgactaaaattctcaggcactcaaaaaggtatccaagaacagaaaaacataaattgttaatggtagcgtgattgcattctattctcttcccatttggtttctttctttttttctt

SEQ ID NO: 49488 - DNA, 738 bp, Homo sapiens
gtcaaattcaaaaaagtaaaaaagcatagtttagaattgccaatttctctgttccttagtctgttagaatggtggggagtcggctcagatttgagcatggcttaaagtgggagagcgttattagaagccagcctagtggggattgctgagatctcatctgctgaatgacagcaaagttactactctgtaaatatacttaatctgaaatgctgaattatcctcaaaccatgagtgattcagcttgtgtttatcattgtgacattctggccactgtgaaaagctgtaaacaggagtttcagggtgttcattgcatagcttatctgagcagcgagcccagcagaaaagatggcattcagcccagcagaaatgccttgataaggagtccattaatgcatctctagccacaatgaacttttcccttgctttgtttgatgataaagtgatatcatgtttcattgaaaaatgaccatgtagatgttaggtggatttttgtttttatatgaccacaacgtgacagtcttaacagaatgagtcacaaagtaaggatcaaggatctgatttttcctttatgagatactggcctacaataaaaataactgggggttaaaaaaattaccctttgtttttcgtagagaatattaaaagtgcagtttagatttaaaactacagactctaaactccatatctatcagtatcacctcttgagcaaaataccgatgtcacctttgatagattttt

SEQ ID NO: 49489 - DNA, 841 bp, Homo sapiens
tagaatccttcctgcacctcacatgcctccaacttcctcttctgctgcgagccagagaaaattcattgctttttaagggctcacatgattagagtaggcacgcctggaaaatctcccatttgccatataaaagtaacataatcatgaaagtaacaccaggggacagaagtcataggggccatgttaacattctgcttaccacagcactgtatgtacctgattgtacctaatcctcctaatatttattttattatgtatgagaaatcaaagacgtaggaaagttaaataacttactaaagttatggcttatagatggcagagctgaatttgaactcagagttttccaaaacctttctccatggcagagtagatattagaatgcacatttttcactctcagggccagtgaactttgaactgcaccaggctgtcgcctctgaagtgtgattgttgtgacacagacatccttgtggacaaaggtgtacttttactgtgagctctctcctttttcagtgtgcccatgattacaacagtagaggaaaataaaaggttcaggaagcctaataatgacccaataagaaacactatctgctgggaatgctttcaagtaatatatagagataaagagtgtttattgaaatgtatgacacagacccaaggtttccaggagtttatagccagttatttcacattgaaggtataattaatataattgcaaccatgtcatttatcatattaagtaacagaattattgttttgctttacctttgttaaagtctcctaataaaacagttgcattttattaaaaatgcgttacttgattataacatacatctgttcag

SEQ ID NO: 49490 - DNA, 1029 bp, Homo sapiens
aaatttggctcagaacaagtttatttttatctctctattcttccaccctctatatgttgttgccttctattctcatttgtcccttcattcaagcaacactccctcatatgacatcatccaaaataataaagaagagaaatggcaaaagcgtattttacctctagacaacgaagaagatctttcccaggggcccccagctgattcacctgcctttccacttcattggctacaaatatgtcacctgctcatcctcatcaaaggcaaagggaaacagagttgctatggttgacttatccaagcacaattcataccatgaggtctgggcacatgctgcccagaacaaaattattttgctaatgtatgattgtttagattcagcattgtttagataactaaaaggtatgtttgtaaataagtatgaatctaaagttttgggtttctgttgacttgtgagatgagtcaggaacatcatttggggaatacctttcttaggtaacatttcacttttcatggccagcaatgatgtggagtcagggcaggagacactgacgtccttgtggttctggttactggactatgcttcgcttgctcctcccagcatctcattctgtctgatccattctcaaagccacaggtcactgttatatgtctatcaagcaccacccccacctctctctcagaagcgatgatgacttattccttgatgttcctatcacactgacttatctggccactgaaacacttatctgaatctgtctatgcctgcttctccattactgtaaccaatactttggctgataaacttagcatttctcacaaggtatactgtaagttcctatcagttcccttgttctaattcagtggctctcagactttaacatgcatccaattcacctgcagggctcgttaaatgcagactactggactccactccccagagtgtctgattcaatagatcttatacagggcctgataatttgcattctgaacaaattctcaggcgatgcttacactttaagaaacattgtt

SEQ ID NO: 49491 - DNA, 3503 bp, Homo sapiens
ataactgagggcagtagaattattatgattatgtaatttggaaagccaccaagctaagaagtaaaagacctggaattcacaccctgacaatcaaggcctaaagtgtgaatttgtgttcaccatgacatacttaatactgaatgtatatcttcttccctttcatatgaactatgtcaggtcacgatgtcagcaccacatagaaatagttttcttttgcttgcttgccctttcacagagatttcttccatgtgcctttgcagcttccaaaagctgtagcctgttctttgagaaagctcttctctccttaaggagttgctccacatcggattgattctgggccatgcatcatgtcagcttgcaaaagacaaaaccctttctgtttctaaagaaatttctcatattttgaaatgaaagcaagaattgctctgccgaggtgccaagggcaacatacttccattacgaagtgtttctaacaaaatgttttggagattttaaaggggcagctttctaaatatcccaggcatctgcaaacaaccagacatgcaggcccgcttttcagcccaaacattgtttctgggttgtatcatttttttttcctgaaagtcagcacagctgttgcaatgcccctttatcaattgtccaatgatcccaacaattttttttccaagagtgaataatcaaaatggtattacaggtctttgattttgaaatatatgcactgttaatataattttggccttctttagcagaatttcaaaggggaaccaaaggtttatatttataaagtttataatcattccacaaagttcaagacatttggcagtgcttgggaaacttaaaaacagtaataaaaggttactgcgaggaattcaaagctgccttgtatggtaatgctgattcaagccaccacatactgcagcattagaagtttagctgtgatttgggggttggatcagaactatgcagctgtagagatatttaaatggcttacccattaacaacaaagaaagcactttggaaaatttacaattaatatctccgctttgaaaacacattaggagtatgcggggggagaaaatcatgcattcttagcctgatttactaagcatctatcagcctccttgactgttctcaagcaccaaccttgccttgcaattgtaaactgtgcacttttgccaacctggaatgcacactctgtccctgcccagctccagatcattctgcatctgtgcttgctcaaactctggtaacccaagctcttcatttgttggcagctggtaaaaggggtttccttatgagtcacagtgtggagggaggctgagtaatataccctatcctgtgctacaatctgtatggaatgtatttgaaataaaactaaacttagagtttagttcgacatctgatttcaaacacattcttgaaaaattggagtgcaatagggaaaaaatcaccatgtctctcctgctacggaaagcttactcccctacaactgtctccaaagggacagaaactaaattgcactcattcaggctctgaggtctctgatgaggaaagagtccacagcttggcttttttagatgatcctgctttcctgttatggcaatgaagtagctagtcccatggcgaaggaaagtgggaaaatgaagttgacaatgcacaagtgtcacaggctaaggcttttgtcaatgttgtttaacaaatgtaagcatctgacagatcacatctttaactgaaagaaggtaaagaatattacaagacaaagtgtgtttacaaaagtcatagatgatgcaagaacactgtttatcaccatatattcacctgtttacagtaagttcaggaaaatgggttttcttactattaaatgcagtaacatgcatttatctagaaaaataaattaagactatcaaggtctaaatataatttcaaaaaaactagacacactgtactaaccaaatattatatttttttctttttaaatatcattagatacccaaatatctgaaatgaaaaaaagattagtgacgacatactgaatgaacggaaaaactggaaaatttgtggctagaaatttagaattatactataagctagatgtatcaaactcacatattcttccaaattagagaattagttatgcttcagaaatataaaatacatatatgccagaaagtttgctctgtttactaagcaataaaataatcatatcttcttaattaatgaatcttataaagtaaatgaaatggaaatatgtctgttacctgctgcttttgactaatattcaaataaaataatcaagttatttccttcttataatttgtaacacacatttctaaatacaggtgagttgcatgagaaaaggggattgaaaaataaaaatttctatttggttacttgtaatttgggcttgatacaaaaattccttcagtaccaacaatctgatatggtcaccaggtatagccgatgttaacaaatccaccagattaaatcagtatgtagaaaatgtcaagtctgtgtttactcagttattcaatagtcaacactcagagcttaccaaataccgtgatatttacaaggcatataagaagctcaccaagtgaggacagaggcagacatgcaaacaagtaactgtcaaacacaaactgaatgtttgtgtcccctcaaaattcgtatgccaaaatcctcacccctaaggtgatggttattaaaaggtgggcctttgggaagtgattaggtcatggtggaggatgggggaaccctcatggatagcattagcgccctcataaaggaagtctgagagaaatcctttgccccttccaccctgtgaggctagagtgagaagatgactatgaggaagtgggccctcaccaggtagtgaatctgccagagccttgatcttggactttccagattctagaactaggagaaataaatttctgttgcctataagccactcagtttatggtattttattacagcagctctaacagactaggaccatcatatgcaatgtgataagccctcaatagagggacacaaaaagggagaagaagagagcagagaagacttgggggaggagggcaacctttgaactgggtcttaataagataataagtgacccaggaggagaagggtgggaattgggatagcaaagggcattccaaacatagtttcaccacagtcttgtagacagaaggcattatgcagtaagaagacatgagcatcagggagaagtaacagttctgaccgatgataagagggttattggcaggaagactaatggactttgggttggtgaagaagggaagtggggtatgagtatcactgtaaggctagctgaagagtatgactatactcagtgacattttcccaaaggtgttttataaaatattaactccatagaccacttatttattggattatttatggggactagcaaacaaatttttctttttcaagaaagtgtgggaaatgctcaattttttttctgtaaaacttctcacagt

SEQ ID NO: 49492 - DNA, 981 bp, Homo sapiens
tagaaaaaaaaggatatttgcaaagaaagtcatgcagccaaaagggacccattatggaaagtatttggtttatagtttaatgcctattcttcagtctacttatttgttaatttatttactctacttcgctcacaagcttcctctcaaaattgtaccactctcctcaggcaggtggataaagtacggacaaataactaggaaacagtccaagactttatattgcttgtcacagcagtacctcttgtaacaattttttcatgtgtgtataacaaaaatatgtaggccagtggtttcttcagacaaaagtagtcttcacattccagaaactcatggggaggttgttgaaagaacaagttgtgcacacagaaacacacctgaagaatcagccattccctggactggaactttagctctgttttgaaatagctgaggtgatgttgacctccctggaaaagacttagtcaaccccaacaaggtcattcaccttgggagcacaggtcagagtagatttggccaatcagttcatggccatattcgtattcaatgttgttggttcctcaggggatgggacttgggtttcaacacccaaggaaacagcaagtgaagacatcaatttaagaagaagaggaaaaaaatatgactactaggacaaattaaagacttggttgtgcacaaacagaatgccaggggttagcataacatggggtggtgaaagttgaccagaggtggaggccagagccctggacactagtttgcacctactgcaagtcacttttcatgtcagatcctcatttttctcatctgtaaagagaaaatattttatgaaacgatttatgaggtttcctctcatctaattctacaaatgctctgtgaatagcttctgactggctaaaaagtctcactccgtataacttaagagagtgtgactttgttgtggtatgtccttgatcctggagcattcaggaagcttgaaatattttc

SEQ ID NO: 49493 - DNA, 3353 bp, Homo sapiens
atttttctgactccaatatactcttgcatgtcatagaatcttgttttataatcagctattggaactttagtaggtctacaaacaaccatttcctttcctaactaaaatcagaaccaattgaaaaagagaagaggagtcagaccactgcctcacagacagtggattttaaaatgtggctttagatctgcagtcgtcactggcctccaacacgtaactcctgaaagagactgtcagagcagtgatgccaacgcagacccggggaatgacaggacttccccagacagtccccaccgggcagagtctgcccggtgagctcattccctctaaggaggagtgaatcaggacagctagagctgggactgacatgttgaagcaagtttctgcacacagaaataggaggccagggtaaaggaaaatcctccatgttgagatgtggaaagaaacctgatttttgtttgtctccctttataacattaattcccattcctttcagattagactttcatgtgttatttgtcgtttacataatgcttttgaatacaattatttaaacctttttctgtctgtctcacatttctcggatgagatattctcactttcctcttaagggtattttattgttcttgtgtaactactgtcaaaaaataaaaatttcaacaaatttagtttaatgatctaaactattagtgattcattaatcagacggtatcccatctatgaaacagaaaagcacgctagtaagctgaggagaggcagtgggctttataggcagaaaagcctgaagaaagcagaaacaggaacagaaagccgattggttgtttcaaagttactttctttaaaaggataaagcagagccaggggactttcttattatgtcagctcaggttgactgggccccttttaattgattgctgtgaatctgttttttgttgttgttgttttgtgtttttttgggggtttttttgtttgttttctaactggctgattttaaagtccagtttggggacctagcactagtgattccattctggtttggtctgttcttctgggcctagtgcaagagcttagtccaaaacaatagcctcccataaatttaacactactctcagtaaaaataaccattggtatttttatagcatggcttttaataatgcctatattctcatatttgcaaagtgcattttcctgagctgattttatcagtggctttacttccaaaataatttccttttaggacaatatcagaacggcacatacaagtgtccccaagtcatatttggaataagatcacttgggaacacaagtcaaagaaggtatgtaaccaactcacctcatctaatggaacaggtttccctgggcaagcataagattattgtacattgttcaaagatttcaagacagatagcgtagatttcaagaatgccaaacataaggcagagaggagtctactgggatattttcccgaattgtggcttgtatctctctctggtctattagaagacctcctgcatacccctaacaagagaaaaaatgacagatgaaagaaagagagagagagagactttcttgtaattaatctaataggcatttttaaaattgaacacttggacttcctccaactggcatctttaaaacacccattgattaacaggcaaatgggatgagtgaattcattataagaagtgaatcctttgcgtccaccagattcttctgccttcattgtcatcaaagttcttgggctcactcactggctatcatccctctcactcatctctaaaatggtttcaacatcccctctgtgcggtccagtttctcacctaatttgcattaggctgattcattcattcctcagcagggttacttgatgtgctttcttcccagtggcatccatgtgtaaagctgtctctcactggctcttatcacagtcagattcaaaatgctcatttcagaaagactgcaagtcttaatagaaggtatagaatttaacaacatgaacacagtgaaagtttaagaatggtttctggaatacctgaaatctattctgcttatattaaaatggctttcggcagagggtgaaaaaccctgccggcaatcagagcattctgtgacattcaagtctgcccagagtcagcagccaagcagcgtgctctctgatctacagatttgcattgttcactaaccttcctgtgccaaaaacactcagttgctccctttcaccagcctctaaggtcacaagacagacagttctttcttgattactcaaacaaatacacgtctgattcagagcggggaaaaaagagttgccaacagtcaaggcttagaaaggccagggctgcttgcacttagaagccagcctgatgaatcaccacatccatgactaattgtggggttcaagtgtgcccagttatagagcctgttttttagaaaggaaaatgctaaagaagacacatagaaatgtggaagaaaactagacacttttgtgtgactacacagatggcccgtggtcattaacaggcttgatacatacctttctctatatatatatagtttttttttttttttttgacagagtttcactcttattgcccaggctagagtgcaatggtgcaatctcagctcaccaaaacctccgcctcccgggttcaagcaattctcctgcctcagcctcctgagtagctgagattacaggcatgcgccaccatgcctgactaattttgtatttttagtagagatggggtttcttcatgttggtcaggctggtcttgaactcccaacctcaggtgatccgccagcctcggcctcccaaagtgctgggattagaggtataagccactgcacccagccctctctctatgttctttcaattaagccccagaaaatgtggaaatgccattgccctcaacctggctttcctcacaagagtaaacttcatgggcttaaaaaaaattccaaacattttttaaatctcataaggttaagaaagggcagtcgacttcaataaattatgatgctgatgatttttgttttaaaaaactggcaaaaacagacttttacatatatatgactatcatatatgacttttacatatacgtatataggtgaattacttatatacatataagtacataaagtatacagttacatgtatgttaaagtatgtatatacatatctaatgtaaatatacatatatatgcacatatgaacctatatcttcattgcatgcttatgtaatagatgcagtgtgtaatatgtgtaaatccatgttttatttgtatagataccaaggacatgataataaaaatgacatagttcttgtcctcaattgtatagtctgttgggaaagaaaacacac

SEQ ID NO: 49494 - DNA, 4193 bp, Homo sapiens
tgtaaagctcattgtctagtatattacattttttaattttttatttttaagtactatggatatataatagttgttcaaattttggggatgcatgtgatatgctgataccagcatacaacgtgtaatgattaaatcaaggtaattggggtactcctcacctccagcatttatcttttctttgtgttagaccaccaccacatgtgcagcatccctctgggtctcttccatgacaaccctgtgggaagccaggcaagtgagaatcaatgtaaacatgaagttcatgctgcttactgtgtcgtgataatgtccttgtctcccaatcaggagcctcatgtcttcttgccagcctctgtggaactgtggtaggctattaagttaattagcaagcagggtaaagtctcagatcctttgcattttcttttaaccagctctttctaggtgaaagacacatggatatcactgtgaaacttcatgctctgtatagctcaaaattttgcccaaggggaggttccagcaccatctgattagtacatattgctgagaaaaatactaaaggaagaaaatactaataataatatatttcactaaccctcttagatattaagaaatgaatgaaaaggtctatattattgactattaatcacttggaatctctgttgttaaactgagaagtaaactgcattgcctagaatattggccatatttttagtgatactaattaaattgtttgagatagatctgaagacagcagaagcttgtctgggcctagcttccttgaattcttcttccccgaattgctatgtcttggtaattttgaaatatgagttagaaaccatctacttacctaactgatatcattattccagttaatgtttgtcccaaggtatttctcaaagacttaagaaaaatgaaaattctattttttaaagggcctagctcttttaaaaggatatgtttcatggaattctatttatcaacaaacatgtagactacttcaacaagacttcaatgtgatttcatgtgtttattctcctgagtcagatgtgaacaatgtaatcctaaaagattttggggaatggtgacatatgctacttaattcacactcatgagcttaagagaagataagagaatgtcatgctcatgtgtgacaaagataaaactatattctaactaggattacaagaataaaacaccagaaacttgacaacttgacattttttcacagtgcttaaaaataaatgtaataaaactttggcagttaatgtcattttgatttgctttaattttattttcaaacctctattattgaaataataatttcattatttcaaaccttcataggaaaataatagaattgtgctgttgtgtcagtataagacatagtcaacattttctgcaatgaacaagtaatgttgagattaacaagatttctcttaataaatgttttatacaagcataagaaaaatggatagcacaaaaaatggatagcacaatagggtaacattagcactttaacaaataaatcccaacattctaatggcttaatacaattgaattttatttcttgctcatgcaacagtccagcacaggtgctcatggtctgctgctggggccacgatgcatctgtctcatgcagtcatatagagacccaagttgatagctgtgatgtgttctccaaaacatggctttagaggttgccatggaaatcaacatccaactgatggaagaggcaagagaaaggatgcaaaaaccacaccagctgtttaattacctgggtccagaagtaacaggtgccactacctctcacattctattagtggaaattagtcacatggcctctcctaactgctagtaagtatagaaaagttggttttggctgggcagccacaagacaaagctactaagaaagacatagcattaattttatgttgttagccatctctgctataagcgtaagtcaaatagaattttcatttttcttaagtctttgagaaaaacattgggacaaacattaactggaatattgatatccattaggtatgagcttgattgtttctaactcatatttcaaaattaccagatatagcaattcagggaagaagaaaaaggtttaaagactgtgacattcagactgctatattcaatacagaaaagatatttggtgatatttctatccctttttcttaaatgtacattcttctgggatttaataaagtcacattctgatttttaaaaatagtactattaatctcactatagagctctgaaaataatagaatcgtgctgttatattacagcagttattgattgtccattttttccaaagacactgagatctatggaagaaataagcctcattatttttcatttgtatttaatgtagatgcaacaaaagttatatacttctttattatatattttgtcatgcctattaaatgccagttatataagatgattcctgatccaaacacagtgctttatgttattgggattaaaagaattagttaaagctttaagttaaattacttttgaattcatttatggctaggtacacatgaaataaacactctacattgtctacagtggtaattgccaagaaaaagagtatattttagtaacaatttggctaagcgcctcaaattcaaagtaattccacatttaaatactaacactcaaacctgaaagttgtctttaaaagctttataaattgtttctggtgagggttttacgactatggggtgggtggaaaggggaggaaggaagagggactgcctcactataagctgataacaaggttgctaaaaattgctcttatcaatggtctttgcacttaacttgtttaaataaaagaaaaaacttcatgtgagtcatcgtattttgttcactacagcttggcaggtcaccttgttctagcagatagaaactgaatcaatatgggaagagccagaatttggacaaggttcaccaaacattcacactgatgccaggtgggccaagaaaaagggaatgtcctgcctctgaggtatctaaaaatttttatgtttaagtcaagggttttgtgttgtgaaggcagagctttgaatttctaatagaagaagaaaagcagaatatacccagaaactcctgattaaatttatggtcctctaataatattttaactttaaaggagtcagacggcattctagaaaagagccctttggtcaatgctttcctatctatagtttaatcaacccttccatatatgcacatattaagcaaattcaaatgacattaaaaataagttacatttcttattctaacccctgccattcatcccgctttccccccattgtcacacatatgcccacttccacttctgcacataggaagaaagggtgaataaatgtcagaatcaagtggaaagattaatcataggctgttttttacattgttttattctgagtcagaatacgctttacaggacataggcaagcacttgaaatataggactcagaacataagatgcttcgtaggacccaggcaagcacagcaattaaatggaattccacatttttaaggaaagctttttacttttcttcctctttttgtttctctttacttttgcagctcccttcaaaagtcctttctgtgagacacatttttaactaccatattgttcaattttaacaagagttcagggtgaggaaggttatagctgaggcatttacaaggatttcctgtttgtagtggctgctttttcctctttggtaatgtgtttttcacattttttaaaagctgcctgtatgcattaatattacttaatctccatcaccttaagaaaccatatggggcagggagaggaagaccggtgctggctctttccctttctcaatgacttgagacaccttaaccttgcttaactttttctagaaaatgaagatagtaacacctgctctgaattgtcacagaattattgtaaggctcaaataaaatctatgtatttaaggaatcaatatgtaataaagatcttgaagtgttagtagtcgattatatctgagatacattcgccaatatccaagggggacaaagagagctccataccccgggggaaatgtagtccactgacaatttgtccacacaattagaatacaaaatagcaccctatgcctcaacttttttacagtcaaagaaagcatgaggcataaatagtcctg

SEQ ID NO: 49495 - DNA, 3952 bp, Homo sapiens
aaaaactctttaacttagttgcataattacatacgtgactaggataatagtctatgaccatgattggtgaaaaggtagtgtattttagtattaactacaacttaaaaacattatgggtaagattaattaaatgctgtgaaatttgccataatatttaccatcagctggaaataaagagaacagagttgtaagtattatgcaatcattttaattcaggcccattcccataagtgatacagacctggaattgtagtgtgaagtcacaggcaggctggcacccagccaatacacatcagcacaccagcctaggactgtaccatgccagtgctccagactttgactttcatcccaactcacttccagggaccttttcaaagatattcagtagacagcctgtattttctgcatacgctatacccggccctcaagttacagacagcccaaactaaatgggatcttggaggttagttgacattttaccaatgagacaactaaggtaagataactgttaagattaaggggaatgctgaattttcatttttctaaaacaaacaaacaaaaaaagtttcttcttccagctaacatctcaatcacgtacccaaaatgacttttaaaaatttcacattctttctactaagatgccagcggcagcagcctactccatacgtcaggcagtgtttgtatatatttcagcgtatccaagcaaggcctttttaactttccatcctacagacgaagctgtactttcctgaatggcagccaggaaaaaacttggggatttggcaggaagactgtgggaagcctggtgttccaccaggctgagatctggagcggagctttctacaaagacagaggagcgaaacacctccctttgtttagctcttcataggagcacaaatggagcccccagattgtaatcaggccctattgtataaacttggggttttcaggccatacagcatttttggcagcaaatcccttattatttttcagctggaaaaccaattagcattctttttatatctgggtgttaatacttgggccttagagcaattttttggccactggcccacatggctgtagtctcttgggcaatgcctgacaaattgagataaaactgttacttcatgttttcctacaaagacaaaacaaaaactgtttcctgctcttattaattggatgaagtcaatttccacatttaacaaataagaaggtaagcataatcagggtgtcaacccacggctcttatctctccccaggctggttcctctgcaggaatgtgagggagcaagacttgtcaggttctgactaagctttccttttattggaaaaataaaaagtcctcctgggcaacagagacctctgtcaggtgaacaggctgcgaccaccacaaggtcaccctttggtctcagtggcatttttgcttcacaagtctgagcgatgtgatttacctgagggaaagaattgttaggagattccagccatgacaagtggattagtcataacagtcaagaggacactgcccagtttgagaggaataaacagagccaaacatttccctatctcgaaagcatagcaaagtcaagttcacgctccgggaatgtagtttacgattagagaaagccatatctgggctgctgtctcagaatatctaagcgagtagagaagaggaggaaaggagtttggaatggctgtgggaggtgcccatcctgttaagtgttcccctatggtaaacaacccctgccatggcaacacaacttcatgctgcaaatcagaggagcgcagccctccagcgagcagaccacaacttgggaaaatctccaggatgatgcaaaatatttcaaagggaagtggtaaaacaaacagaacggaaacacagccatacaactgcagtttgaagacaaaaatttgttaggtacaaaaaatagtttgggtgcaattacaggagcatttttgtgttgctggtactgattgtacatctctttgatagaaatggcctgaggggttgctgctccccttcaagactttctttgtaagtagtgggcggtggcatcatttaaaaaaaatccacttgaaagacttctttaaagaatttgtacagaacattttctttgcaagaaaatctattctgaagcaatattatttaacaacggggctgtgttttgagtcatatgaaaatttattatccaattttttcttattgttatatttgctatcaagagcagaaaatgatcatctataataatttagaggagcgactaaaaatgcccaatcacgcacaggaaaagaagcacttgacttgcatctctagagccagaaatcacccgattctctatgcagagggtggccatacaccgcagtttgccaggagagtctcagttgactctagttgtccagatttaattaccaacagtgcctctttcactgacagaagtgttctggtttggatagtaaataatttggtgaccctattgattcacagagcccaagaatcttctgtctgctcctactctccccggggacatcagtctaagactctaaaaatcagaacgtaaatgcaaaatgaaaaagagtcgggtggggaattgctgccacctggtaaagaagaaacctcgacagtttggcttcacctaaaggaagcatggaaggactgtgaacaaaattaaccctgtgtgtattgaggagaggagagtaccccccttcatagagaccccctgcggcagcctttaggaatacctgggagcttcccactggattagacaccaaagtctaaacaagtgctcctctgtcaaatcctggaaggcggacagtcatttcaaaagcagacatgcatgctgcctctttttgtgccttgcagcccagaaagtattgctcagatgttccaaatcagaaggtgttcagccacttcatactgccaccagccatgctgctgggctgcagctatttggatcagaatggaactctttgatctgttttatatctaagtttaactatggcctgggtccaaaaggtagactaattttggcaacttcccctgtacacttttatctagagataaaaggaacacttggaagcataaacagaaggtgcatttctgtaggcccaatagccagcacatcaaaacacaagaccatagaagctggtgctgaatattagttctgattttagaatgcagctctactctgctacctcactcactggcagccagtaggaccatttccttctattgtaaacatataaagataacatagcattacagaactcagaaaggaaagactcatttccagcacagtgacttccatttttacatgaatttttaaaattgaaaaccatgatttttaagttataaagtaattacactggctttgggtccaggagtccaaggctctcatacaaatatgtgggtgactggagacctgagcatcgatactcttccaacctccctgtctctcaagcggtctgtgctttaatcaggaatttatggcttggtaagcccagttaggagagtggaacataaatccccaggggcagccagcttggagctccagagaagagttatagcttgcccatgacctttgcactatgtgaatttgtcagtgaaggaccaaatgagagaaatgcaaggcctggcagggtttaatgtagcccattttaacttatagtcagagctactgtctattccagaataggacaatggacagtggagttctaaaaatagtaaggtgatttttctatagggacatgcagctgaatacacagaggcagtttagctgcatgcaaatcagataagctctgagtagcagtatttggtaccttattgccaaaccagtccattctataagaagtacaatcaccaaattggaaggagacatttctagtctttccttgctaggatctaaagagaccagtgagtttcttgaagggctcttgggacacataggacctgactgac

SEQ ID NO: 49496 - DNA, 1283 bp, Homo sapiens
aaaaaaaattgtaccaaactctctttaaaatattaccagagaaacagttaaaatgaaaagcactagcaattgaagcaccctgaatatcttattttcatgtatcatttttcatctatattgcttgaaagaaatacattaatcgtgggaattttgtttagatactctgattgactgtatcagaggaagacgacggaatgcacccttgatgtgcgaaaatgaggaactgatgagacaacacagatggaaatattcatcaggtagttggagatttggacctacagttctagagaaaggtgagctactaagacaggaaaaaaaaatgccaaaggagagaaaatataagaagttcaataatgaagtctcaaaaaaaagtttacttttggagtaagagaaaaaaaaaacaagtaattttactaaatgcatacctagatttttaaaaatcaaaggaatataatacacctagaagtagagaggtggatagggtctcagatgatgcaaaggtcaaaaagaaaaggaactctgagcaggaaatccaaattagcaagttggcaaagtttgacatttggagaaaataatttcagtagactaatgaaagcagaaaccagattgctagaagaactggattgcaaatgataagcaataaggcaatggaggaaatatgagtagataatactttcaaaaatgtaacgggggcaggaagagacagaagtttgatcaaggagaaagctggaagacagcttcttgctcctgaaaagggaaagtttaaacagtggaaattagacatttgcacagagaaggggaaggacaaggataagacaaaaaatctgctctttgttcttaaggaaacaaacaaacaaaaaatccgtaagaaaaaaataaaatgtaaaagaactgaaaattaagattagcactgctatttagcacactcatgtaggttagccacaccagtcagcatttaggaattccctgctgtctgaaacagccctggtttacacccatgattcaggcagtgggcctgtttgtttgcttttcctttggtgagagagtctgcgcatcctgtggcaagccaaaggtatccctgccctctcctgccctctcttccctccttgctccccttcctccccctccttttttttccctcaagctgagtttgtcttggaaattctaacctagcaaattaattttattaaaataagctaggcaaatatctctggcaatcaaggagggcttcgttctactagaagagcagccaattttttttttttttttttaaagagagaaaa

SEQ ID NO: 49497 - DNA, 602 bp, Homo sapiens
taaataattagctaattgttttggagatccttgactaagacatggaaatacctcttcagaattgctcaggtcttctgaggatgcatctgcatatgacactagggcgaggatgtgtgactcagaaattccactcactggaagtcaaggcatatttttttttttttctagctgggcttaaagccaatgtcaccataactttaatggactcagtgtagctgtgagttgtattatctcaggagtataatcataaagataagttgaaaacagcattccaggagattgccaacactctattataaagtaaataaatacagatggggcactacactgaaaatgtggcatgaagttgccatccacggcagaggtcaacatttggacctgataaatgaagccaagtcatagataagaaaaaaatatctaggaccaaaagaacaaatatttaagagtggagccctcagaaaaagaaagaatcatccataggaataaaagaaaaagaaaggtaaggagtcttctggcatagaaacggcagcatttaggatgaactgtcctcaagactatctccaatgctgttccttcttcatgactgaatcccctacacttgc

SEQ ID NO: 49498 - DNA, 2898 bp, Homo sapiens
aataatggacctactgtgatctcacaataatctactacattttacatattaatatgcttactcaataagtaattaccaagaatttctttaaattaaaaaaagaaaactgaattaacagaaacaggtactctacccagaggggagaagcgtaacactttagtgtagactaactcatttcaactattaggaaacccagggaatcccatccttttacaaaaatattttcatactccctttaaagagcagagtgggaaaatgttgaggaaatgaggccttcctgtttctgccacatgtgtttaattatccagctgcagctccaaaataagtaagatcggaaaattctttcagatctccgtgtagctgaatatcaaaggaaatttgggtgattctaaaactattgtacttctggttcgtgttggaattatgagagttctcctgtttttgtctctaaatatagagttcagtgatttgaacctatggaatctccctgcagtcttttttcttttatatgacgactatataataagtgaagagcattttgaagagggcaagttcactttttttagttgaggccaaaggccacagtaaaatctttgttcttttacttttatttctaactatgcctaatttttttagtattctctgaaattttattaaattctttttataaatatctttctggatcttttaaaactttttttcttcaacatctaagaaaaaacatgtcacaataatattgtgatgcttgcctttgctgggcaaaatatgtttttcagacgttaatctttattacaaatatagatctgaaggagctttaggcagtcagttcagtctaacctgtttccaaacaggtctgatgaagcctgagctggtgatgccaccaaggcagattttatgatagggagaaagtgcaatatttgaagggtagaaaacagcaagaaagtgattctgtgcgctgagcttcaggactctgaccactatgcttcctcacggatgggtcacttctttttttctttttttttttttttttgagacggagtctcgctctgtcgcccaggccggagtgcagtggcgcgatctcggctcactgcaagctccgcctccagggttcacgccattcccctgcctcagcctccggagtagctgggactacaggcggccgccatcatgcccagctattttttagcagagactggctttcaccgtgttagccaggatggtctctatctcctgacctcgcgatccgcccgcctcggccttccagagtgctgggattacaggcgtgagccatcgcacccggcccggatgggtcacttctttaggaaagaaaacctctactccactgttaaatgtaagagctcagaaaccattgaaatactttttatataatgttaaggagtacaagaaagtgtaatggtagaggaacagtcaatgcaaaaagtaaaatcaatacatgccaataaaaaatgtgaaaccttctaaaggaaagaatatatacatttgcccaagaaattcttctatttagaataaacaattttaaaacatggatatgcatatttagtatgagacattaacatgtaaattatctttaaatagttttttattatattgttaaaagagtaaagaatgtgtgttggggtcctaggtgtggaaagtgatgctgagccagaattaggaagatactctgttattgagaagctgggaatttgaaaggaagtttggtatctgagagaggtgaaggagggagggggcataaacatttttccacaaacactcccagatcaggaatttgtgtgactaaggcatgatgcataactgaaatctaaaaaggtgtgactaatgcctgtgtaattttttgtggtgcatttctgttcatgaaagtaaaacaatgccttttccaagttttagtatttggaaagcttcccatagggagtatcaaaaatacatattcttccactacctttactcttccacaattaattctggcttcactcctcacctattgtgggactgtgaaccagtgacctagcttctccatgttgcttttcccacgtgtaaaattgagatattaatagtacatatgacataaagttgttataagttgttataaatgaggtaaagattaaataaaatactaattgaatctaaaacataaagttgttataaagattaagtgagatagtgcaaataaagtgcttagcacagcgcctggaacatagtgaagtctgcaataagtggaagtcattcaaactattagggtctttaaaaccacagggatatttcacaggaacaaagcagtgatctatatagtatgtcatatgaatgggaaaaatagccaatgtgacaaaagaagatacacatcagtgtctgttgaattaaggctctggttggtgataattctatacctgtggatttccgaagaccagctgaacaaacacaattcccaataaatatacttgtctgccttacgaggcagcattctgtcgaactgtgctatccaatagagctttctctgatgatggaaatattctattactctctacccagtacagtagcctcttgccacatgtcataactgagtacttggaatatggttagtataactgagggactgaacttttattttaaatttagatagccatatgtggctgtggctgccattttggacagcacagctatagaaagatacaaataaacagcatacataagtcataagtcatatatttaaaacaacttctcttttcctcactctacattatgccaaagccaaaagacaagtttaagtaccttgcatcatccttttattatggcacactagaatactcagcgtaggtatatgctgaaggggcaaagagcaaggacattccagtagcatagcacatctagaacccagatctc

SEQ ID NO: 49499 - DNA, 2301 bp, Homo sapiens
ccccttaaatgatgttgaagaaatttccatattaatgattcataattacttgtcatgttccatactcactcatattgaaccccaaagttatgttatcatgtgctagtctttctaaatcatttgctaaacaaatcaaggaatcagagagtatggcatgtatgacaacacctcatgtcattatagatattttaagtattttaaatagctcttcatcctcattaaaactgggaacactgtggagacttctagatttatgcattatttttacttatataacacagcttttcttcatgtcctcttcttcactgcttcacaaaccaacctgacatgtttaaaaactttatattccaatgtacatttagggaatattttataaagagacacagaattgcccagcacttcactcaaatgttactcattagacttacctcttcccaggctcttcggactctcagcagctagttcctctcacagtctcaaacccccttctcctcccccaatcacctatcttccctctctctccactcatttctcccagcaaccactccatctctctgctggtctcttttttttcactcctttctgtatctctcagcatttctcatgcagaacaatttaattctcactccccttcaattttgaattcaagcagttggccctctgcttaatactgccttaagcattatccgaaaatgaagatttcatttcaaagttctcaaattaccaaaacttattctttttgtggataaaaggaattgtaagtaacatctctattgttttacccttattttaggatagtttcataatgcataattaatgctctaaaaatagttgtaaaagtttcctatgaaatgcatgattaaaatataagattgccttaatgaaaaaatagctcatgaatttttattatatttttaaagtttaacaacaaagaagatatgccaagcaaaaatataacaatttcttacatgtggaacatttttaggtataaaacagaaaaatataattttcatggaataactactagctacaaccatatgctaatattttctaaggtgatattgtaaccttaaaaagcccagagatttcaaattagccaaagatgtgtcagttgagttattcatttatagtaagctttcaggccttaggacatcacctatgaactaaaaatgctgagtcaaaagcctaccaagtgactcatcctttcttatcttctttttccacaataaccatctttagtcactaattccctaagtctagagggaaggaactgacccaaatgccttaaaaaagtagaactttcttcccaatggacgtttgaagaaagacccccaccagcactcgaaattgccaatcttcctaaattttgaaaaagtattaaatacatacatctgaataaaattattatactcacacaggaatatattttcctctctgcaggaaaaatagagaaaaccataaatattttatcagaatgtaattgttcagtgagccatcatttcaaccacttaggaaaaatggagagaagaaagtcacgttcaattattatttgacactaacaccacatacaaaacaaaaataagtttaagataacatctataagtataaatgctatataaatactagaaaatatttaatgtgtgtgtgtgtgtgtgtgagagagagagagagagagagagagagagagagagagagagacagagagaggagattgcttactatttggtataacttgcaaaaaaaaatattcatttggttgtagggcaaacctagattggaaggataagaatcattgcacttcacttcctccaggatccatctgtcatctttggcttagagacagataactgttttcacttaatttgttttccagttcatgtttctcagatgtttaacatggtattttggaaaaggcaaaactatggagacaggaaaaagatcaggggttgccaggagtttaagggaagggaaggatgaataggcagagcatagagattattagggcaatgaaattattctgtatgatactgtaatggtagatatgtgcccttatgcatctgtcaaaagccacaataagtaaaatctaatgtaaactatggattttagtgataatatattaatattggcttatcaactgaaacaaatgtacaactaatacaatgtctcaggaacagggaaaactgagatgagagggtaatataggaaatctctttactttcaactcatttttctacaaacctaaaactgatataaaaagaagtctattagttaaaattcagaaaaggagaaaaacattgataa

SEQ ID NO: 49500 - DNA, 4949 bp, Homo sapiens
cgtggtggtgcatgcctgtaatcccagctactcgggaggctgaggcaggagaatcgcttgaacccgggaggcagaggttgcgatgagccgagatcgtgccattgcactccagcctgggcaacaagagcgaaactctgccacacacacacaaacacacacacacacacacacacggtgtagtttaggaagtaaaaaaaaaaaaaaaaaaaaaatcagatctcccctcacacctcagatctgaaggcacaaactctagggccagggcgttcgcctacccaactccacatgcacttgcaggtcacctagcactcaggtacctagcactcaggtacattgtggctccttacctctcacgacagcagcaacaacgttgattggaagtttatcactgtgtgttacgggccatgggccatgtgtgttagaattttatgtgaaattaacatttaattctcacggacacccctgaaacagatgccacagcccccattttgccaacgaggcagctgaggttcccagaggctcaataccagcaccatgagccgcagcacgcaaggcaaacacagccggaggtgagcacatacctgcttcgcaccccatgcgcctaaccacaaggttccctccctccaggaaggccgttgtcttccctgggacgacttgccagctctgaggcatgacagtacgggcccccagaagggtgaccaggaggccctcctcgtcccagctgccggcgtcgccgcccactgcagggcccgggctgtgactcgtggggacggttccctgcgccccggcgggggaggtgggcggggaggggcggcggggcgccggggcggggctcgggacggccgggctgggagctggagcccacagcgggaagcggccgccgcccgggcctcgcagggctaggcgaggcgagggggggcggggccgggcgctacgggaaggggaggccgcgcggaccgggagccgcaccgcgccagccgggctgcagcggccgcgcaccaaggctgcgatggggctggagacggagaaggcggacgtacagctcttcatggacgacgactcctacagccaccacagcggcctcgagtacgccgaccccgagaagttcgcggactcggaccaggaccgggatccccaccggctcaactcgcatctcaaggtgaagcccggggcgggcgggcccaagtccccgctgaggccgggaggtgcgggcgcccctcagccccgccctaacccgtcccaccattgctaccgggtcggccccgcagggtctgagacccgcacccttccccggtcccacccgtcaccaggccgcccgcgtagccaggaattcttagccaggttcctgtgcgcccaccgtgaccctaagagaagaggcggacgccctggcacgtccttccctcctgcttcccccgcccaaagcgctcccggttcccggggcgtcaggttggctgacagttcggggtccctgcgtcctgtctcctcagctgggcttcgaggatgtgatcgcagagccggtgactacgcactcctttgacaaagtgtggatctgcagccatgccctctttgaaatcagcaaatacgtaatgtacaagttcctgacggtgttcctggccattcccctggccttcattgcgggaattctctttgccaccctcagctgtctgcacatctggtgagacggggcacaccgggtggaccggctttctgaaacatgggcatattctccgccacctgccccctactctcctcttatcccaggccggcgtcaggaggaggaacgcgcatcagttcccaagcagtaggaagaactggaaggccttgaaaggcaatgcgcttcctttagaataacagtttgggcttggagtttcaacaggagaaagaatgtcggtctttcctggggtgtgattttccttgcatacataaggctgggctgagtgtggaggcgggtacctggaagccacacttcttaccacaggctgctctcggggccctgttgtgactcgtacctgcggttctgggcaggactcttctttctttcattgccttttattcagtcactgcctgtgcttggggtaaaacaaaagtgatctctgagcagaatgccgctgacagtagaattggatgaggatgtcagacctggttaagcagtagtgtggaggggctgcttcaactttgcccctggcagatggcaaggatgggacccagaggaaagggaggtgtgtgcagttaaggcgagggtcccccccagtacaaacgaatgaaaactccagctgcgggataatgaatgagaaggcctccaaattactttttcactgatgaaacacaaatggaagtggcatataattaaaggggaaagaaatatggaagcccactgtatattgataggatattttgagtaactctattcatactcaaaatgtgtcctaaactgtagagaactttcttaagcatcttttaaattttttatggaaaatgtcatattttaccaataaatgttgttgtgttagaaaatatccactttaatctgagaggaagaatattcagatcatccccagtatcacaacagttgtcacgctagtgcttcaggttagtcctggtgaaaggtataacccaaggtacctccgtgtctttcttacaccttttatgatattgccacaccctgataaatactcggtgttcattgttagaagttaccaatttatcctttatttctctataccacctgaatcttaatttatttagtcagttagctagctagttagttcaacaaactttaaattgattgagtgcttagtttgtgctgggcactgggccaggatgaatgagagatagggtctgccttcagcttactcacagccttatcagggcagctggctaggtacagagatggacgctgagaaaacacagtcaactgacaaagagggaggaacagacaaggctttgaagagtgaaaggagtcgaaaaagactttgaaaggataaatgaaaattcaccaaatacgtaaaggatacacaaagaacaccaatttaattttatcactaaaggttgtaaacaattaaactatgttgaaggtgccaagattgccagggaaatgaaaatgttgccttagtacatgatcagcttcatgaaggtcaaatggatagttatattctgacatttgcacttgaattttttttaagatccctgagttggcacataagatttgggattcccaattaactaaaactaatcatctaacctctatgtcagttttctcactttcaaaactgtgaaaaactgagtgaccgcatagcatattgtgaaatgctgactatgaagctatttggaaatgtgaagtaccatatttatagtcaacaaagctaggcttcccaaagcttttgtgaaagaatttgaaaaaaaaaagtttctcatttactaagtggtggaaagatataagtaaaactacaattaaccaagcaatgcctctctccagctggctcttctgagaatgggaggtgtttttgtatagtgcttcaattggtgaatcatcaatgcacctttttttagccacataaaatgtattatttaatattatttaacttcagcttgtttttttaactatatttatgtggggcattaatatttaactgtaaaacatttgtcaccaggcagctgtgattgcaagtagaggagtaatttcaaacaagaatgcttaaaagttagctatgccttgataaaataggtttatcattaatagattgcattcccatgacatgataagaccagatcaaggacagaccttacagaattgcaaacccatttgggcaagctttttttgttttgttttctttttatatatattttttaaagcaggggcttgtgtattgtttttaccaaaaagttagtggtgaccaaagctaggaaaatatgcagtagtggaactttgaaccatgtcacaatattaaaacaggtcagattttagatcctttaaacaaacaatcaacaacaataaaacacagaagtctggtggtgttggatcctagaccagaagtacgggccattaggaatcagtgaattagttggattccatactacagtcagacagagatagctgctgtttgttaagcacaggttattggtcataagtggatcataaccaaagaaatgtggctggagcacccatatcccttatttttgctggaatgcaaagcaaacaaatgcccaactgatggaaatgcgatagtagcaatctcatttctagaagacagttttcatacagtaaattgctatgaatgcagtctgcatgactctacaattactacaacactaaataaaagtctctatcctatggccttattatccaaggatatatattatccaaggaatatataaccttacatatattaatatatataatatatatatattataagatttacttaagaagtattggccacattcagcctcaaccaaattttgggtcaatcagaactgcctggagtttcagaagctaaactatttgtgatgttgagaacccaacttaagtttgatgtcggaggatcattagattctctgctccaaaatgagggaacacaagtaaacaaaaataaaatccaaatgagttaacaacaccctataaactgaactcctcgaatgtgggtaactgctttgctgaacaagaagattcacttttgacatgtgctaaattcccttttaggacatggagatctaaggagtcacggagatagaaaatttgttagcctaaggaagaatagaaagtacattgtattctggctgggagcagtggctctcgcctgtaatcccagcactttgggaggccaagctgggcagatcacttgaggtcaggagttcaagaacagcctggccaacatggtgaaactctgtctctactaaaaatacaaaaattagccaagcatagtagcaagtgcccatgatcccagctactc

SEQ ID NO: 49501 - DNA, 2514 bp, Homo sapiens
aaaacacattgtctcatctgaatcccaggacaaattaaataacataatggagaaatcaaacaaataatagcttagtttttctagcttgcaactttatcattttagaatgtttgtttaagataacaagtgcttacagaatttttacagggttacatgttactttaagaaacttaaaaaaatagtaagtagagctgcaaagaaaaattaccacaatgaatgtaatttatcacaaatcaggatttggtacacttcttcccttcaagttgtgtatgtgtgcagggaagacaggggaagaagttgacagaggaggagtaaaggatacaggtatactagatagtcagtttatattttttaggaataaaaataagtttggcaactataatttaaccatcccaatttcttctccctattcaccccaaaatagcaaaatgagcaaaataaagcaccccttgctaaatttttaagacatttctgtgcccactctccagtttcttgctttggattgtacctgaaatgctgccattggaacttgacatcttgatacttttttaagtgaaacacacccttgagtggggtaacatttcaatctattagcagtcatctatttactttaggtgaacaagtgatctgagaaaggagtgttgaaaactacatatgggaaccaagcataagagctctgagcacaatatgagagcaccatacactgattaaaagagatgtcaccaaagagaaagctgtgacaaagggaaacaagaggctccaatcacatggccttcagccttcccagtttcgcttttggacaacccaaatccctagtgaaaggggcatggaatctgaacaggagtggaggaaattgaagtcagctaaagacttttctttttatccacaaaggaaagttgcttttgtcttactgaatgaataggaccctaggagtgggcatgagggctctgctggaaccatgtgccctaaagacaatgccgaagcgtgcaactgaaaatgaaaatgaaactgtaacttgtgaccatctatctgtgtcttctttcgccttgcctctctgtgctgttgactgttgcggcatgtctgcggcaaagaaagaccatgctgcagtcagagaaatcagaggacaccacttcaacaattaaccaaaaataggacagggacacctatctgcctgtgcttggacgtattaggtcattcagctcagctgtgtgactggagaaatcattttgcctttataggaaaaggtaggggtgtaggatgatgagagaaaggaagagacatgactcagagtgggaaacagcacgtagccaagggcaaatatttctctcagacataaatggatcaggaagaggtgagagcagcaggtcatctttggagcattcttttctttcctgcctcccagtcacttgtcaccgagcaccaaccagtaacaaaaggggagagaagggcagtatgcaggacctgtttctctaactgactggcacatcggttccagccaactgctgtctcagctaactagggcagtgaaacaaggagtcatttggaaagtttcagggatgcacactccacatcgcagggaggcaagtggtgaggaataaccaccacgcttattttactgaggaggaaactggttgaaattctttatgtattatatggctgggagacctctgatctcagtacaaacaataacaggagtatttagatttgtcgagcacttataatcttctgggcatttacttaatcagtacaataaccctacgatgggaatgttactgtcattcccatttttcagataatgaaactgatgctgtgaagttaaagaatttgccctagaccacagtcaggatgtgagccaagagagcctgacatcagagcccacactcctaatcactgtagagatgattttctatttcctgaaagaatgtgtccatggctgttcttatggcttccagccaaaatcttcttttttcattcatccacctttcctactctgagaagcacctttttttccattctcccatcaatggaggcagtttcatgtcctcagttgtaagagctgtcccaagctagcacctgggcttcatgtaacctcctcactcggcctccatctaatccctgaacccctcccccagccctgtatgccgcttttcagggcacaccctttctttctccttaggatctgagctctagaccttacactccagctaaagtcagaaaaatagttcccaaatgccattattctcattttttgtaaattttgtagcattttattccttcacacagacttccctaatatgtatcaaaagcccagtgatgatttttcttctcaatgctaaacatcctgacatgtaaaatattaataattacagcaataatttcagtttggactaaacatattgttttctagacagaatccttattttgtattttcttcattttgtcggaaatttcttgtcagtttgtacatccttttatgttatccaattttattgtcagttactttgtcttggagat

SEQ ID NO: 49502 - DNA, 3229 bp, Homo sapiens
agaaaagtcaaatctttcctcacagccaagcacattaaaaaaaaatcttctctggtaataaacttgaagctttaaataattctacaattataaacattttgtgtattttgcaaatatggcataacctgttggcataaaattccattgttccagaaaatatcggtaataaaattatagaaaagttaaagatcttcatttcttatttcgaagcgtttgggagacatttcagaaacggatgggaaatgttaaattctgcatgcctgcttaagtttccatccacaccgactagatgtaaacgagtgtcaccaaaagtacaccacaggcacccacacagattccttccataagggatccacaaagtttagatgtgaaatgtacctaaaggttcctagccgtctttcatccctccctctgtgaaacagggagacacatgtgttttaaggcagagatggaacttgggcgatgggcggggggtgggggaggtgggaagggacggcttaggacagggcaggattgtggattgtttctgccgccttggttgcccatactgggcatctctgcaggcgcgtcggctccctccacccctgctgagatgatgcactgcgaaaacattcgctctccccgggacgcctctcggtggttcagagcagggaaaatgttgcctcaggtttaaaataatctgcccaagcaccccagcgcgggagaaacgttctcactcgctctctgctcgctgcgggcgctccccgccctctgctgccagaaccttggggatgtgcctagacccggcgcagcacacgtccgggccaaccgcgagcagaacaaacctttggcgggcggccaggaggctccctcccagccaccgcccccctccagcgcctttttttccccccatacaatacaagatcttccttcctcagttcccttaaagcacagcccagggaaacctcctcacagttttcatccagccacgggccagcatgtctgggggcaaatacgtagactcggaggtaggcatccgtgggggggcgccggctcgggcgtgcggggagtgtccgcttctgctatctgcctctccaaatatcccgactgctgccctggccccagccctctctccacttcggagcactcctctggcgttggcaccgctgaggaatgggcctgggcggggaggtgaagagaagccaggaatgttttatgttttcctaatggagagggggcctagggagcccctgagctaggaggacacggaaaaggggattggggtcctgagattgggtctgttgggcccaggacgcgttttctggatgggtctaggatgctcccttgtcgcgggacccccgcggtccggccctgcctgctgggggttcgaagaggtggagtgcagggtggaggtgttatttacccgagtcctggggacagtccccgggactctccgccaggcgcccagaccggcaggtcccgcaggcggcgcgcggtgtgtttgcactttccaaagttcttgaaccatctcaagaactccttctgcatcttggcgtctggcaggggtgttccgagagaggtagacctcccctccccaaactgccaccatcacttccaacgccctccacgcgctggagctctgcccgggtgtggaaacctcgtcttccaacacgtagctgcccttcagccacccgcccgcagcctgggagtgccctgagggtgggtcgggggagctgcgcaggtgagactgagttctaggacatttagggggtctggtgcctggctccgccaaaaatggggactttcgggattgtgatcatcacggcggattgagcagggagagccgtggagggacaagagagggccgaggcagggtggggggcgcgggcaggtgcgagggggatgcggccaagaagcagcgataaagggaacattccacgggtcgggcggctgctgttggatcttagataaagctggaagggattaccggggcaggggtaatagggaccggggacgggaacgcgaaacaggtgaagcgctcagggcgagagcgactcggcttagggagtccgggagaagcctgcggctgccccctcgccgccgaggtcctgcgggtcctgcgggtcctgcgtgctgagccggggcgtgcgcgggcgggggccttcggaccgcgcggcggggcctgccctgacccctggcggcgggcgggggaggcaggcgcgccctgcagagtacagaggggtgtggtgtcctctgcgagatcctcttaaaaagctggctacgcgcaggcggtttctgtgcacggagccgtagctgtcggagcggttagttcgatttcgagctcgaggtttcccccgccgccaggctgacttctcatcgcttgtttttctttttgcatttttcctcccaccgccgttgccgccctccccgtcctggccgtccgccctccgccctctgcagggacatctctacaccgttcccatccgggaacagggcaacatctacaagcccaacaacaaggccatggcagacgagctgagcgagaagcaagtgtacgacgcgcacaccaaggagatcgacctggtcaaccgcgaccctaaacacctcaacgatgacgtggtcaaggtaagccaaggcgaccaacagggaagggctgggacagctctcctctggcagttagcccgtgcatccttctttagcattgccgtgtacgcacaccccaccccgccccctacacgcgcacacacacacacacacagagttttgtgggtttgatgtgtgggagctcccgcagtcggcagaaacgttacatctcccttcccccatctccccccaatagttagttcagctgaaattcagctaaagtgagttttgtagaagttcctataactacacttttatcctagcaaatgagcctattgacctcagcaacagacggcccatactccttgggacggtgagatggttcctatccattcccaggttgaaagtctagtgacaggtccccactgcacgtggcattaagacagtcagataattgtgtcaggtcttgtgctgaggatgagtcagaatacaagatgggcatgttcccccaactaaaacgatgggaagtgattttcttaaaaatactacagtggatggaaatgcctaggactaaagacaaagaaaatacgtacttattcatatacatatgaaagttactttaactagactaacaagtcacttgtgcacaactaagcaaatttacaaa

SEQ ID NO: 49503 - DNA, 563 bp, Homo sapiens
tcatgcatggtgcagatgtcaaacacaattacattttcttatttgcaatgactaaaaaaagaagctgagcccaagcagtgagaaagtaggagattgggaggacaagaagcaaaggaaaaaagtaacatgagcaccgttctccctgtcctgccacttgctccattatggactgggctgcgatatctcatatcccagctccacaactcccaacaaccatttatgtgcatggtgcttccatgtgtgatgacccaatcaggctcaggtgtggactgagtagttaaattataacccttgtctctgaagagtttagggcttagtggggaaacagacatgtaaacaaacctgagtgaggtcatgtaatcaaaggacaggccacagtcaaccacaaagaagagagttctcagcagtctccaaagccgaacatatgtttaccaggaacagggtcccagcagagggagcaacaggagcaaccagagccttgaggggtcgtggcctgttctgggcaccagcagtggatcaatgtggccagagccagggatactagcagaagccagagcagcagg

SEQ ID NO: 49504 - DNA, 3089 bp, Homo sapiens
acaaaacacatttcaccatttggagtaatgaaaggaaatatgagttatttctaaaaaatcaaagtaagtacatctagtattatgattgctaactgaagtcaaaaatattaatagtgattaggaaaaaatcacagcccaccaaagagatcacctaagttttagatttagatgataataaatgtaagagtttaattagttgtgaattagttcaggtgccctttaagctatttgtacttaagtgacgtgaatcatgcctgacttggctggctgcatttgtttctaactatgatttagcctgggcacacattaacttccttagcatagtgtgagcaccggcccagtgaatgtctgtctgtacaatcctggttaggttttttagaagaaagttgtttaaagaaaggtaaaaaagcatagagacttttgaaacctgttttgttttcatgtttctctaaaatttctctgggaacaaaggctgtttcttgccaattattggaagagaagggaagtatcctctgttcaccttaccgagtttgcctcttcagggcatgtttttgcacagagaaatctcttactgtagcctcatgccttaggagagaggtcaacagactttttctttaaagggccagatggttaatattttagactttgtggaccaagaagcaaaatcaaggatagtacatagacacttacataaaaagaaagaaaatatattttcacaacatttttattggtaaaattcaaaatatagtgattataacaattcggtacaattcttttggaatacaggtctactaatgaaaagaatgaaattcacttaatcaggagtttaaagttacagttctaactgggcccagtggttcacgcctgtagccccagcactttgcagggccaagctgggtggatggcttgagcccaggagtttgagaccagcctgagaaacatgacaaaaccttatctctataaaaaatagaaaaattagctgggtgtgggagcacacacctacagtcccagctattctggaggctgagttgggaggatcacctgagcaccaagaggtcaaggctacagtgagccatgatcacaccatggcaacagcctgggtgacagagtgaaaccctgtctcaaaaaaaaaaaaagttagagttccctatcatcaaataaattgcaaatatttatttgtaaaaattattcttagctcatgggccatacaaaataagatggccagatttgacctgaagatcatagtttgataactaagagacttcataaccgtgccatgaaagggttaaaaggcagacgaaagcaaagaccagcaacagtagaaactgtaacttacatttttttctgaaatatatttatgtgcttctttattgcacacttcattttacttgaccttctctttgattggccaaaggtatccatttgccttgggagtagattagaattcttaagcagaaatgaaaagggggagaaacaatcaatgtttagtgactgactactaaaataaaaatgttcagttcctagtaagaccagagtactgaagtcaagcatagctgagagagttaaactttttaaaaaattatttaaatttctctctatatctaaagagccagatttgactggctgctaccttcggtttcactcatatgaagagacaggtttcactgactgctaccttcagtttcacttagccaaagtgaattcaaactgtctccacaggagagaagaaacactgtgtgtcattgggcattatgtaagtcacctaaacctcggactctttatctgtaaaatgggaataatgattcctacttcctatggttatgtgattaaaagacctaatgaatatagagcactttccacagtatatgccaacagtactcagtaaaccttagtgctctgactgtagtagataaacagatcaaacagttcatctttatgtatgatgtaaagaatatccattacatctgaggtaatccacaaaatgagtttttccttaaaggcgtctactgtctaatcattcagggtccattttccatgcattgcttatgcaaagcttattatcctcttccttcacaaggtcctcttttacctgactccatgctcactgcctcaccgttaccacctctcctagacctgagcttgctctgccacaaagcaggtagtgtccactccgcccacttctctatactcttggactcagcactaccgcttctatgggctcttccaaggttcagaagccaggacgccagtgagtcagttgccaagtcagagccacaggctcagctgctgtgacgcgcccctccccttgcgtcattaaacagtcagaagactacagcacgtgtccttagggaaaagaaggctctcttgaaccggtgcaagcctctcccttttccaccagtcatttcagagtctcaagcttaaaagtgtattctccagcaaagaaaagctgtcccatacttagagctctcctcccagtgaagatccaaaacagactatgagcttattaatggtcattctcatagaattgtaacattctagagctgaacaaggtttaaaggtagtctaatacagccctttcattttgtaaaagaagaaaccggggcccagagaagctttggcttgtctgaggtcacagagccagatgagacctgattcttagtcctgtatctttccattagatcctactattttctgtttgatctggtggtaaaaagacagggttggattacatcatgcatgccctttaaataatacaatccaagtaactgccatattatagggactattgacaaaagaagggaacaccctcctccactgagatctgcatatattgcaataagcaaatgtcttacatttaacttgattatctgaaaattgaatttacataactaggaacacatgtgatattatgatgggactaatgcacaccaaaaaggatgacttttatctacaaaatatactcttagtatcctgactagggacaatgaaaaattcaagatgttcaattctcacccatctgcggtgtgtgtgtgtgtgtgtgtgtgtgtgtatatatatatgtgtgtgtgtgtgtgtgtgtgtgtgtgtgt

SEQ ID NO: 49505 - DNA, 1808 bp, Homo sapiens
gttacatatcatattcagataatctagggtagtaccctataatcagacagattactatttctaaaatgaaatctataaggggttacactggctggtgtaggtgaagtctataaatatcttcacataagttcacactagatttgattttgcaccactggaatttgtcacaaatttatgaaaaagtttaattttcagagctttttggatgtaggaatggtagataaagagattatgcttatgtgctcacacacatacaaacacttgcacatacacaacaaataactatacataagcggtgcaagcttggcagtttttcttaatatctgtttgacctgcaacaaatcatatgaatctgggccattttcacacacattaaaaataggagtaaatgtggaattaaccaaagataaactgtgactaaatgttgcaaacactcttcgaagcactctccatgaatgagcatagccgggaggttagcagacctgaacgccttcacagctctgctgttgacattccatgtgaccccagaaaagtcacttggtttccctggtcctcagatttctctcctgtaaaatgaggccgttggaagtgatggtctctaaggcccttttcagttccacaagctgtgcttataaagtttttcattttattcatgtctataggtttaatttttaaaaacaatacccaataataaggtttcaaattatctcttggtctaatgtgcctgtttttacacagtgtcaatcatccttgagtcactgaatcacaagagttttaggccagtcatttccttcaccgtttctaaatactgtaccctgttttacacacaagcaacgtgaacaacgaagcgtgatggtaaaaacaggacgctccggctcccttcagctggactttgcaaacctctttgtgttattttacacgccttgatgtcctaaaaataagaacagaaagtgccgcaagattatttctcaactctggaaatatttgtgagtaattttgccaaactttattagtcagaaatgctaattgaaaactccagatggcagcatcacagtcaccttgctttgctaattttctttgaaatcttgccctcctaagaaaacacattgaaaagaaatctctttgaaacattatcttcggcatggaaattagcttctcaaggattttaaagagcaaactcttacttgcggcctctttgttccattcttttttgtaaagtcactgtttcaatttataaaaaatgaattttgggatagcccaatggtaggatataataagttgagattttatttttaaaaaaatacttatcagttttgaatcttactaaatttttggaactcagggggcaattactgcattttctaatgtcctcccagagccaactcaagttcaaagtttccaatgaccttgaataggattttgtgttcatgtcagctgttgggatatgaagaataaaataagaatctaggtcagtgttgcttatgctgatagcatagcttgtgtatttctccatgatttatatttttgctaatgtatactttcccctttaaatgcaaaatatgtctctaatattgcacatgtgtatgtgcacactcaacaacttccctaacctgtcctcaaaactggtaacttatgtcactacaattacttagttaactgatcaaactgctaaacagcctaaatatcctaatatattttatttaagagtttaagaccaggtcctccaaatctcaccttgattttctaccttctagtatgtatacctcctgcccttccctggttgcctccatgagtttagaatggaaggt

SEQ ID NO: 49506 - DNA, 1210 bp, Homo sapiens
agggagatgaggggagcagaagccactgagaaggcagaaggctctgtgtagtgatccctcatcccctaccacaaccctccgtcttcaataaagtttttgctaaacttggcattgttctgggtatttcaatgtgggtattgaaagcaaataagtgccaatcagatggcagcaaagtgagatggtgacagatgtgaggaatgcagaaacaaagaagagaaaggcaggtaattgtcagccatctgggattcgtgagaactggagagaaaaaagcactactgattaagggcaggtccacagactttcactaccagatgaacaatggttgagtctgacatatcttataagggccaagaaacatgacagcatcagcatgacacaccatccctcctctgaaggtggatgagatactcattgtgaaagaggcagccaattattacctagcatcattttccccttctcgtttagtgatagaaccttcccatttttagctcggcacatggggtcccaactagagacatttcctaataaaggcatttcctaataggtgattatggcctgttaacaagtggtcaatgagatgtaggcaaaaagaatgtagacaagttctggatcacgttcttatgggaagctacttgatcattgcttatttctctattcccaaactctagaatgagaacatggtgctgtgagccagctttcaccgtgtggataaggacataatcaagtctaggcaatggcctagcaatgacatagaaggaatctgggtttcctggtgaactacagctgcctagctactgactcatccactcacctcaactcaccctgaccacgtcccaactcagacttttacatgagagaaaaaggaactctgtgttatgtttaagccactgttatgtggtctccattaaagcagccagatccatatcatttcctcagaatatatgtttcatttactgacacaactctaccccttgggtgcagctgttaaaaccatgtagtataaaatattttcaaaacttagtcaaaatcatacttcgtgggttataacaatggtccatcactgatacactgcaagcacttcattggtaaactactctatttttatatatttttggtataaccatgtgtagtactgtctgttagataaaatgttgagctaaatggaccacgttgcccattatagagcaggactcaatatgctacaggtaga

SEQ ID NO: 49507 - DNA, 4809 bp, Homo sapiens
aactttttaaattcattaatttattcatcttttattgaaagctgttactgaacccaaaatctgtaattgatctgtccataaataggcccagtgccttattaccagtaaattagtgttttttaatgagctatagtcattgataaattatgccatgccgtatcaggaaatctccagtcaggccgcgttgtttatttagcctgctgaggcctcttggtatggtgtgaaggacacctgactgggctgaaagctaagttctaactttgcccctcttactaaccagctatgtgactctcctgggaacttttagggactcagtttctttacctgcaaaatggttcaatgcaagactttagtaacgtaatgggaactttccttttccataaaactggggaatcaagaggtaatctcttttgaggactgaaatcactcttatgtaacctctggttacattatcatttccaagtgcctggcacttgggaaatgataactattcttactacatttttctatgtttcattctgtagtaaataagaactgaacctgcatagtaactgttattttaacccatgactttcaataacgaagatatctatgtctcattatctattgccatgattgaacaagttggtatgagagccggaacgaactcaagttctaaccggcaatgcccgttccttagatcctattacctttgagtgttcatttactcttgtaggtgccaatttttatagcgaaatacaaagttatcccaacacaattactcctaatagagttcaccgaggccccaaaagctcttttttaaaaatcatcataagatttcaacattcaagaattaaacttttgttctgttgtgcttattcatcgctatttgcccagttatttaatcagcctgcttccggctatggaaaaaaaaaaaaagaaaaaaagaaatggaagtctcctcagggttaaactcctctgttgttcttccttgcagaaatttgagttattatagtagaggataatcgttgcataatgaaatcattgggacaattcgtccatccacttctacctccgcctctaacaatgaactccttgtttctgcggtgcccaaatctctctaaacccgggtgggcgcggggcggttagcggagacgtgggagaggccgagagcaaagctcgcgcccttcccggggtcagcgagcggggtgccaggagggtgcgcgccctgcatctgagcccggggtgacactcgcctcccaagcgccaggagggggagactcggtcccgcttatctccggctgtgctaacttcagactgcctgagctgggggaggagagcgcgcagccagggcgagaaaacttctccacctagaaagtttcaccttgtcgtgggcggggcagaggcgggaggaaacgcgacccccgcggggccaggcgcggcgcggacggcaggaagggcgggggccgatttccctctgggtggtgccagtccccacctcagcggtcctcggaacccgcggactaggggacggacagcacgcgaggcagacagacacgtgctggggcgggcaggcgagcgcctcagtctggtcgcctggcggtgcctccggccccaacgcgcccgggccgccgcgggccgcgcgcgccgatgcccggctgagtcactggcagggcagcgcgcgtgtgggaaggggcggagggagtgcggccggcgggcgggcggggcgctgggctcagcccggccgcaggtgacccggaggccctcgccgcccgcggcgccccgagcgctttgtgagcagatgcggagccgagtggagggcgcgagccagatgcggggcgacagctgacttgctgagaggaggcggggaggcgcggagcgcgcgtgtggtccttgcgccgctgacttctccactggttcctgggcaccgaaaggtaaaattgcagcccctttcagatccagtacccaatccctcgcctcaggggttctgctttctttgttcccctaagagacctgactgctgttccagggggcaaaaccacgtaggtgggctagagtttaggggcttcggaaactgaagagacgtggccacggcgaggacgaaactagaatggggcttgtctttttagggggttgcttctgatggccacctgtatgacttaggagggagaggggcgctgggacagtgggtgatgtgtgactgttacggcccagcaagttttaaagctgggatctgactcagcccttacaaaagggatccggtcatcctcgtcccaccgtgatgcagctggcaaggtttgagccgagctgtttccttgttcccagccttgctttatctgtgttatgttggggtccttccaaggggcaggtgtttctgtgaaagtctgaattcatttctggcaatcacgcggggcttgtgatccatcaattttccatcgtaccttatctctttctggggcttgtggtggacatctatcttattaggtgaaatagattataaccagaggctgagcgatgtggccagtcgtagtgctgacccgataattaaagcaccagtgaaagtactttccctgactattgtcaatgcagaatttactccgaagtacggtttcccattcatatctttcatgttttaaaagagccatttgctaatttggcagttggagagggctccaatggctcacgcatgaatagttgcccagtgtattttaccttatcacagttttatgttcaaaggagccctcgggcagaatgaaatattgtcaactctcttaggcaaaataatcaagatactttaattgctatgttaagatggtccatgaatgtgagaggattgtaagaactgacgttggaggcaatatagactatctggaccctctcttgaattttaagaagactgttcacattctgtagctttgggtgggggtttattctgtcgctttcatcagccagacacatgcacattgccatgcaaatggattcagaaaaacattatattcccttacagctaaactattatagctgactaatgaattttttctgcatgaagatgatctgaaaatgatgtacatcatgtttctctgtgctacagggacataaattgcatttttatgtaaacagtgtaagtggtgcttggattatttacaggtacatagctttccttccttgatctaagctaattgagctttgttttgaacgtgtaaacttccataatggaacataagtgaggtactttggttcctatcatttgcaagtctgtggtgtattcaatgttcattctttttgaactgctgaataacagagggaaaatttacatcattcataagaaattttggtagtacaaaaatgtgtctgatagcctataaaatgtactgctgttttaaaaattctattccgttttcaaacttaatggtgtataagctatagttattaacttaaatatattttgcttttaacatgatggaatttgtggcatatagaagacagtctgccgactactgctttttcaaaattgctttgttcttgatacatggcagtaggggtttacattagatgtatactacatgctttcaaaattagttgatggagtttatcttcatgataaaaaatgtaccagattaatcatagccagtcaatacgaaagctcataactaatattttcactacttttaaacctataatagagaaaaatgaccctttgctaagcaggagaaatacccatattttataaattccttttaagactatgtaagtatatgccttgcattaatcttgaaatctttaaaaaaaaattgtcttaatgagggctagactaagaaatacatttcaaaaatcaatttccttagctgtttttaaaatagtgtttgaagtagcattagtcatattatccttctgcagatctacataatagtctcaaattaactttttctcaaatgtggtcatctcaaaacaacgtgaataactcagaggagctaacatcctctaactggcttattttctccaagtggctgcaccaaagacatggcaacacccccatggtgagcacagttcctcacacattcagattacctcccatttctctgtcctcttcctcctcaaccctttcccttggtttggtcagagctgctttcaaggccttccgtgcccccatttctccagcccagtttgctcgtttcttctttaggcattaggcttagtgattctcgccagagccatctacgctttcttttccgtggtctaaatccctaagatttccttggtctgctgtgtttattcataggatactcaatttcctcattgtgccctcttaaggggagaaaatgtatgtagaaactcaagtgtccggaagtgagccttcttttcctggctggtgtatgctgaaactagtgtttttgacaccaagcccttagggcagagtttcttcatgggttttgctcagtgcaaaataaatagtcacttctcagtaataaatgatagatacactgactaatgttagttcagaatcactttgatgatgtgttctcaactgacactgagttgctgctagatccacatttgcctgaccaaaaatagctaggacctataggtagagtatcatatgtgctaggtactacagcattttctttaaaagaaagaaatggaatctgcccttgagaagtttatgatctagatacacagacaaatatcacatattaaatgaacacaaattcataattattaagaggacatcacatgagaaacgctttcaaaatcatcctatttgctatgaaataatagaatttttttttaaaaatcaaagtttggaacttaaaaaccttaacattttcaagc

SEQ ID NO: 49508 - DNA, 453 bp, Homo sapiens
atgcacagaaaaagggcaggtcgcttgtatgtataagcaagagcagcaagtccaaacaggcttagaaaacgtaatgctataatcacgagttgtcataatataggagaggggagagaggaatactcagcaataagagtggtgttgggtattgctccaaattacatggatgacacatctttgaactctattgtgtcgggggaaaacaccttcttgctgtagttagatttcctgtttgtgaatgtgtattttctggtaaccagacttcctatatgaatttgacatagctttaagtgcatttcaaatgacatgattaaagaatggctgctttggagacagcagctccttctctcttaaagaaataaactatcatgctaaaatataggcattgagatctttcttgataccatattgtgaatttctaatggctcatcacatttttatcctcagaaaacc

SEQ ID NO: 49509 - DNA, 2396 bp, Homo sapiens
cccaggtgcccgtgtgtgagtccactccacccaaagtgtctgtcccctacctcagctgcacctgagcagctccaacttatcctgcaagacacagctcaagtagtatcccctctgaaatactccttggccccgctttctgtctgcatagttagctcttctcccccgtgctgctccactgacatgcgcacacctttacagcacagcctgggcgtgttgcaggtggaaggtggagattcccagtcaaggggcaacacctgtatggttggaaaagttgtttgttttaatttcttgccctctcttctctcttctatttctttcctctcccataaatacacataccgcctatatacacacaacctgccctgaattgttttccttgaattgatgagttacgtaaatgcaatcctaagcacagttgttttcaggttgtcctaaccttttgctttattgatttttcaaggatccagagtgtttactgagtttcagaaattggattctgtacttatttttctgtactatcctagttttatgagaatctatttgctcagcattctctattcttttaaaagtgtttaagatttttgtaaacagttttgtttggttctttattttctggtgacatattgatctcaacataatgctattcatatacttttaattcttcttccaacactgttaggattgcattatgttcacccaaggaatccacatctgtacaaaatgtggccaggtttggctattccttcacattcacagtattctcatgatttctaacaattcttgtctactttgcctaaataagaaaatgtcatatactgacaattttgatcgtgaaaaagagaccttagttcataccagtgtcagagtctacttgcaaacattgatttccaagaaaatttctcaggtgtgagcaaataagcaaaataaattcagacctaagagaaaatagcactacaaggaacgcccagctcattcaaacgctctgcattttgagactagagggggcttggcctttggcaccctcacacctctcccctttgtctctctgtccctgggtgctgatttctctttctttgtgtgacagccactgtgaaaagaatggggttcactcaccacctgcattcctccacagccatttgatatctgctttcgataacagcagaggaaactgatcagtcatataaatccaatcctgagcatagttcctcgtttggaattgtaccatgctttatgccgaggacattttcaaacacggagggaggggatgtctgattcattcgtgagtaatgtaccagcttcctctccaacttgtctcccttcagtggttcacattctgactattcagtcggtttatcctttccaaacccagtatttgaatgcaactggcaaaggttgattgcctctttttttttttaatatatagacttggaaagatgtttctcaaatgtgatttgcggatttatgttattcagtcttcctggattaattgaacaaaaactggtaacactgctacacagtctgaatcacaaaattatgtccatccatttggctgaaaaatacgaaaacaaatacttgtataagttttcatgcattttagcactttctttacattggggaagttcaaccttcacactttcaagggcaatgaaacatttttgtctgacctacaatttattaatgggacaaaagcccatctgtcaatcagggctctgagagttcaatgtattttctgaacaatattttttacattatgtacaatggtaaaaacaaatgtccatttattcttctttccaagaagttgagtactttcaaccattcttaaaaggacaaagatgtttgctgacagaatatgaatttataaaggataatcttgaggatataatggcattctattctttttatctttactcttgccatatcagagttggataatagtctcaatcatatgttacaactagaaaatgcacaattggctttttcttatgctaacaggcagccattttcaactttttaaatgattataggactaagaggggatgcaaaaacagataagaatctgaataaaagcactatctgtcaaagaaacaacatttgtgtaataatcaagaaaccgtttagagcaccccctggaaacattaattataacacatgcaaatcattcctgtacaaagcttaacttgtttatctcctatagccacctgtatttgaattttttaataagctcatttattataaataaagcatgtaaatcaatctgggaataccttttctgtttcagaaatttcatgtaaatgacaggctgccacatacagtacaactatagaggggaaaaagtttctttactccctttcatatagttataccttcatatgacacttaaaaccacctgccaggaa

SEQ ID NO: 49510 - DNA, 1995 bp, Homo sapiens
gcattattttattaaaagaaatttaaaattagtttctttccagaattttgtaacgccccctgagatcactgggcacacccttggggtgttagaaaacatgttacaaaatgaacctttaattccttttgctttttcccttcctcttgctgactgctctttaaaccattacatggctcattcacaagtctctctaccccaggaaagatgaaaaagcaaaggcatgatgtttttataacctaatagcaagagaacacagtgctgaagctgtcaccaaaactgtgggtaggttttacccgtgggttatattaattcatgatatgattgataatatctctcacttgtgtggggaatgaagcgttaactatgccgcatgcattttaaattaatttgacattattcttaatgtcctttcaagcaggtggcattataacctgtgtcttatttaggtagttgatttctacacggagattcatctgataaaactgatatcgcaaacgggaaggagtttgtacaaaatgaaataaatcttaaagttgatttttgtaaagcccaaatgttaattaaaatctttgaatccacaactctgatacatgatattttcattgacataaacatgattagcgatttctggaagcatgtgggatgctgcattgataaggatatgaacctccttgagtaataatgtatatttttactccgaatactgtttcacattttgggtgttacatccttacttcagacttctgccttatcagtggccatcccaccctatgttcttatctcctcagtctaaaaagaaaaatggggacccatcagaatttggatagaagaccctccaggaatttctgccactgcttattcatgggttggcacagacactgattcagtgggcacacagagttcagaatgattcagagcccagatatgtgccctaagtcacatctccagcgtccagggaggactgtaaagtgctcgttatcaggaaaatgaaaccaagggctcagctactcctgaagtcattaaaactccttcccttgatttttttttttttttttttaaatagtatatgtggtaaccgaatctaggatcctggatacattccagtctgctaattacatatttttttctaactaaaatgttccaggcaggttcatttgcatgtgaattacttgctgagccatgttgacttcctattctaaaagcctcactctgccttgggaagcagtttactgcacttcaccctagacctagtctaatgttggagcagacaaagtgtagctacccatatatacttcaaaaatattttccagtctccccacaagaggaaagaaaaatgtctagcaattgcatgctaatttagaccaaagctttgttttaaccattcttggtgatcacaaatggggaaaaatgatttatgaacagtataactataaaacaaacaaaaaaaaaccattgtgaattcagagtgaagtctgacttcatttgtcttatttgggtaaatcagcaaaatgttcatcagtcagaggacattaaaatggtagatgatacttcaaatcgtgccctagataaaaggagagaattaaggttagttttgatttgtaaaccattctcttcgaaggctgattttataaaaattaagtttgctgagtcatcatctcaaaatatatagttattcatgattagttaaaatttgtgtctgtgtatcaaagaagtaaatttgtatgatattaaattttctaacaatgttttaaattttaaaatgtccgattaacacttgcatctagcaaccagtctactaactaaactataggtgaagtcatgctcaggaaatggggaaaatgcacagattaaattggtctgttagctctgagtgaatcaatagtatttagtgctaatgcactaaggagattacaagcactaatgcagtagcagtcaatagcgaaaactaatatctctaaaaaatatcttgacaataaaatgtgcaatattttccat

SEQ ID NO: 49511 - DNA, 1210 bp, Homo sapiens
agcataattgcctcatgcctgcctcctgtctccatttgtttttagtagattttgcacagaaaaacatgttgacctcggtactgaaattttggagttcactatttgcggcacagttacagatcacagaaaaaaatgtacaacaggacttcaccacacctaacaaaagaaagttttcttattaaaaaaaaaaccctccaaattattgtgagatctagggtaaccatggtgttaactatatgctatttgatatcttataaccctggtgataagataacaatccaattgaatgcagatgaactcatgaaaaaagaaggattatgaaatatttggaaagtaaacacctaaattttcataagtaaatattaattatttgtgtgatctttagatatgaaagcttcccctgcatgcacttggctcttggaaccagctgttaaaactcccagcaccttagttaataccctgtatgctggtggttcaagaactagttaagaaacagtcacattttctattttcactgccaatgtataataaaatctctgttccagtgaatggctggccaattattttaataacgatgttggcatggcttcattttacctttcttgctattagcaaagctttccttttgtactctgaagtacgggtaaatcacaaattaaactgagctgttgtttgtttaatgctgtgtttcctgctaaccttattcttgtctatcaacctgaacgtagttccccagtggctcagaaaaccctcaattgggattaagtaatagtttacacaaccttgctcagtcattaacctgtgttgactttctcattcttgtgttccagcctcatttaagagtttcttaagcactctatccagttgctggtttggtgacaactaacaatacctatttaatcaagaaatttaatatttccaaggaatcatttatcgtatctcagacttcttcattaacataatctaattcagtcttgtattccttcttcaaaataaagcctggtttcattcatagtaaatatgaagcttaaaaatttttacttcttttcttctctatacacacaaagcagaaagagaaaattgtatattatcattccagacaggtttttttttttgtttagtgtattgacattgatgccaataagataaaactagacctcagtggctcctcctcaactccacccaatctatttgtctccaaagtgctgtt

SEQ ID NO: 49512 - DNA, 1112 bp, Homo sapiens
aaagaaagaaagaaagaaagaagatatgaacaataaaggaaagactcaaagatggttcagatctcaaacttacggagagggtagctattgatgcattgagaaataggaagctggaagaggaaatcagtttggagagaaaagtgatggctttgaacatcatcaatggcgtattcaaacatagcttgaaggcatttgcagagacagggctggtcctcggaagagatggcaacggggtgtgtagagttaggtcatcaccacgaggctgtgagggcagagccacagtagcttccatcaccttgtgaatcaccagtgctcagcccgtggctggctggccggatgcctgcttatgctgtgctcccggctgtctggctgcacacacaaccgcagagcatgccctctctggctagggcagaaagaaattgaagcctcttaaattttgccccccccagctttgctcccttgctaggacttccaggccatgactattgaagccatagggcaggattacttcctcaagaggcgttagtggaaacagatgtgttgaggaagcctctttcttttcaactgtgccctgagcacatcagatggagtcctcttcatagcacaaaacaacttggtcagattcttagggtttgaccacagcaccctaacagcctggccgtgcattaaggaccccaaagagaaggatctgctttgccagagagctgactcttctgtattttacagacaattctgaattcaatgtcaacatcttagacatctcagtacagacagtaaagagttaaaatatgtctataagaaacagcgccagaccctgaaattgaaagctctgtgcctccctgcgtgcagtcagttccacactgtcctctctcccagttctatttaataaaaaaaacacatgagtgaaatttagggaaataagaattcctgaaattaaagcaattaagttttcagtcaactgtatgaaaagctctagacaaagaggtactttctatttcaaaatatgtatttcccagaaaaccattaccatatctagctagaatttctacaaagaatgattatgaataaagtatatattcaaatgcttctggtaatttagtcatggtcaaaga

SEQ ID NO: 49513 - DNA, 801 bp, Homo sapiens
ttatagcagtaggtatccctgcagagaacgggctaatgatcaactaaaaaggcatttgcatctgtggtacagcctctgcgcaaaattccaaatggcattctcacttccaagtcacctcacttctccatgtgccttcctgtcttctcatcttcatcccattttctatagcaagcaacactcatgctaactcgtgatcaaaagtagagcttggcggagtgtgctagtaacattttctctatgccctcaaaaactagttagatgcagagactttctccttaggcacacttaacttgtgcagcaaaaattactgaaacacggagtaactggcgaggcaaatatattgtgaaatttgttttagtacttttactcacgagtggctcttgggagctcagagttgaagctttttcaatggtatttactctggtgctccaagagcctagcagttgagtgtttaagaggtcaagcacatggattctggcctcagataaagctctgtggaaatctgactcatgtactttctagctgaaattctatgttgtattttttttaaggaaaataatagtacctaccttataggagtattgtgaggagtaaataaaatctccatttaaagcacttggcacaatatgtgactcagtttcctgttatgaaagtacaaacatttggtgcttttcagacaaagctttttaacagaggatacacatatcaatcaatccaagtccagaggtgcaaagagcttccgaaaagaaagagaaaggttaattctttctgggaaaggactatttggatgggcttcagata

SEQ ID NO: 49514 - DNA, 1340 bp, Homo sapiens
tggtttggtttgttttttgtttttttagatacaaatcccactaatgaaaaaaatttaaaaatcaatttactcatttagctgtgagtcatcagctaaagcaccatctctctcttggctttatccctcgggcagggagggggtggtgtttgggcatccccccaagtcctgcacctgaagtgcttgcttcacattgtctaggttctatcgctgggcagctgctcacctttagtgccgtgtgaataaaagagtggtggtgaataagcaacagtgctccccattttctcacactggggcctgttccctcctgactcacccactctctgattcctcgccacttcctatataggccaagtgcccagacatgagcctccatcacagaaacagatctgttcatggcatatcctggaaccctgagctgaatcctgcaaactggtgatccctgccatgctggggcacacaggacagttttcttcctgtccgatgcatagatggtggccttgtctgttcacagatgagactgaagattatttcccggggtgaggtgggcaaggcaagtggagggtcaacacccatgggtggctgtgagtcttccttcagtgttcccagaaaaaaaagcaaaggctcaacggatgactatactaacatctatacttctgtaagccatgccactctttaattcattccaaaaatatttattgagtgcataccatttagcaggctgccctctagtccctgaggagatatagtccagaacaagatgagcacatctcttgctgatagagaactcagtttctggcaatggacattggctctaacatcgcagccatgctaactgtgttgccttatttgcttaagcatatattcggcactatgaaaatctccacgcaatttttaaaaatttcttagtccaaaacatcttgcttaaaaacacttccctggtgagaacccagtgtgtatttttctctgtgtgcatgtagaaaagttggactttagtaaatagttcttatgaaagattcaagttaaaggtctcggtcacctggttcatgcccaagtaaacaaaatgtgcgagtcagaacaagaaccacccccaagtgcatggctgttttcatttagttacggtttggagcaagatttgtagtgggtgactgggttttaaaccaagttattttctgttaggtgtgacacagttattaagacttagcttgattgaccagagaataaactaaagacagtgacaaaacaaatttaaatctatactgtagtatttgtgtacttttttgttgttcagtatacttttggaaccgtatgcaattttatacttttataaacaaacaacttca

SEQ ID NO: 49515 - DNA, 2883 bp, Homo sapiens
tgtctgtctccccttctatacttcagttcctgttttttgtacatctttttatccctaatacctagttacaaatacaaacagctaagtaccacataagtacttaagggatcagtgtcccctaattatttgaacactggagcataattgaggaatctcttattatcctgaaggcagttatgccatttgtagaatggtaataaccagttggtatttgggacccaaagtgctacaacctgtgtagtacaaatatctatcatggctaaatgctgacttttctttatttgtcatttttagtggaagcaagcaatttcttcaaccgtccttggaaaagtaatagttcaaccagatcagaatttcacaggattgattgctggtgttgtctcaatatcaacagcactgttattactacttgggtttttcctgtggctgaaaaagagaaagcaaattaaaggtgcatttttgttactgttcatttttagaagttaccttaagaacacagtcattacagtttaagattgtcgtcgattcttgtgtgctgtcttatatgtagtccataaaacccatgagttctgggcactgggtcaaagtctcctggggcccatgatagccgtctttaacaagctctttctttctctctgttttaagatctgggcagtgaattagttcgctacgatgcaagagtacacactcctcatttggataggcttgtaagtgcccgaagtgtaagcccaactacagaaatggtttcaaatgaatctgtagactaccgagctacttttccagaaggtatatttcagtttattgttctgagaaatacctatacatatacctcagtgggttgtgacattgttgtttatttttggttttgcatttatatttttataaaaacctaaaggaagtatttacctctgccaagtaagtatttgacacaaaattacatggctcttaattttaaaagaacccatgtatatattacattatgattttagagtccataagctctcatttcacaaaaaggttaatttgagcaaaagtaatttgtttatcatctaagtgcaatagtaagaaattgcgaagctctcttttacaatccaggaagagttaagttacaaaatatacttatttaaatgtaagttggaactgctacattttttacctgttgaagcccaaacattgaaattatactgttagtaattcttcgaagtgttttcaatgaactgttagtacacagcctttttcccaccatattctaggacttgaatgtattttgagacttagccaaggaaaaccttcaattatgccatgaaaaaaaggaggggtcaatatcatcagctttgtaaaacactatgcctagtaatgttcaggttaatcagagttttcatgttgttttatttaaatctcctggtaaaagcaaaaggtctgtattgtatcagctccattatctttagaagttacaggatgtgagtcaagtacaagcatttccttggttgaatatttaccattggacaaataaaatgagtcacagatcattgaggatactggaaaagttagaagttgctcatccaaacaagttcaagagcaatgaagcacttaacattttaacattttcaacacttactacctcttatgttttgaagtttatgttatttctatggagatacacatagtaaacattgtctttgccctgattccattcacctttaaaaatccattcgtttaaccgtgtggaaaaatcaaacctagtttattgttttgaaatttagatctatttagtattttatgtgcacatttagtgcatctatttagtattttatatgcacatttcatagttctaatctgagatcattaaaatttacaaattttctttgaaaaaaaaacttacctaatcttctttgaacctccttactcaccaaagctctgtcatcattgctaagaaggttgagtttcacactcttttctccattgagcctgctccttggagacatgaaaagaaaacaggtaaaagagggtcatttagagagaatgagaaaataggtgcacagccaaaacctaatgaagaggcaactgcagagctttcctctctacatctggtggggacagcattctcatcagactttttcacggagacctagagtgctatgtggtgtgacatcagggtggcacactgatggtttcaattggtttctgcacatgttggaatttagctgaagagtcacgttttcatgccaaagggcttttatccatgtctcaccaaggatttccctcaatctgtgcacccttaagcatttagagccctgatctccagatgcaaaggctttaggaagtgagaatgaaagacctgagtttagagaggctgattggcattcccaatcccctggggaaggtttagagaccctgactccttggaattaagggagcaagtacccagctaggctccttccttcctcactcacccaacatttcaggtacttcactgatgttccacatccttctttaaaggttgctcttgtcttttttctggctagtgtctactataactgtaattgatgcccaacgcttttctggaaccacttttggccaagttcatttattattaatcaaactgtccactgtagaaaatactaaaaatgctcaagtgggattaggaatagtcaaggtactaacagcattctttttatgcccttctctcagattctgattctcctgcttatttgcaaacaaatgatacattttggtgctaatgaggaacccccacataaccttctccctgtgttacatactaatacatttcaatactatgcctagtttatcttcatgtcagttgctgtggctatgatgccccctccttgatatgtgtgaattcccagtggaaagagaaaggga

SEQ ID NO: 49516 - DNA, 2306 bp, Homo sapiens
attcaatctctctccagtctttctttaccctgagaacagtgacaaactctatgaagcctggtttatagcagtttgtacactgctggacagcatcagaagacagagaatttatagcattctcctgatctaaagcaacatatatcatctctacaatgcactccaatttctttatacaaagataaatgaatatttgtaataagctagccaaagcagcaataacagctagcataaacagtatttgtggaaatatttagcaggaaaagaaaccaatcaaaaaccgggaaatgaacttcattcttcttgttgtttttttttttctaaaaagcttttacccttaatactaaatggcctctgatcccttttattctatatgtgctgcaagaggttgtacaggcatctgccagtgtgatacaagagaagctgatggcgtgatttcccttatatgaacacaaggccttctcactttcctgtggtagcatccacacattcttctgtcaaacaccccagagcgtaatcctttgtgtgctccttcttccccaagagtggcttcactgttaacaaacatctttccatttctcttcagagtaatatatagttctgtcataggcctataaatcccagtaattgcatcaattttagagtgtgtggactcactaattgtgttctaattctacacatttggaaaactagaattttttatcatgaaaggtactaaaatggcaattatttctcttttgaagttataatcattaacagctctataaatattagctactatgtatttatatgtttttctgcaggagaataggagcactcaaaagcataagttttattttattcttctttgcattagtagagggcagcctaatgcctgacactcacatactaggcactcatggtgtcttggccagctggatgaattaattagtgaatgacttacacagctatcagacatttggcacctctgggggaaattactgccactggataaaaggctaccattgggaaaatgatgtggttaaagccagagagaactggatgaagtgagtcagggtgaatttgcttcatctgggcaactgcctttcagtttctgccaacctggattacgtattaaccagtgactaatggggaaatccttattctataatactaatcctatttttaatggtaacatttttatttcatttcagcttattagaatatagagaacttattttattatagttcttcatgtgggttaactttattttcatattttaaaatactatgtcatcctttaaaaaaatttatttgatgaggccgatgttactcaccttttcagtggttccactgtggttgaatattttattaggttaggctttaatatgagtcatatcatctacaacttattcatgaattaaataatcacattgcttatatccttgggtgaaatgtgttgcatctacatatatatttacaaacacacctacgtacctatagtggtattgttaaaagtattttttaaatgtactcttttgctgtatagaaagaagaaagaataaaatgaagctcataaagggtttgataaataattatttcataattaaatgttacgcagtgctaaccaagttctttcttttgcacagggcattttggttgtgtatatcatgggactttgttggacaatgatggcaagaaaattcactgtgctgtgaaatccttgaacagtaagtggcattttatttaaccatggagtatacttttgtggtttgcaacctaataaatagcttataataaaacgttgatttacactttccccttgtggaaaaatcagctaccactgaaattatgggcctaatcctgaaaatttgttttgttctagacttttattgaactacttcccctgaaatgatccctcagagccctcattagtaagggggtaggagaaatgaggttcttggatgaactgagtatcatttaactataactatgtttggtttataatatttgttttgcaagtgacatttctggaaactattggaagcatgttggcacctacagtagtaatgactcattttacccagaggcattactataattattttttaaccacaacttccattaaaaagataaaaaatgaaataagacaaacaggagaaaactacgctggccaaaaattgaaaaatcataagtatggtaatacctcatttatccacatttttggagagtgaggcattccacatacatgaacttcctaaataaatgaaacctacccctttttaatgctggaacattacttaaaattttagctgttattgagaaaatct

SEQ ID NO: 49517 - DNA, 781 bp, Homo sapiens
tccaaggagctgatactgagagcaaccacaaacccagatgtgtcttaaagagaaacctaaaaccaggaactggcctttctctatgctgtgtgcattgagtggggctacagcccttttgcagggtccccactgactacatcttgcactgacaaactcctcagtgactgttgaaggggaataccccattcctgattgccagccagtgacatcaccagacttgacagctgagtggtttggggtgatttctttctgagcctcctctattcactgtgcttctgatgttctaacatcttgggccttactaaccctggaggaactgtccctcccaaggctagctaattcctgcaaatagtaaacagcttgccttcaaagcatacctgtcatgtgcaaaccaaccaatccagagcccttatctaacctcctcctttatcaggctcttacactttgggctactatccacctgccctaatcaccccagggcccagttccagacaactagaactatcctcggagcctgctgaaatactccagattggccagctccaaacctgcttaccctgccttaccagtttcttcccagggaaactgcaatgaaggctcttgctcatgtttttcccctctctctctctgcctctagagcccagggcttcccccatgtgaccctgcatgacagggtgtgcctcctcctcttgcaaactgtgaatagcaaactatcttttcaatggcagttgtctcctgttctgttggcctcatcatacctggaaaataataaaactacatt

SEQ ID NO: 49518 - DNA, 444 bp, Homo sapiens
tggtttataattttcaccgctgtttttacgagttttcttctctatgtctctaagcctaagtgtggagatgtggtaatagacagcctgctctttgccaatcaaagcccttactttgacgttggccactttgttcctgtgacatctgctctttccattatagacaaactggggctttccttctgcagaactgtgactaaacaaccaccatattcatcagtggcaacaattcttgtaaacaagaaacgctgaatacaaaggctttgtgaaatcctgcccccaagaggccacatgtctaaagtcagtcacgtggtcctcagaaatgattttagaagtctcagtaaagaaaaattacagagacactcaaatatcctagtgtgatactgctgtaaaacttcttctaattttttgttaagctgtgagaaagggcctatggaaacacctgga

SEQ ID NO: 49519 - DNA, 2216 bp, Homo sapiens
aaaaaaaacaaaacaaaaaaaaagaagtggatcttccatgtgggctttagaatagtgcctcaaaattatacttcacttagaacttattactcaacatcttatttcaagagtattctaacagctgacttcttgattctacctttccgtattgcctcttccttataaccccaaaacagctaccaaaattatatatctgatcacttcactttcctgcttaaaaacctatgcccattcctagatgttctctgtgcagatcctttgttgtttcattttgtttatttttattataaaatatatttttgaggaaaaaattttaaattggacaaaaagatataaagtgaacaggaaatatcctccgaccactttctctccccctccatcctcactccccatgggtagctaatattaatgcactttttcagaaatgttccactctgcatcagtggaactgaactaaaccagacactttagtacatccttcaataacctttgtcttattgaccgaactatgactcggcacacccttccccagtcaagaatattgttcttctacctctgtgactttgaactctcaacagaaatatccccctttggggtatgagccatataaacagggctagaccaagctctgtgaactaccccctcccccactgacttataatttgatattgcttcaaaccagtatcctttacctttgttttgctcaacttttatttaaatggagaggagattaaaatgattttctcttaataaaaaattaaagaaagagattcacttgtttctatttgccaaagcagaataaatatatttttaatcaacaaaatagtatgcttttctaaaattctagttctgtttttcaatggaaatttgcagtgaaagtttccagatgcttggaagttataaagagttttaaacttaggtaataaaaataaatcacccatttatgataagcagcactctgtgaaagattatttcagaatctcagctgactgacaacttttaggagactgaactgtacttaagtgtggcaaacatgcatcatagagatgggttgtttactgtagcaagttacttgccttcggtccaactgtccttttggcagaagcacaccaatctaattttgcctgttacataaagagccacatgtggaaacctgagtcgcctgacatcatgttactgacttaatccagtcataattcagcgcccagagagcggctggcaggcccacccaccccccactctcactctcgatgtattcatgatagcacagaggttagctggacacacttgggaatcagatatgctaggtcagactcatttccaccacttatcagtagtgcgattttggaccaattgcgtaaccctcctaagcctcagtttctgaatccataaagtagaaatactaacagtggcttcctcataagattgtgcaaagattgaatgagacaatgtgtgcaaagctctcaaagggtggcagtcattattgccggagaccttgattttactttttaaatttttattcaagactctagaataaaattacctccacagatgtccaaagtttggcacagttcagaaaagtctgaaggtaaaaatcatgaaaacagacattgattttcttcatcctttttggtagtatcaacctaatagaaactggaccagggtcctgatccagtctgactttactgcctatgtgaccttccacattacttaaaagttgtgcttttcttgtctataaaaaattaagattatacctcacagcattgattgtaaatattaaattgtgtaagattttacacaagtacaaggtgttattatggttcatcagaatgtaatttttttactttgaaaatctccgtagaactcatctgattcacaaaattccctctaaccaaccccagcacttcatttgctcccacataattgctggagttgtttacacaaatctgtactcagaatcaaagagctcaaggctggagaagtcagggaatctggccctgggcctctgcttgaacattctgggtgctggtcgctagctgacccttaaacaactccatgtcctctttggagttcaaagtttgggggtaaaatcactaccccctctcaaagataaacacaaatggagctccaaggtggtgtccggtgctaacatgagacatgttgagtgtgaatctcatcagagcagtgtttttccaacataataaactgccctttgt

SEQ ID NO: 49520 - DNA, 3898 bp, Homo sapiens
aaaatcagaactattatttggaatagtaactccaacagcatgaattggaagaggaaataccttaaaagatgagttaggagactatttcattcacacaggagggtctagataactaaaacagaaacaacagtcatattgaagaagactggcaagaggtcagcatcccatgatcgcgctgcactgttgctttatatgattgtgtttgatggcacgattgtttacaacccttgactttcttccctgctttatcattagcattactttagaataatgaagcctgttccatccattaactccactaacatttgatctccccataggttgaggttaaaaattaattactcttccaacatattgattacatgactataaatataaaaacagaactacagagtaactacagggaccctttgtttaaatagcatgtttgctctttttaaaggaggtaattaatggcaaaggactttggaactggaggaacatgctagaaaagcaacccttgagtgccatctagtgttgacaacacatttaaatgtagtgtatcaaagaaaggtctggtttcttacactgtaggtgacttaattgttgaaagcaggcaatgtttgaatagtaaaaaaccaaacttaccctgcctttgttgcttgccacctgggtattaacatgaatcttcatttttgaacttcagtgggaggaagccttcatttcagcttctaggtcaaggtgcgttaacagaattggagggcattgagtttaactcacataactctttctttttgtcattccaggaaaaagttacccctaaggtaaagctagcatgtaactcctccttttcctcccttttaccagttagtttcagactatttcacctaattaaaaatgaactcataatatttcatgaattaaagaatggagaacatagaagaggttaagaactggtgttgaaatctcctgccatggaaattcattgttactgaggtggctcatatatcagagcactgccttctgcggacattaaaattcactttgtttcgtgtccctaatactgcccagcccttgggaagcacgaagctgacattgtattaggcaattcacgctgacctaataactcaaagcaatcatcactggtaacttaaagtgactacactccaaaagaaatagagcctaaggtcacagttataaatcttaccacaggaaggccaaagattataatctttatgccaagtgctgcagattcctttctgcttaggagagtcatatttcaaagactttactaatctgaaacctataggtggttgtgacaatagcagatatggcttacatgacatcaaacccacattttaaagaacactgggtaaatcagtaaaaaaggggcaattatatttattatatctgcagccaagactgtatacttttaccttcatactatactgaaatgcaatatcataattgtttttgaactcaaaggcctaacatataataaaagcatagttaactaaggaggcgtgtgatcctcttatcagtgtatatttgcataatttgcaagcagtctctgagtttgctatgatgatgtgtaaacagagggtatttgttcagttggaactttgtgctgtggagactaaagtcaaaggtttgatccctaatcagggcagacagcttcactgttgggtgactgaaagcactttatcattatgcttcctcaagatcgaggggcttcaggacagtgaacatgtaagttgcccactgctaaagaaaaacatgttttaaatgtttttatttgacttttttttatataaggaatgtatgccttctttgtgcaaaataagatgtgatttttttaaagctaacattcttgcagactctaacaatctcctcccgcatcccctctgttcccatagcttctctcacctccatatttacaagcctctcatttttatagaaagatatacacatatgttgattttagagttttaaataaaaataggatcatgctgtatacataatttgcaacagtttattttgactttgcagcatatcacaggtattcctccagtttataattcagtctttctcattgctacctgaccatctgtagaatggctgttacaatccactcaggctgtttccagtatttttttttggtttattttgtttactgttacaaacaatactacaaaaaaacttttacgtataatctaatatactggccttttattctaggatacagtcccaaaagtggggtcagtaaatcacacactgtttgtattttattagatattaggcaagttgttttccccaaaggctgcaccttttcacactcccaacgatatttgaaaatacttatttccctattttgtaccagcttgggacatcagcactctttttcattactgccaaataagtaaacaatggtttcttactgttgtcataatttgcttttccatgattaacagagaagttgacttcctgtgtttatgtgttttgtagccatctgcatttctttaaattgcctttccacagcctttgccccattttattctttcctctattttttattcaattgtttgtctttcagcaggtggcaaactcttcttgtaaaatagatatattaaccctttggctgggcgcagtggctcacgcttgtaatcccagcactttgggaggctgaggcaggcagatcacttgaggtcaggagattgagaccaacctggccaacatggtgaaaacctgtaactactaaaaatacaaaagttagctggacgtggtggtgcatacctataatcccagctactcaggaggctgaggcaggagaattgcttgaatccaggaggtggaggttgcagtgagccgagatcacaccactgtaatccagcctgggcagcagagtgagactctgtctcaaaaaaaaaaaaaaagagaaagaaagattaaacttttgtctttacctttgtctttattacaaattattttcctgacaatcatttatcctttgactatgtttatgtcttttgccatataaaaattttaaatctgtatgtaatccaaaatatttgtcttttctggcattatgtcctctacccttaaaaggtcttagagagtcttcctggacccaatattgtagaaaaacaatttcaagtacacaccttaacgatggtggacttttaactccagggatctcaaacaaacaaccatagaagtctggcaggttatggaaagttatgatacccaaccaataagaaaaatagggtatactgggggctgtgataaaatacagcatgtacaccccatctaaaggagacagtcagtactgtcaacctcaaataaccaaaaggatcagggtttaatttaaagagagtttattcaagcacaaagtttgaagatggcccacatggaaacacaaactccaaaggaatggaatcagtgcttcaaaatagagaagttaaggtttcacttattcatacagaatcagagagtttttagcaagattatgacatttttcatacaaggttgatgcatagttacagcagtttaatatgttacaggcagcatttcttttgggaagatacatttaacattttttacagagagtgtaagagtcatgagatttttgtcatgtgttctaagcaaagtaggacaataaagggaaagttaatttgtaataaggaccattaactaagaaagcaggaagtttttgtccctgacgtcacttaattctctccagtcactgtacagaacaagaaaaataaaatagcaagttaatctataatctgagaaacagaagttgtaactacatgtgactcagatcacagtcgcatctctttcaagacttaaagtgtttgagggattccatcagctttttttttttttagatggagtttcactcttgttgcccaggctggag

SEQ ID NO: 49521 - DNA, 1653 bp, Homo sapiens
taaaaggcttctatttgtacaccttttcacattttagctggcagagttcaggacttgatggaaacataacgaagggctcagaatgtactcatcgcagactgagcccatatggtcacagtggggagagcacgctgcactcaagatgctagcaagcctgcagcaggcggcccagcgagacacggtcccccgcccggccaccaggcgcccgcgcacgcgcacagccgcgctcagtccgcgagggccgggtcgagggaggcggggctcccggggtgcgcgtgcgcggcggcctgagcggcgggcccctcccttagcgggggcgcgcggcgctgaggaccgcacggaaacggggaagtcaggtggccgctgccgccgccgccgccgcggtttgtcgccagaaggaagatggcggatctggaggagcagttgtctgatgaagagaaggtaagagtcgcgggggcgacggcgcgggctgtcaggagccggctcagcccgggcgggtgggcccggagtctggtcgcgggggaagggcattggcccgcagctggccttgccctcggctgcccttcctcccccatccttactgcgcccagtgcctgcccctgtccgtcacccgaggccccgcgcgggggcaggtctctgccaggcctgctcgctccgctccttgtagggtgtgtactccgaaaataggaagcgggagccgggcgacggcgggcgggggcgcgggcgcgggggagggcggcggctgcccaggaccctctcctgctgtcgggccgcggggcctccgccggggccggggaccggggaccagggacgcaaaggggtttgcgtccgtgcgtgggagcggcccaagggcagtgcccagcgcggcggcctggcctgtgagtgtagcggcgggtgaggggaagggaaaaatcgcttaggaagcagaccttcacttctcccttctacttccccctcctcaaagcaaaatgcttccttttctgatcctctacggtttatccttttttttccctttccccatggaggcatctctccctccttctctctttcctttcgtggctctagcagtaagcttgcagctcccatgttccccaggaggcagcggagttgctcacaaaaagacgaccccctccccatagttgttttctgcccacgttggcagcagcccccccccgggggtcgatttggtggcacctcactttcctgctaggacttcttccgaagaggggaaaatgtgcaactccttttactgtatattagatgctgtgacagcaatggaaccagatgaacgacttaagttctcagatatttaaaacgagtaatggaataattcattgaactgctgctctcttaattcgcccctttcgtttggcttttgggaacgtcccattcccgagggtggtggggtaggggagaaccctgctaattttgactgtttctcggaaaggacccttagaagtaactgacagaacataggaatgagttagttgcagggttggaaatgtccactcttcgttaaagagtgcttcatttttaaatttcaaagccagtgcaggaaaatacaggtacatttaggtatgttgtggtgtttaagaaatcttcatgtaagtctgaggatattttcatttaggaccctctgctctagatgttttt

SEQ ID NO: 49522 - DNA, 2504 bp, Homo sapiens
aaacattttattcagcacagtcaaaacaaaacaaaaacaacaaaacaatgtttaaaatggactttctgttagaggtggccgtttcacagtcaaaattatcccagagaattgtttatattaaaaacaggctgagaatagtttgacctctgatcaccaaaaaacctggaggataaacattcatctgtcaagatttctctggaaaatccctgcgctgcttcaaagagacagaacaaaggtaaatagcatctgccacccaaatcttgctgaatagagtgatttatcttcaggcctactagccggcgacaggagcgcacctcctcccttctcctagctgtcccgggtttattcattccctgagcctgaatcctgataagggagcagagtagggtttaagacctcggaccccagaatacaccactgcaattgaattttggttccaccttaaggtaaactacgcagctgctgtgagcctcagtttccctacctatagaaagaggatcgtagtggggaattgttgcaggggttaaatgagattgtacggatcgtggagcagcgcctggcgtgtggtaaacgctcaacttatgcgggttgtaactgcctgaggcgtttccttcggcgcgccacttggccttctctttctaaatattagcataataaatataaatggacccagaacgcgagggggcaggggccacgtgatcgctccacgaaagccacttgtagggacctttagagagttagcaataaggctggagaaggaaaagccggcgcgcccgcggcccgcgcgatttcccgccgagcccgcgtccccggcggcgggcgggctccgggggcgcccgggccgcggcggcggcggcggcgcgagctgcgcctccgggccggtgaatcatcccggcagacaccaagagccgcggcagcagagaggagcgctgaaacatggctgaagcggccacgggctttctggagcagctcaagtcctgcatagtttggtcttggacgtatctgtggaccgtgtggttcttcatcgtgctattcctggtctacatcctgcgggtgcctttgaaaatcaacgacaacttgagcacaggtaaggcctgggagccgggcccgcggcgcccacccctcccccgccccggaaagttagtgcaactcgcgcggggccgcggccaggcgcgcgctcggggacgcgccggggcccgcgcaccggaggcccgcggctacccgccagcaacgcggcggcttaggcggcggggccgggcagctgggcgcgcgggggcggccggtggccttcacggccccgcggaggaagagctgcgccgcgcacagcccgcaaggcgggccgggccgggccggcagccgccctgctgcgtcgctggtggtcgggagacggagaagaacgggtgtcgcgggcgaaggagttcccaggacaccccctcgggtgtctgcgccggaactccgagggttccccggagttagaccgagtccttcctcacgccctcccggctgtgggtgccaagcggccgaagtgtggtcggggaggcgccctcccgcccggccgcggaggcccgagggcggctgccggagggtgctcggcggcgaagccccctgacccggccgggctgtccgggcggcgccctccgtggcccggagttgcgtcttgccgggcgtggggctgtctctctggttgggtagtggggagaggggttcccgaaggcactcttgggagtgtatggatgacgtgtcaggtcaccaaatggattgtcgaagggaccggagggaagaggggagagctggaatttctgagggtttcggttgcagttttcagtgatctttgctcgtctcccttccctgtaaagctacatatgctcagcaagtgccgcgtgcctcccatccttggtcggtggtaaatgcaggaggtaattaacaggatcttcacaaacttggagccagcccactgagtcgttaaaaaaacacccgcaaagaaaacacacgagccttaacactccagagagttccgaaacacaaagtaaatttcgagctaagggttacagtcctttaaatctggaaatttcaaggtagagtgtttttgtttttgttttaaattttaatttcacagtactgggaaattcttacagtcctgaagatatatacatatgtacacatatatatcttcccttgttaatctccatactctgggagtgcaagtctggaaatgcattttcctcaggtgtttagctgcattaaaacgctttttaaaacgcttgagataatgtactcattttgttaggaaacttgtacctttcagatactaacttaagtattttgattactaacttgaactcatgttcatatttacatttgttttgtagtatccctcgggatcgtgtccctgggaggcggataggattcagcactctagaattgtctcaccatttgaataggtgctgctcagcccttttgagtctgtcatcggaaagaccatggctttctcgcttttcatcttt

SEQ ID NO: 49523 - DNA, 602 bp, Homo sapiens
cagtctacagagagtttctgttattgtggtggtggttttgtgcttgtgtattgctcttttagatggtgttaatgtaatgaagtgaattggagaatttcagtttttatcctaaattttctgagtataaatgtgcccagatttttctgaccttttctgacctttctaaccttttccttttttaaattgcatagacttgtttctcaatctctagtttcactgaatggtaaattggtacatgtttagaaataaggttagattaaccatgggtggtggttacttgatgagtaagtgggcgattcccttacatctggtagggtaaaggtgtgggtgggaggtgaagcagtgatcaggtagggacatgagtctttgcccaaaatttgtgcacccaattcagaattatattgccctaaatttgaacttttggggaatggcgacattgtttgctgacagattgcttttaaactaaagaacgaagaattggaaaattttttttctagggcagagagaggccacttttcatacccagtgtaatataaattccagtgtgcatccggattgaactctacttacacagtatctataaattataactgtaggtggat

SEQ ID NO: 49524 - DNA, 480 bp, Homo sapiens
actctgtgcattgttagatagcttcctaggctggcaataattaaagggtttagattaaacagatgtaatgtgaaatctgtgacatttgaggctaggttagctagcttaataccaggtgtttggaggctggggatgtttttcgtggttataagtctccatgccaaatttttattctagaaattggcctgagagggcatgttgagaaatcgaatgcagaagtaaacaatgacttcagaaatcagcttggaagtcagggatttattttctatgttgtgcactattaatatacagttgacccttgaacagtgcaggggttagggatgctaacccatgtgcagtcaaaaatctgaatataacttttggctcccacaaaacttaactactagtagcctacttgactggaagccctactgataacctaaatggtcaatcaacgcatattttgtataagtattatatactatattctcataataagaa

SEQ ID NO: 49525 - DNA, 1188 bp, Homo sapiens
tacctgctatataaactcctggtttaatcagtcagggagatggatttgagactgaactcccatctcctcagctacagcacctgattaaagccttcttccttggcaatacttgccaccttagtgattggctttcagtgtggcgagcagcaggacctagaccaaacctccggtgtttcagtaacaatttaaaaaatagattataaaacaaaggtggtacagaaactatcttgataaatctgtggtgaaactgaaagtagatttttcatttccagattatcaatttgggatttagctgatcaggataccaatttacaaattagccaatccaatatatgtgtatgtatacacatacacccaaaacttcttagtatttcttgctagtgaggcaggatatttccttgaccccttaatgggtctcgcaacaggtgccttgtttactcagcctgctgctctcaactccttatgggagggagtatgcgagcaaacaaggtaggaactggagtgcatgagcgctggagtcagctggccacttgggcactggcaggatcaaactccactcagacccactgccttccaccccttgtgggagggagcacccaggtgagtgggtacaggagctggagtgagcacttttgggcactggtaggagcgaactctgtgcaggccttgtggcagcatccaggcaggatccctgcgactcctgaagccccaggaggcatgttacagtgcccttttagctctgccatccacggatggcttaagtgttaacagctcagagggccctccaccctttcacatgaggcggctgtcctctgccagtgagggcaaagggccagtgtgacagccttttgtatctgcattcatggctcctgagctcttgtctggcacccaggagaaacaagtttacacaaacgaattggatggtaaatgtggggaatttttcttgatgatgaaagtggctctcagtggaaaggggagctgaaaaggggacagggggctatgtaatcttcccctggagtctggctgtctccagccagattcttttttgaagtaatgtcgtcaagctgtgtctccgaagtcaagccacttctctgcgatgtccagctgtagtctctgatgtccagaggcttctcctttctctgctgcctgagtctagggtttttataggcacaggatgcggggtggggc

SEQ ID NO: 49526 - DNA, 947 bp, Homo sapiens
tctcttttatagttaagggagctgaggtatagcaaggtgaagtaatctgtccagggtcacatggcggataacctgggtagtcttacttcacaatccaagttcttaagcactttaaaaaattgaattgaccttgtccagaacctctatgaggtgtataaaccaagattaacataattattaagcaattaaaataataattttagtaaaattctgtactgcagtggatgacattatttctgaagtgacattaacctaacttactgtaggaacagttcagtggcaggattgccagtggttgacagctcgggctctggggtcagacagatgtggtcctaatcttctgtgtgtgaccttgggcaagttgtttaactttgctatgtcttagtatcttaatctgcaaacatgggaatagcagtaatgtctactgcataaagtcatttcagcattaaatgaggtcatgtggaaatgtcaggtcagaggacagccatttggcagtgtgcccagatgagctgatttctctacaaatacgactgtggagaatggcagtcacttggaggtatggctttgtggtcagccgggcttactcactagctgagtgactctttatatccaggccattcagtgctttcatttcaaatatatccctcagcaaaactgcaaaatgctacatgtcaaggacctttcgggctgctctctaatagtcttaatgagggtaaactcaccaaaatctaatggatgtgttgaaagtgattatcttagccagtgtttttcacatctttttaaaatcctttgacactaaaatttgtgctctagtacaaattaggtctccagttaaatgatgataatacctaaaatagttttagtagctagtgaacacttacttagtaaagttatttcataatttccacattatttggtagggttggttgacttaggtgaaaaatgac

SEQ ID NO: 49527 - DNA, 906 bp, Homo sapiens
cctctgtgaggctcttctcagaacagctatagcttcctctgctgtggcttaatcatgtcccacttaacagtttatcttggaggaaattgttaaaatctcttgactctgccagccattcctcccacctgctttcctgttttcattacaggtatagatttctctccttcgacaccattttctaataatttcaataggttttgttgcaggggagaggagtagctaggtttgttcagtcttccatctacatttgtaagtcttttgcctgagtccttttactgctgtgatatgggctgtatagagccttcacaagtggatccagagtttatgcattaataaataactccatctggtgttctcatacatcactgattttagggagataatttttttagatcttttgctgaagagtcaaaggtcattttatgctgctgcttcagagtacaacacatgtctgtctcagagagagagagagggaaatgctcactcctgtcttgtatagtttcctgtttcaaccttgccttctatttttcggtaatggagagacacagttcaaatgttctgggtttaatttagtgggtcccggtagaataaccccaagtggattgtgggttcaatttgtgagatttaagaggtagagttgagagaagttggagactaggtaagtttttgcttgcttttattttcagggtggttggtgttgtatgaggaagagactaagaaagataagtcatagataacgtctggatttcttgcctgggaaactgggcagaaaacatcatcatcatggggactgagattgtagtctaagtagctggtttatggatgggtgggcaggaggaatgatttcagctttagatctgctaaacctatgggtcatccaaatggaaatatttagaagacagtggg

SEQ ID NO: 49528 - DNA, 1190 bp, Homo sapiens
gaactgctgcccaagggctgagcattaatgatctggatgcactttgggcaacgaggagaagccagccctacatcctgcctcatagacaaaagttttttggggtaactcaacagctgcaaaagaagcagtgaactcaggctggtttctgtaaatagcatgtggacgtgttggggaatgtgtgtttcatggactcagattccaggagggttcagtggaaagacttggggagcaaagagaatgttagaaggcaaagtgaagagcagtgtgtagatgaatgtcagaggttggagtaccaaccttctgcctattgccatagaagaatcttctataatagttaactttcagcatgaccctgtcatgagatgcctgccagcatgaatatttgttaactgtgccccagataaccatatgcattaatctactgaatagaattatttactattacccatgtgaatgtggaaggatgcctgccaaacacaatgatagtggttttggcataaaaagtcctttctgacagtaattgttggccagtgtggttagctgcttgttgaggccactcttggcacaggagagcagtgccatgtcatcacagagggggaggaatgcttatcgccctctgtctgtgggcctgcttccaagccattcaaaatatgcatcaaattgctcgggtttgttcatgatctccgggctaggacacagccctgttttaagctgtttaagatgagaaagaaatgttttactcagagttacccatcagttttgaggaggttataaatcgttcttttccccaagacagcatgagaccagcttctttcctgccctcctccccaacaacctcactctggggtttgtgaaactgcagtttgccatagagtttagagtacagaaatttcctccctaataacatagataaaacagtggtgctgtcagacctttgattttggaaagttcttagatgtcttaaagttaggtaaagaattgtcactgaggcaggtagaagtggaggacaatctttgaagatttccaagttttgaccagatttgcttgttgtttttatctgattgagaaacaaacggaaaaggaagttttacactgaaaacatttttgttgggctgtgcataaatgcaaagcttgtctcattcattttaatttttaaggaaaagcttcctctttggactaaacggatcaca

SEQ ID NO: 49529 - DNA, 1505 bp, Homo sapiens
cttgaattttattgaacctaattcagtctgcccaggctcaacctaatcatttgacatcttgctactgtacctgggctgctggccaccgctaggtaaaacttgacaaccatggcagttataacctctaaaattcatggtctccatttgttaggccctcaagacagccttagcaatcctttttttttttttttttttgtcctgagtagttctccactgtgtggctgtttttcactttcaccccatctttaagcttcttccctgccacctattctcttagtctcagaagatgatcgtggcccctgttttatgtaggccaccaggcagaaactcataaaccttcctctttactaccacccccatcactacctacaaattttcttttaacccgtgtcactttctagttatttttctactttttctccttaactttgccactaggctgcttgaaagggtaatgcccccttgtttacccttctacagtctggcttccatccaaattgctgttggcaaagttaccggtgacctaactggtaaagcccgtgagatatttttcagcctttaccttgtttggtttctccatggcattttatctttcttgagcattttcttcaacttttatgaaaacctgtctttgaatcttatcccaccttaccagaaaaataagaagcatttaatgatttacaaaataataattgatatgaactcttataacccaatattaattatacttttaagaattgaattatacttttatataaatacaattcagtattatactttaaaaatacgaaatgctgtaatcccagcacttcgggaggccgaggcgggcagatcatgaggtcaggagatcaagaccatcctggctaacatagtgaaaccccgtctctacttaaaacacaaaaattagccgggcatggtagcatgtgcctgtagtcccagctacttgggaggctgaggcaggagaattgcttgaacccaggaggtggaggttgcagtgagctgagatcgcaccactgcactccagcctgggcgacagagcaagactccatctcaaataaataaataaataagaaatacttatttcttaaaatgcttaactctagtaatcattttactttgtgtatatatatccaaaccgtgatatatacaataaatatatataataaaatatgtacaataaaattataagacatacataatatactaattattccttggtttcttctgccctagttaatgaaggagttcccccttctgagtatgttcaatatccatgaaaaccttttagaagcccttctggaactacaagcatatgctgatgttcaggcagtcttagcaaagtatgatggtaagttcttgggtatttttatttacttgactattcctcttttgatgtattttccctgattagattagaagggtcatttcaaatagcacagcacttttgtagccatactcttatagaattttcacctacagttttatgatggtgtttggtatgatct

SEQ ID NO: 49530 - DNA, 880 bp, Homo sapiens
actaaacaagcctgacagcccaggatcatgttcggatcaatctagtgtgctaaaattaacatatagtcctacatttgagaatgtgtgattttcttggttcctgtctataaaataatattttaaaatacatacatttcaaatcagaagttggtgaattcactgaaatatttctagagaacactaggtattggggctcatagtgtgaaaaccactgacttaattcttcccccatcttggttgttcctgatcttcccttgtgtccccattccagccatttgtatccttagaaaatgatctcatattctacttcatctttatcttcattgtcaactgtcaggtagcaatatatgatggaagaagcatgtactttggaatcagacagacctggctggaatcctaactctgtcacttattaacaatgtgatcttaggcaatttacttaatctctctgaacctcagctactctcgtcagtacaatgagttatccttatctttacatggcacagtattattatgatatcaaaaattcattgagtatttactctgcatattagtcaaggttctccagagaagtagaaccaatgatacacacacacacacacacacacacacacacacacacacacacaatttattataaggaattgacttacatgattatgatggctaacaagtccaaaatctgcagtatgggtcagctggcaggaaacccaggagagtcaatgttccagtttgagtctgaaggcagtctgttggggaatttcgtccttctctgggaggccagcctttttgttctatacaggccttcaaccgattggatgaagttcacctttattagtgagggcaatctgctttaaccaaagtttactgatttaaatgt

SEQ ID NO: 49531 - DNA, 419 bp, Homo sapiens
atattggttaatgtagggttcttatgtaagtctagagaagtagcatttaatctgttcttagaaggtcaggaaagatttccctggaggaagtgacatttaagctgagagaggatggataaacaggagtcatctgagtgaacaacagggagaacattccagaaagagaacaaaatgtacgaggcctgatgccaagagagaacattcattgcattggggaactatagtcacttctgtgtggctgggatgtagaatgaaatgagcctggacccaagagagcactttgccctttggggaagctgtaggtattacagtaaggttggagtctggaaagaaaggggtatattgtgagatctgaattgggagaggacagttatatccagacctttatatgctccagtaagaagactgaactttacact

SEQ ID NO: 49532 - DNA, 1101 bp, Homo sapiens
tcatgttttgtattttgtttaaagttttattttattttgctttatttattttttgagacaagatcttactctgtcacccaggctggagtgcaatggagtgatcacggttcattgcagccttgacctcctgggctcaagcgatcctcccacctctcaatctccagagtagctaggactactacaggtgtgtgccaccatacctggctaaattttgcattttttgtggggacagggtttcactatgttgcccaggctggtcttgaactcctgggctccagcgattcacctgccttgacctcccaaagtgccagtatcacaggcttgagccaccatgtccagccaagttttattttagaattaaaaaaaattccacttggattgttacattttatctcattgctttatatttatagaattactttataaatgccactttcttaattttcatagttagcactctttatgaaacataaactattatttgacccaggtttttgttagaggaattgagtcagagagctgttaagtaactgagatttcacaataagccagacagaccagggttcaaattctgggtctcacattatccaattcaatattccagctttgttacttattgagcaaccactacaagcacagtttacatgacatctgatagctctcaaaatgaattttacaaacataattcagatttcaactcagcagtgactcaggagaaaggacacttggatgcatttctttatggcatttttcccagggtacacgcaacctggaagatctcccaagtatgggggaaggtttcaccctgaggaatcccattccctctaatctgggacaagggggaggagagtactgtctcttatcagccatctccccagggaggcctgggccctcctggaatgcataccatggcttactgactcaaagtgttgaaaagaccaggcattgggacacacaacactactcttaaaataaaaaaagaatcagagtagcttgtggttataattgaaatggacagagtaacatggtaccaagaaactattagcaattccttccctaaatccctcattttcttaaagcattttctccttttcctcaaca

SEQ ID NO: 49533 - DNA, 613 bp, Homo sapiens
tgatgctttcttgcagcaggggcatttgagttgagaaagggaggaaacatagattttgacaatgagagctgaggggaaaggggtttcaggtggagggaaccgcatgtggaaagcagggaggtaggaaagtgtagagtgtgtttaaagaatagaccagtttggctgaaacaggatatttgagcagaggaagcttgtactaggtaggtgggttgaggccaaattatgcaaggcattaaatattaaactaggaattttggactttatcctgcagtttatggggggtaaatgataagattcaatatcactttatttgtacagtattatgttacattttatctaattgtttgtttaattcctgtctagacaatgaattcctcaagggcaaggagcatggcttattcacctcagtaatttcagtgcctagcattgtgcctggtacaaagtggacacttgtatataaccttttttaattgaagcaacaagttgtcaaccttacaaatgtgaatccgtgattcagatgacaggttgaaatgtagattgtctgcgaagagggcagaaagagagtatgacaaaggaggacaagacagtggggcaggcagggagagagagcagc

SEQ ID NO: 49534 - DNA, 1212 bp, Homo sapiens
taatggggcagcaggctgctaggacctaaagcgctggcctcagcggcagcagcgcccacatctggacacggccctctcccagtgggcctcccgaaggcacaggaccagatgcacacaatgggcatccccacacctgctgggcgatggcccacctcccccaagctgctctcccgggtccgctgagcggtaccaggcacccccgagacacgcgctggcaaccacgcgcgcagcgagaggtgaacaatggggggtcaaattcgccaggaaacacgtcccagccttctcccccggccagaagcgaccgcagcggagggagtgggcataggggtcgcactggacgcagacagggagctgggagaaccgggcgacccggggccgcttcccgtggggcgcggaagggacaggagggatccccagccagggtggccgctccgctcccccccgcggcctccgccgtgtgggcatcccgaggaaggggggccccgatgaaggggcaccggagagtcccgggcttacggaacgccccgggggtgcgaagtcgggtccggctgggaccccggcgccgcccccggcccgcgtctacactagccccgcgcccgccccgggaactcggttaccgccgcctccgccgcggcccccgccgcgtcctccggggcccgggacaagtcgggctcgcagctcgcgccgtccgtcgccatcttcctgctctagcggatccgaatgcgagctcggagccgcggctccggactcagccgtctccgcgcgggcggcacttaacccgctgctgtccgggacgcgggcgcctggagccgggagccgggagccgcggcactccctccgcccctcgccaccgccctcgccgcttaacccgctgcgcgccggagcgccccgcctcggtcccgccccgcgccccgcgtcccgcgcccggtggcgccagccgcgggctcgtggaggtgcgagaaatgggcgcacgacctggctccgctgcggccctgcgcggggactggggatcaaagaccacggaagaggtgaaggcagaaagcgcccgaggagcgttgcattccgcagaaccccaaccaagccggagaaatccgtgcacagaccagattaaatgtcaggcctcctgaatctgaattctctgaaagatcagggaaaatcctacacttcagctccctctatcccaccgcgaggaatcacacagggcaccccttt

SEQ ID NO: 49535 - DNA, 1149 bp, Homo sapiens
aatgtcaatatttctgattcaacttttctgtgtaaactatgaaaatgagccaccgtgtccacgatgattgtcccagatgtaatgagtatcagctatatggtcacagacatagtacattgtgctatgaaagagaaaaagacactgcatgctttaaaaaaaatgcaagtttctatttttaagtctcatgactgcccctaaatcgcttgcctcatttccttctaacagctgtcttcaagaaattggagaattggagaaaatatatgtccaggaaaaaataaaggctaagatcttcaattgctcctctgggaattatatgcatgagttccttcatgtggatcatttattctctaagttttaaagttgtatacattgttcaagttcatggaacattctaggtaactggattttgcagctatgataatgatgataatcaatatttcttaaatttaaaaaatgatttgagcagatactaatgccttatgaatatctaagttttatggatcagacatgtgcacagagctctttgttaataatacactaaaaatcaatttgtttagtcattcatcaggtatttatcccttactagctttctggccttgggcaaatcacataacctccatgggtctaagttttttcatttataaaataaagagaataataaaatgtataactcaggggaatgtttggaatttactcactttgcagaatgcccagtgcattgttggtacttttagtttgtgtcactgttgtcactgtggttgacagtatagttcatctccatgtgcaggtaatctcaaggcacagggcatggaaagaataaattacccgtggccccttctcttgggagactccttgtctaatgggagaaaggcatataagcaaatatttgcacttcattgctacatctgcaaaaatcaaggcccaatgtattgagtgtcacggcaatccagaggagagagtgttgacttttcctggaattatgaggaaatgcttggaaggacaactgacttttgagctgagccttgaggggtgggagggaaccatctaagtcaaactagaagtataggaaatctttgtgtgtaaggacacatcatctgagagatgtgaatgaagatggctcatgtgtagcataactagtaattcaggagg

SEQ ID NO: 49536 - DNA, 1944 bp, Homo sapiens
aggaaaactgctgacattgcaagagttattacaaagccacaaatcttaagaaaatacatgtttaactgaaattataaagatattttgcaaaaaagggaaatcgctcctgctggtgttttgtgtataaatctctttctaacttcaagctctctcaagttagggcaacagtaaatgaagtgggaacagtatcgcattgggaaatatctgaaatgatacctatgggactatctaacgaaactgaggcccagaagaattgaagtgacctgtgcaatgacaccaatttgttagcagagccaagattagaaccaagtttggtgccttcctgcatccttcctgcatcggtcctttctcggtgctgcagcagccttttacttactaatttcaccctgaagaaaggtagaccatcctggcgtggcagaagcgtggacattcgttttctaagggatggtcacacacctttgcctatttgcatttagtttctttaaaaagtaaaaacacctccattttggaacacttttagagacaaaagcagaacatacgaaagtgtatttcactgctgagttcttaagaggcgtacaccgtgtggttataacgtgcgcaactctgtcccgggcaactgaacttatttttagcgttattttcggcttctgctgcagaaaactagggattcaactacccgcacctacgtttcacacaacagcactcgtctctctccttcactcctaataaaaacaccttacttcgtttattcctgcctgctctacctcgtctcaacattttctcttgttaacttccaccacactgccttttactcggattggaaacccactctcccccaacttctgtctcatacccccaacttctgtctcatacccccaacttcaggaagcgtcttccttttttccgcctctcgttcgcttttgtcttacgaggcttccggaacacggcccagaattacagagaaaacacactgcgcacgcgcactctctcgtcaccgctgtgcggcttctgtttggttggccagttcgtcccaatttccgactcacagggctgcggagcagcaactctcacgatatttgctgcgacccgcaggcgctatccgctgccgggttctggcgcgccctttcagttctgcttgctgtcggcaccgctgcgttacccggaaccgccgggccgaacagcatgacgtccgctttggagaactacatcaaccgtatcctcaagctggccgccgcgggcgtgagccggggtcgcggagaggccgcggtcggggatcggtgggaggttgggaggcctggcctcggcgggatcctgggggcgggcgaggagatgagggccccggaacgacccagagttcgccggcggcgcctcgagccttcccgctgctgcgggcccaggggtcctttccattttgcctgcaaaacccaaataaaaacccagtgtgattattccgaacttttctgtcttaaaaaaaatgtacgctcttgattcttacttactatttccctatggcataagtgttaaagtttgtgaataagatgaacagtcgtcctggcggcgacaacagttttgcaaatctttgtacttgttttattcacataatttgctcgttcgaggatagcaaaaagtttaacgatggttcacagactgtttctgtccctttaccacttgaagtcccaacttgttggtagaatgaaaaaaaatggttgctgttgtaatggattatagtgaggagcaagtaacaaccccatgggaagtcttaaaatagactttacaagtgttaccgttttaaagtcttaggacaaaaacactacgttaagctcaggtacaaactgggtgacaaaaattaaataccgaatgcttttaatgatgcgttattggtaccctgtgacactgcttatatagtttctttacttttgaattacagaagcctgtcctggaaga

SEQ ID NO: 49537 - DNA, 709 bp, Homo sapiens
tgggattttagtatttaactatgctttaaaatattactgcacttttcaagttctcttttagaaaaaaaaaaaaaaaactcggcttataatagaattgataaactggtcagagatatacaactttccagagagcaagttctgtgattccttgatctttactatttgtgatcattaacttttgcaatagtacaggtgcccttgggtcatgctcagaatgtcctttggaaaggttcgcggctagtttatacatgaattgcttaactttaccaccctggttctctacaggctctaatgagctttgctcacctgcaccaacgcactctgcctagagcacattgccctcgcactgccttattttactctatagcatgccagtttctaaaaatcctcaaccaaaataattagtattgttaattaaacattgctattagttattcagtattatttcagcatacttttatcacacatctaccaggtaacaggcagtgttctgtctttttacattgattatctcattcaataatcaaaacaaacaaaaagatcactatttttttttttttttactattagccttgttttatagaagacaaaagtcaagatcctagaagtgagaaacactcaagattacagtgttgttaagagttggtaaagtgaggatttgaatgaaacagtatgattcaggattgtgttggtaaactagctgtcagtt

SEQ ID NO: 49538 - DNA, 525 bp, Homo sapiens
tgttttctatcatgtgtattattgtttaattcagtatgcagtaaagttttcttaaatgagataatacactgaacaaaatgagcaaagcttagatttcttttttatcatcgtattcccctagcaatgtcctcagtaaggacactttgacctctcagtgactgtcataactctaaactcacgtggtaatttccaatgtacctcccacagaatagaactcccagtgtttgggagcacacagggaaaaagtttagagaagggaaaatggacggagtggtagatgaagcaatgacagaaaataaatatcagctgctggtaagaagccaaaaagatgagatcatatgcaagaaagtattcatcaaatctggttcagcactaagctagtactgagaacagagcaggtatgggagaaattggaaattagtagataaggagggtacagcttctgaagtgtaaaagaagctaatagtaattacagacatctgcctcattctaggattttttttttttttttggtctgaaataagg

SEQ ID NO: 49539 - DNA, 1947 bp, Homo sapiens
cgtggtttcaaaattttctaagcactatgctaaatttgatcatcaaaacataacagattcccatcttacaaacatagttgctagttgaatgagtaaaagagatttcaaatttcaattcaaggaggcatgtctaaaagaccagaccattcatttgatgaaattgtaaatgccgatcatccaacttaacaggaactgcacatttgttcctttctagttagaaaaaaataaaatgttgccagttaatagagcagatctctctgtggaaatatgtagccgaggttcgagttgtttgcaaataaaatagaaagctcttctgtcttctctttgttaacagtcctcagaggatgagcaggcttttgttagcaaatccggctccagctttgaaacccagcaccaccacctgcttcactgcctggaaaaaaccacggtaaggagacagcatgactgccttcccttgctctctgacagtaattccatttgcttttgtgcatacttaatgcttccgagtgtgatttcactgtctgcattactggaaaacatgctaaaaaacaaacaaaccaaaaccccacaatatttgaaattactttgaaagatgtaatgacatttcaatttggaaagtattttagaaacttatttaaaatgttttattcttagctgctgtcttaactctagtctaagaagtcagttaatgcagatgaagagtggtcttccaatagtaaatcctacacaatatcattttctgtgattcttaaaatgcgaattagacagaaaaaaattaatggtgctcgagggtccctagcatctagatcaagagaatagcaatagcaataacaaaaaacagagaacaatggaatataagcatttgtttcattcacaaccataatgaatagagatagataatagaaactattctcattagaaaaatgactcatgtaatcactggtatgcccttgggtgctaaggagtgagtctgtatttctccacttacaagctcttgtttggacctcctcattggcaaatctaccaatttcttaaccagtttgtaaataggagtcataatctatgataatcacagagcagaacaaaatcttcaccatatttggatcatgtcagctcactcactctcgggtgacacatgatttgtattctcagttccaaagtattgcctgttcatgtacttatttaccaatagagtcattcagcaaatatttactacttgcctattatgtgcccaagagtgagccagacccaagaaacgccatgaaatgaggtgtggcctctgctaccatttagcctctgtttataaaacaaaatcccagacagggctgttactggaaaagagcagcgaacatggaaagcaacaacggtgccacagtcaagagagtaaagagggcagagccatgaggggacaggtcaggcaaggcttcctggaggaacttgagtggagacctgcagggtgactaggagttagctaggcagagcaatgaaggggctaacaggtgatacaagtacctgaagaaggaaagaactcagcctaggaggaagtgaaataatttaagagtggtcagaagaagagagtgtagcatggcaaaagaggagctgaagggaaaggcagtgtccagataatgttaggctttgcagccatgtggacaattttgatctttagttcatggaaatcatttaaatgttttaaacaaggtagtaacatgattatacttgcatttttaaataaagatatggacaggtctgtaacctagtaggataaatttgaaagttaaatgatacattaataataaaatgttggccaggcgcagtggctcacgtctgtaatcccagcactttggaaggccaaggtgggcgggtcaactgaggtcaggagttcaagtccagcctgaccaacatggtgaaacctcgtctctactaaaaatacaaaaaaattagccagac

SEQ ID NO: 49540 - DNA, 1872 bp, Homo sapiens
acatctcaccatcacgcttcccacagcctgcccgtccctcctccacccgccctcagcagggtccagagggtcccgaggcccagtgcattcgagacatcgcctcatcaaaaatcatttgttaaaatcataatggtaactaaactcccaaaagttccaaaccggcttcagataacacctgctgggaaaagaaaagagcaactatccggatgaatgaagtcgcacagtaaactcgcgttctcaggggacacgcggcggagccctgtgcattctgatgagacgctcttgaaaacctccctcactccacgcccctcctcgaggacagctgtgctcggcactgtcctgaaggtgagaaaccacactgccccctaccccggacacgtcagaggcgccaccggcaagcccgagagaatgagcgcccttctagttaggacagttcctgggcactccaactccgcacccctctaccccgtcccgcagctcgggtgtgaatgcaagggactggggcggcggggcgggggcgggggcgggggcgagggggcagcgcggagttgagattccgcccggctactagggtttctctgggagaacgtgagaaatgatgttttcggccccagaatgatggattagcctgggacagtgggcggggggcggggggcgccggggaattagggccgatgcagctgtgcagacgccgggttagtcattcaaaccccgcttcccccgcccgggacgctcccgcgacccctcgctcaaagccgcccgcggagcacaaagcgagcgcggccaccgacccagccatcgcgtccgcgcgcccccggcagggcgcgaggggaagcgccggcggcagggagccccagagccagcccttaagtagtttagcacacagcgcggagggcagccgccggcgggctggcgggacagcgggcaggaaaggcgacagacgcgtggccacttaccgtcggcgctgggcccggtgccccacgcccgcctggggatagtcggggacgcacggcgggggctcatcggggcagggaacttcttcgcggagagccggagggctgcattggcttcagctggagacgcttctttctcttcctctccccccgccgccgccgtcgccgcctcctgggaaaaagaaaaaaaaaaaaaaaagtcctgggcagcagttgctggaaagtctctgctaagccacctcccagcgccgctgtccctcccaagtcctctccgagtccggacgaggcagcggcggcagccagggccagctgcacaaactctcagcgcatgctcgagccgctggctgccggggttgggtcctagtgggtgtttcttgtccctctcacccagcgagagtccccaaagggacgcttcacctctgcaggatagggtccagaagataatgcctaggaacttgggagaagtccgtgcagtaaatccctttaaaatggtggcgtcgaaggaatggaggctgggttataagcatagagaagcaggcttttattatatgataatatttgtgtttgagaaggggggtgaaggggtggcccaacccaattcctgcaatgagaaactagttttcacaacctttatggagccacctcctgtgatttgttattaacatggtgccctatgatccttcttattgctttgttgccctcccggatttttttttttttaagttctttcccactttcatagtgcactaatagcatttacggaaacatcagagtaatcatgtgcagtctgacatgcagaagaggaggaaagaacatttttaactcttagaagtaactcaagctttccaaaatttctcacgataagattgttttgagttaactgggtgatttattttgaaatgtgtacatagtagtggat

SEQ ID NO: 49541 - DNA, 1798 bp, Homo sapiens
tctcttttatattttagagtgaataatgaggataaattccagtagagagttctattttaagcaatccaaattccccgaactttgctgattattctagtgtttagaacctttgctatttgcctggcacttcttgaaacccataactcacaaacgccggggcatggaatcacatcaaagaacaggtgaaaagttgttcctagttgtgttatgcaggtgcatacaactcccgccattctctgtgcaaaaatcaacaaataaacagaggcaccgcatttcggattctgttacgcactgtttgcaatggcgcccggtattcgtagtttctgcgaggggagccgccagcgcgccaaccctcgctgaggaggaagaaaactacatttcccacagaggcacgggggcgaacaccggccgggctacgtcattgcttgaaccaaccaatagcagctccgggcggcagtgaggcaagcgcctcaggcgccaaagtggtttttttttttttctttttttttttttgccggagtcgagcgggtgctgctagcggaggcgccatattggaggggacaaaactccggcgacagcgagtgacacaaataaacccctggacccccttgttccctcagctctaagggccgcgatgttgtacctagaagactatctggaaagtgagtgcgcggcgctggcggcggccgccagtgggacgtgcgggcgggcaagagcgcgagtggacgggcagcgagatggcgggagggagggggcggcgggggatgtttctttctcacggtaactggcagcctcgttgtgggctgccggccccctcgacccccctgacgcacgcgcgcagtgacgtaagcgcgtatttcgccgttggccccgcccctctgacggactctccctttgacagtgattgagcagcttcctatggatctgcgggaccgcttcacggaaatgcgcgagatggacctgcaggtgcagagtaagtcggcgcgtctactactcctgttcgctgcgcgcgttcagtgccagacttgcttgtcatcactgctagcgcctagtgctctttcactgtcctctggctcactccgctagtgcataaggagttgtcaaaaagaactggcagccctgaatctcgccttccccttccctcccatgctacttttttctggcttttgcaagagcaggaggcattgggacacgtgtattcctttctagaatgtgggattgtgcaaaaaatatttctctaccgtcattgacatagttatctatgtttcaatggacgtcagcataataaatgttgagatgtcgtcttgagccttttcgtatcgaacttagatttcagcatttatacttattttaaagttcatcctattcacagtttttcaagagtggaaagcacagaagcagaggttatatatagctctttagagaccatggcaaatgtcaaattttgaaaacttagttacacattagatacattttaaattgtaacagaatcgtcattttcttggttaaaatgagtgacagaaattagatttcactgtaaagtttcttatgtgctgtactaaaaattttagcagttaatgaacatttctttttctttcagtgatagcttggtagtctctaggactttttccccaaattaactttgctctttcatagagcaacgactataaataggtggctcagggaccacctgctgcagctaagaacctgtccttttcactgctcctggcttctctgcccatgaccacacacccacttctataccctttgcttatgagtatatttttccggtaagttt

SEQ ID NO: 49542 - DNA, 3902 bp, Homo sapiens
ctacaacaccactgttcagccattttctcttaaaactcttttggcttctaaaagtgaagcatcactttatttttctctatcccatttgtcataagattaaggactctgaacctatacataaaataatattaaagccactggaggcgatacatgcaagggcttgggataaatccagcttccgtgtgaatatttcttctgtaatgtgttaattaatttgttctataggatgttaaaagggtttctttctcacaagcaaggaactctagatgcccatttctctgaatctgtgctagctgggcacccctagggggcgctccgtctctcaaaatacaaggggctgacagcagcgtgcctctgggtgaggctcactctaggggtgtggcctcacggagaacctcaacccacaagagtttggcttagaaacaagtttgaaaacctcttcaggtccagagcctttaaataatgcctgctatgcgctaagacagccctgggtatccagagttcacaaagcaaggactgatttcctttcgccttgacagcctcagcaaaagtggaagggggtttgcagaattgcactattagcagcgtccacccgaaggtctgcacagaattagactgagctgattctggacaaagcccactgtgtacctttatctactgggcaaaagttacccccaacacctgctataatcgactcattttaggagcaaaatgtcaggccatgaagcatcagatcattgaaagacccaattaattagtccaggaaaggagtaataagaacatctgtgatctgagttccatactaagacacagagagacgactgagttattctggtgcttgctgtctgaggtccagacagtacttgtgaccctcttatcctcagaagagtaaccacaattccctggagtgaagaatatcccaattcactcatggagttcactttagtctcattctcgacctttgtcaccaattggctaaggctatttgtttttccaattctgtattaggaaaaagaagttgcacagaggatcagacatcagatacgtttctaaattctgcagctctgggtgggcagcctcatttggggaaatgctagctgctgtttccaaagtggggaagcccacggtttcggacacagggctgacagcgctgctccagcagcccccagggccagaggaacccggccttagctccgccccgctctgcccggccccgggtggctgcgatgccgaggtcctctgctcccgccgggcgtgcagcgggcgcgcgcgcgtgtgtttatgtgtctgtgtgcgtgtgtgtgtgtgtctctctctgtgtgtgtgtgagatgaattggagtcatacgactgggtgtttccttccgagtggttttcatcagcaatccattaggaaatcatggaaactttttttttcctggctaaaaggatgaaaactgagtaagtacatagaactttgaacttgagacggaatgaaacaaattcaagcaaaaaccctgacagtaaccatgtccattcaaattgcgtatgccctttttatgttaaaagccgtgaatacttacaggacagtgggaatttaaaactaaatgaagggaagcatacaaaaggctgaaagcaagactgctttaaaaccggaggaaaattgaggaactgctaaggcaacctggcctgagttcagctgtgcaacaggcactttgggttttaatcttttgcgttcttcaatgctgttttcagactccagatatactttggtattgttttctctcttcctgcaaagctgaggcagagtcggactcctttactgtgagttgaaagatgtgagaataaggcattgctggaagcaacagtttggcagcctggggtacactcaggttattcgttacaactattattatttgatgtctttttttaaactcaggtcatccacttttgactgtcatccatggaagagctcttattaaaagcctcagactttcgggacctatgattctttggcacaaccttttggaaaattcttaagcagggatgaagcaaacttgattggagttggggaaaaagaagacagattagtatttttcatgctgacaaaaaatagctgctatgacttttcccgcaacgtggacaggggccaagtgaagctgaactggtcatggtctgtcgcccagtgttcccttgtcgtcggcgattttgcccccgacccttcttggtgggcttagtggtggcaatctgtctcttctaccagactctgaccctccgagggtcgaggaagctcacagccgctgcccctggggctgtcccacacacatccactgaaacccaggcaagcagatgcaagaaaggattctctcaggacaaacagtgcttccttctctctggtaatgcccaggaaaccagaaaggtaagactctcataagcttaacggagacagtttctgcaaagacagcaatctgcttctctgtcctttctataaaactaaaattaacttccatgaggtctgaaagggatccagagtgtaaacagcctagagagtgacctgatgactgggaaacacgttacataagcttcaacttcttatagttacttccagaaagttctggcattactttatctcttaggatttcacttcatttcagtggaatgaagtagacagtttggaggaggcataaaatgatgtggattctttctaaaatatcagtattctaagagatctgaggatttacaattcaaaaacataaatcaaagtttcaaaaactttgataaaccttgagtgtctcttttctcaaggcagtcagtatgagtgcccagaccattccagactcaaagattctccaaagtttcattttgtaactagctagattgattcttaattggtgaccacatttctaaagcaatatatttacttcgaaagcattaaaataataggataataggtttcttcaaaagaattgatacaatgtattttattgtttataggatcagggaaatacagattattctatatttatactattcagataaacttactaatcttacttgtcaaatattgaaaaaaaacacaaaaagcacacaaagtaacacaggatttctattttaatataccactctcctcatgcctatcagtaatataatgacctgtaacatagtcaagtgtaaaacagaacatgaagaaataaaaaaaaatccatgcaaaaaagatcatggtggcaaagctactaaattttatgttacaacaagtagtattgtagcaacaaaatagagggctctgtaagtagcatcttatatctacagtagattctggtcgatcttatgatgccggttaccgtttgaagtagaatttctacttgaacaccagctccgttgctaccattattaccaaaacctccacgattgaccagcaccacttcttttaaaaactcttttatttatttcgtttcagactactgccctgtgagacaggtacagtagataggattattagcattttatgaacaaggagcctgacagtgccatttaggtaggtcacatggttagcattatgacaagatgcatccccagagcaatagctatcaagctgcttggttcctactgcagggctgatgctccaaataaaagtcaattcaaagcccttgtaataatttttgaaaccacaactacaagaacttactgaaatacaaaataacattaagttaaaacaaggaaaattttaaacttttaagtgacttcatttgttatccgtaatgccaggaaacatcctgaccaagaactatcttatgacaaagaatagtagataatataagttgaaacactttaaaatgaaactgcaactgaaattgtacatctatttttaggcacagtaaagttattgaagaatgtgtatttttgttgttgttgttcatttatact

SEQ ID NO: 49543 - DNA, 715 bp, Homo sapiens
cctggagatgcagagccacctgcatgaaggatgttggctatccatccttaaccatctgttcagctcaagggagccctggatttctggggaaaatccagatgaactggttgctacatgcatctgaatgccaaggggagaaggcaggagccagagatgctatgcatgggattgacaatgttaaacagttgaaatgggcttagaacctatcctcctcctccagggggtataaatgtggtgactggataggcagtggatggagaatctcttaatccctaaatcagtgcctgaattctacccttacatccggcaggtgttccattaggctggactctgcccagaggaggacatgtttgctctgtgccagaaagagattctaggccggctgccacaagttcgttcatgatgacccattgcagaactctgggctgtgtgtgtgtgtgcagaagtgaaatgcaaaggggacagcagagctaggagaacaactgaggtcacaaactgggcaggatggaggtgggaggatgagaagcacattttgtggttgggaaagtagatagagaagaatgaaaattgaatggagaattaaagcaaggaattcaggaatttctaggggaacccttggaagaccctaagagtagacacttgtgaccatattttctgagcgataaacagagaatgtaatgtttcataaagggctaatatcctaatgtgtgaattt

SEQ ID NO: 49544 - DNA, 495 bp, Homo sapiens
ttggcaatgatcaataatgctgaaatcccataattctgctgtgccttttccccatatagacttgtcacagactttatcttcagtagtaggtagagacaggaatgctaagaaaggagagatgatcatgctggtaaatgtggctggaacccatgcaagtgaggcaggacagagtgttggctagatgcagtggagtgattggagatcgcacgtaaggctaacacagtctgttccattccatagccagagtgtacctgacattagacttgtgactcacattgaagggcacacatccacggaatttttactggctagcacaaagatttatttttatcttgccatttaatgctttgccttttgaaaaaaaagtgtcatacttgttagttggcccaaatttgttgctaatgttttttgttgctttttattaagtttgctcattttgataaaagggaatttttcatcatatttgaaagacaagtataaaacaaaacataagag

SEQ ID NO: 49545 - DNA, 1118 bp, Homo sapiens
gaaacgagagaacagatccccaaagaagaaagagacactggacaaaaacaatagatgtgtattagtagaggtgtttgaaaaatgtttgttgactgcttatggtaaagcccatggaattcttaggcagatgtagtcctttcaaaatcattttaaagtaaggaaatattaatctttccttcccttcagcaccaagaactctgatactgcccactggctacccaggtgcccatctgctggtctatatgtagaattgcctttctgtgccatgcttggttctttgtctcgcaaaagatagaccaggctcacttagccaaaggtgtctcttgctcctgtgttgctcatagctttatactttgctttggcatcaggccagtttaaaagtccactttccagaaaacatttggcagtttgctgacatctctgaagttgtgcaaaagactgactggctgagaaagctgaataacccctctgctctttggtagagtaaatttcgaagaccccagtgtcaaactgatttgggaaattttatgtttctggtgtttgacttctatacttatgttgtcctgtacagacacttacctatttcacttagagagtttgtcatcttgtgccaaatgccactagaaattagaggcaacattgggtaacacgctgataatttgtaggattctgacaattaattctgattttcaatagaccaaaactgaagaagtgaaaagaaagatattcagttttttgatctaaatccctccagcaggcccgtttactcacgtagatggtaaacatagatgtgtagcagtgtgtctgtataataccaaaacagctggctaacacatgaacttcaagcaattgatattggatttctttgcattacataataaacactgagtagtataccatatttttactttgcagatttggttatcctgttcacctagcctgagtctattaatcaatagtttattcttagttgtgtgtagacatattccatgtctcactatatagcctgtgagaataaagtatactataaaataaagtatattacaattgtttggatcttcctcaactaatacatcgcccagtgattgtgatatgatatttgccccaataaattcttc

SEQ ID NO: 49546 - DNA, 4581 bp, Homo sapiens
aaagctgtcacaataatatataatgtgcttttttgaggcattctgatttagaaagaaataggcaagtaagtacaattaagaggttgagtataatcaaaaaacataatacttgtttttggtttgttttctagataattatggtgggctttatgattttatgctgcaggattattttatagatagattaccctaaaataaagcaggagatgacattaaatttttaacttatatgtcagacactatgtcaggcactttatacacttctgtctttaaaccatctataggataaccatctgtaagatagatatattcatgccttttttagatgagtaaatgaagccttcaagaacctctgggctacacagctgtaaagcagcatatccatatctaaagtattatgctataactttgtgataaacttgaaccactatactgtattttaagtctgtcttataaataagaaaataagaaaggagctatttaaagaaaattgtttcagctaggcctaatgagaaactgaatttacctattctattattatttattattctttcatcaactaaaatgatcctttaaatttcttatttataataatatttatgcataagcagaagttaagtgaatgtgctgaaggcagaagactgtctgtctttctcttgctttgtcttagtgtttgtatagggcattcaacagcagatgggaatgaacagccctgggagagtcagaagctccagtcctcagctctcactggcactctcctccttgagggtcctccttacccttttctgttacctcttttctgatgtgcctactccagactcagctctgcaaaccatctacagcctttctaggcagcatagaaaatttaccaatgcaaaccttacagtccagtcttatgcctgggattcatgatgagtcagatgtgggtgtagccaccaccagcattagctctgggcctccagaataatagtgaccccctcccacatggggcacttggaagggccaagaattagttgtcctagctttttgaagctgtccttctggtcttcttgggagggtttatgatagtctttagaattcactgattgtgctgccaagctggtttgtatagcaccaatctgggaatgttaattaatgaatgcaagtagagccaaattatattttatgggaaatatgtgatttctgtggaattaatggttgttgaaaatagttttcagaatgagtaattgctttgacctgattgcacaggtgctggaggatagcagggaggtacagatggagccaggctgcgtatgtgtaaatcctgtcctgaccacttgatatcccagtgtccttgggcaagttgtaccttctttgtgcttcgcttttcttccatctaagtactgaccaagcccgaccctgcttaacttccgaaatcagaccagattgagcactttcagggtggtatgggactgtagtctgtgcttcagctttctgtctacaatgtagggatgatcaggactctgtctcctagggttgctaagaggacagaatgagttaatacatttcaagtacttggaacaatgcacagtgagcaccccataaatgctgagtattatgattgttttttcaataagtatctccagaactgttagtttataattagtagctacgactttaatctagtttggtgagactcatgtttttaagactcactaacctggagatagaacttggattctaaaatcattacaaaaatatttctttgcctctacctacatttgctattttcaggctccttccccctaatatcctgttactaaccactactgagtcatcataaagcaattctctcactcctatcagactccaaattctcttttgaaaatagatatatattcattgacacctggttgatccagaatgaaatatctataactcgcctatccacataattttaacaaaccagtataataccccaactcttttataaaggaaaattaaggtgaaagtaatttataatataacaacatgtatttcaatgtgtaaatatttatgcacgattacaccatagggtgtaatgaaatagtcagatgcttccactcatctgtagaatcaccatgaatgtgacagctacaaattcaaattgctgtggttgtatcatagagggaaactaagattccataggtcacattgctattggtgatgtgcctttccaaaatggaaacagctctggagaaagtcacaaataaagcaaagcttagtgtccccttgcttggccatggaatttcatttctgcaaaattcagtatgtaataaaactgattaaaatgagtaaaactgagtttatatgcaaaaccacatcaagctctaggttcaaataattaccaactggcttttcatccacatcaatatccattgagacattcaaaagttatgtgggacaggggacaatgtgttgttgcacagggtgatactcagcatcgtagcagctgttgtggtatgagaatgaatgcctaaccatttaaacagatgttagactttataccttaccagtgcattccaaagaaataccagatctatcttgcataaggcacaaatctatttgtggcctttatccattaaatttcagtagcattgctcatcgtagtgacggccccaaatgctccctttgtctcagagatcacttcctatgtattcataagtacaatcctctcatacttgttacagctatattcaccgtttactccacttctgctggagtcccccatggccatctgctgctgatgtacaccactgctcatgcccaccaaaggcactctgcccctgggctccatgtggcatcggtcctgctgctgcagctgcctgtgtctgtgctgaggtgccatgtccagggtcagggacagagattcatgcagtacctgcttctcctcctgctgctgctgaaacaaactgctggtgtacatcccactgtactagtcattgtcctgcccagggcctgtcatccctttagttttccaaagcctgaataagtaaaaaataaattggattttttcagttcagtaggcaaaatccttctttattatttttttctattgtatgtaatattatagtctcaacatctcacagataacttgaaaaaaatgttttagtattgttttagcttttgacctaaaccctggagtggaagtggagcctgtggaatacaagaacagcatacaaaaaagtgcctttcttttttgtcatcctggtatccttgggcttctcttgccatctacctcttttttctttaggagagattccttactattaaacctcatgcatagttctgccagtcaaggccagacacagtggactccttattgaacatggattagtttcacactaaaactgcactatactgataaataataaccgaatagcatcttgtcatctctcattgacgatagggtttaaaagaacaacaacaaaaaatagatgtattttctaccatttcctatttggggggttgtcatggtgtgtttagtacccctgggttttaacaatgtcccgactgagcctgaaatatttctcccgaacagagtttggatacagagctgaattcaaccttcacatataaagccgtaactatttataccattgtgatccaaatattgcagaagcaggaaggtttactttgaatctaaatacagaattgagaagaaagggaggaagatgacatggttgagtagaaaggttatgcttaatctgtcttcttcagttcagtattttgtaatgtttctgtttctacattccttccctcagtcccgtgtaggtcagcccagcagccaattttagaacagttttgtgtcatttaagggaaagaactttcaactgtatttgtagcaggctataaaaagcaaagataccacccacaaaatgatatctaaatttttccaattacgtgatttattggtaaatctacacatttgttgtgccaagagcaaaatgagaaatgtgccaggtgtactcagagttttaattaaggaaaccttacctaatggaaagattttaataaggtattttgttgtttaaaagccattgaaacaacattttaagccatttgtcgataaaaagccctcaattatgtagaatatggctcatgagggaaagtatacaaactggaaagaaaacaaaaaaatttgagtcttatgttgattttgaaaatcatttgggcactagtgagaaacatgtgcccaaatgtcaactcagactcctgggactggtagatactgcaaattttttaagtgatttgggttggaaaagctagattcaagggatagaaggaaatgctgagtaaatgccaacattctccaagatagtggcagtcactgcaagttggaaacaaggtgagtggttttgaagcacagtgctgaaaacctgaattgcaaatcatttgatggataagggtggccatgaacttttgccacttttcactccagatccatgaaattgaatgaacattcttgagtttaccctctctcctaatggaaaattcatgcacttttgctctaaatctgattttgctctgctaccaatgaccatcactcttcactggctgacc

SEQ ID NO: 49547 - DNA, 2728 bp, Homo sapiens
tcctggaaaactgttgtctagagtatggtgggaaaaggactagtgagaaaactaggagcaaaattagagtgaacacttgttgagggtccactctgtgccaggcccaaggcaagatgcaacatccagaaagcaacttcgcctctttgggcttctattttctcatttgtaaaatgaaaggattgcattggatgatcttacttttttttccagttcccatgtaatatggtgtagatgatgtgaatatgttagataggcactttaacttcgttcatgtttttatgctgataaaaattagtcctgcctggatctttagtaattaatcttcctgcttttatggtataaaataagatttaaaaataatgtaaggatgcctcagaacaggtgggattatctttaagagtctaggctcttctcatgttcaatatgagttatgattattcctcaagagagcaatcaaattctgcagttaaaagaaatccattaaaagcgaccaaaacttcaaacagctttcccatatatacttgccaaataggttaagcagcctgctaccaccgtacctcgtgctgggttctccgtagatctcaggtaagctggcctgagacaagttgagactgggatgggaaagatgccaagcaaacaccaggtgtttttggcggcaacactgatacttcagtggaagatgatgtcagaactaaatcagctttcagacaggggtttaggagatagtgctcacaccagagatggagactttctgatgaaaccaaaaataagcacttgctgaagagaacgattgcacatttatttcctgtcatctagggctgtttcagtttctaaggagggcagaccccattgaaaaccgtgactattaagtgaaagtataaactgcagggaaattaactctcagagaatctttataaaaatatattctatcaagttaaagcacatcttctatgttttattttgaaaaaagatcttcctctttgttattcactttgctagttctgagcagaaaagtgcgactgtttctattccctttgtgcctgggtaatggtcatttccaaagcacagcccataactcaactccagcttgtttaatgttatattgggtttgcagccatttgaatcaaacctcatgattaataatatcctgtttttattgtgcttatctcggggtctttaacggagaaatttctggagaaaaaactttgatgaaaaaagaatgtagtattaataagtggttgaatttgaattaaaaactgtggtcctttacagaatgacttctaataaaaacaatttctgccttcattcttttttcttttttattataagaaaatttcaggggctgttaggatcgttgaaattatagatgcagtccacctacatctatcagccagatactatctttcattgaccattaggtcaaattacaagtaaaattaatgaagcagagagtttacccaattcagtgagttattcaaccaacattactagtagtttattttttattaagattttttatgaaataaaattacagtatatctattgtattattattgttcataatttatacctgaatttgtttttcttccatagcctgagaaaactatagagtataggtcagaaatatatagggttttttttttcattttaattgtattagtccataatgggagctatacagagacctagtccccagaactagaatgatgcatccatatgggttggtggtacccatcgtcatggatttggtggtgcacctccacgtccatcaaagaaaaataaaaattttggtcttgttgaagcacaaagactgggcaaaatgggcaatgcagctggagagcaagacaaggaagggattgtgaaatgccttgtttgccttattgggagcttggacttgactctggaaatgatgagaaaccactaaagaatggaagacaaatcaacagatttgattttaggaaaatcaatattatagctacgtaaaagcaggggaaaaaacaacagttactaaaataatctcctttctctaagttcagttttatagctttctgtagcaaattctgtgttatcttttttgttgccatgttgttaaatgtcactgaacattttatgtaaggcaacaccaagatacttcaattttactgatttttatagaattttgtatgtttatctttgttagcattttgttgacaattggaaagtattgatggaatgaaatactccttgacatttctttgaaaaacactttgttaagcttttgggtaatttgtttattctaaacattaacattgaatataacttaacagtagctggtgtatgtgcctataaaacaattttttctttctttctcactgaaataaagctgtaaataattgggctaacaaagagaaaggtttttttaatgcctcagaatcaatgatatgaagtaatattctagattctatgacaggatggagcagaggatagtatgtccttcttatactttatggtactttcccaagtaaggtggcctgagcatggagcagtttcaggatgcctttgtttttgtgtctgtttggtataatgctggagtttgcagtctttgccccacactgcctataagatactatatcaatcaagtggtatttcaatgacactccacattaagaaattttcctcattccttgcgggtcctcttctgccaccatcccacagagccatcactcccacttacatagttgcttgatat

SEQ ID NO: 49548 - DNA, 963 bp, Homo sapiens
attatgtttctggagattcaaacgttatacttggatttttgactgcctggaggattggcattactaaccaccacccctcttcttacctcctgctgttcaagggtcaactgtatatactttacatagagttttggctccaagagttaatttgtaggttattgtttggaacttgtcattaatttctagtgcgtgtatagaagtaaatttacatatgaggttaggttttaggtaagcctttaaaagcccacttaatatacgatatcattaatatagtgacgggggcagtcataagaaaggggtcgagtgcaccagggagccctgcaacaattacgtgtggggaaaaggtttgaggggccaacattgttaatggggaagataccagtagaggagggtgtgagcaacggggtgtgtttctagctgtaggattgaccagtagctctgtggccagtagccagttcatagttaggccattggtgagtcttgtgttccaatgtcacactgaactttggagttaggaggatctttgacatctaacacctcaccctgcatatcagtaaacctcaataatttgccaaagtccaccatcaataattgaccaaagttcattgccagtcaatgaactttgccagcagagtaaggttgagaacccatgaatcaggtatcagacccgctggcagtttgtagttgtgccttatgtagaagggctatcggcatccagacctagacacggttcttgagttcctgaaaatgaataaagtgaatgaataaaatgagtaaaatgaatgcaggattgccagttcactgacaatttaccctccctggctgaaaaagttccccatttcttctttagaatattctttataatattgacttagctcttctatacccttactggttaaatcttagtggcattgtcttgatatcataaaatataaaaactgtaaaaaattttttgatgaaagg

SEQ ID NO: 49549 - DNA, 559 bp, Homo sapiens
cctttcaattagtgaaatcacttaaattaacctccaggctctcttaagatgctaatatctttgggagggttggggctattagacatttacgatatgagtgaatttaatcacattgtttttctaccaatagctggctaaattccatgcactgagtaaataaggggaatggggtgtaattttgaagggaacccttttaggaaaaagattcctgtggaggaaaggggagcctgagaagcagagggacattgactgcctaagggtcactgtgaccgagcgctatcctgtgccaacttcacctctaaagactgaactttaaaatcacttatagttgagcaatggatttggcatatagcttctctgaggaattgctagaggaatttgaactatttacttgggaaagcagaaacttcagagatgacctgattgggctactcccatcacccactgttttgcattttatcaatacagcatagtcagaagacctaataaacacatttcttgagcctccatctggccatttcctggtttccaccacggcacaaagcagcacaagattttc

SEQ ID NO: 49550 - DNA, 1321 bp, Homo sapiens
attcggatgatagtcattttgttttctattttaagagactatgataattatattaaaaataacaacaaaattttaattttacacattagatgctgtgaccttatgttttggcagctttaaaactatgtgatatgcacagtaagtattttaaaacacattttaattttctccaggactgttagtactaatatgatatttgtacttagtttaaatatttgtactaagtttatttgtactaagtttaaatacgtagtagaaacagaaaagcgtctcatcaaaatacttatttctaggcaatttagtgagttgctcatcctttttgcatcacctcccaaaggtcatcaaagattgagaaattcgactcactatttagaggcaggaagtgatctggaacactgattaccttaggtgatttgagggaagaaaaatttgaatcctatcttcagaaacctcaaatactcctcaagacaagcctttcttaaagaaagttggctaagatgtctcctttttgaaattaatttaaattttactatagaccagatgtgataaatcatgacatttcttgggggcaagatgatgacacgtggcacagcatgacaagggacacagtgatacacaaggaaaggactaatttactttgaaagaataaataatattagcaaatacctccatagcacttagtatatacccgtattagtctaagtaaaaaatatatagagagatacatataaaaattcaatcttcacaacaacctcgtaaagtaggtacattattgtagttttcgttttacagctgaggaaactgagacacacagtaagttcccagcccaaggtcacacagaaggaactggcttcaatgtctgtgcccttaactaccacattgttattgtgcttctcacagtatcagaattgtcagactgtgtttacaaacatatgccatttaaagaatttaggggatttgtgaatgtaatgaaagttacaggatgttcttcatggtttggttatataaacttggttgaaaagtagggagcgaagtgatgggagagctgagatcttagaatttactatgaaataaaattaaaatacactgcctcttgattactaagcccaaagtgacttacgctgacttctattttagattgcaatgtggcttacagttggattgtgcaagaatctaataaccattccaaaagaaaataactaggggtaaagatcaaactaatttagtgtgacataaaataaatacttacatcctttttattgttgtgcttacagccaaatgttacataaggtgttatttttaacagatggattaaaattta

SEQ ID NO: 49551 - DNA, 708 bp, Homo sapiens
tgaggattttgaggaacctgtcctgtgtccctcttacaaagttcccattggtaattcagagaggtcctcaggttgagaactgctggactgaactccttttattggctccaactcttcttatttcttcctatgaagaaatgctagtctttattgagttgagaaaacattacaagaatctgtgaaacaaagcttctaatacctgtataaaactgaaaaccttgtgactttattggtaaacagccaagaaacacaagagactactagtagcctctagaaagaggtacaggtcgatgaagtgaccaaaaccggatgctgatttgctgattctgccaatttcttgttaaatggctttcagtaagtgattaacttttattttctaaattcaatagagatctgctggtactctgtaagatactgtatgactaatagtaacggttcccaagacttaagaaaacgtaactgcaaattggccacaagtccaaggggtcggggcctctgctatcagcattgacctttactctcgggagttcatatttccatctgtaaaactagaaaagataaagggacttattcactgagctgttgtgagaataaatgagcacacgaaaccatttggcagtgcctagtacacagtaagcaatctaatattatttatgtcattgtatccatatatatatggatacatacatatatatggatacatggata

SEQ ID NO: 49552 - DNA, 1827 bp, Homo sapiens
tatattacaggcaataatattttttcttaaaaaaaaaaaaggtagaggatgatggaaaccgctcctcccacaagtaaaacagctggagctctcaatctcaaattgccaatccgtcactcacatattcagatctagggccactaatcatcatccgtggtcccgagctgtgagagcagtagcaaacaaataggaagaaaaagaagagacaccaaacatcaaagggctggatagcttgtaaaaaaccaaaagtacctctagtataggcgacactaaaactttacaagtgagtcaaaacggccccctatggagttggaatgcaacacccaactccgtccccacctctcggagctctcagcctacacgctgcaggggcgcgagccacagccaacctggggaagatgcgacccaggtgcccgccccaggccggggcgccgagtgccagcgccaggtgcagacgccgccccgtctccgcggagcccggggatgcccacgccggggcggcggccgggaaccccggccagcggctctccgggaccccagtcccgcctgcgccctctccaacgtccggacacgccgtgacaacgcggccgggcccggggcccgcccccggccggtgaccgcagtgcgcggaggctgaagtcgtaggtgggcgtctggcttccccggcctcctccatccctccccgaacctgagccccggctccgtccgcctcccagccgtctcaccggcctcccgcccgcctctccgccgcgcgcgcccgccttccggcctcccagcgctcagtcctgccggaggccgacgggagccgccgcctccagctcgcgcctccgcttcctctcggactcctccggctgcccctcaccccggcaagtggccaggagaaagccagctcgccgctgggcctcctcccacgcttcccggccgcgaccaatgggcccccgccgccgggaagccgcgcccgccccctggcggtggaggaccaagcgggcgcccgggccggccagagggaagggccggagagcggagggaggggtctgcggtcccgcccaccgcccccggccaggcgctgcacaatctgaacttgccacgtgggagctgccgccgccgcagcggccctgcgccgggtggcactacgggagggagaaaaatgtgtcaccgccgtctccccaccgtttacacgcacaaaatcccagcctcaagggcagaacattttaaatgacccacccatcctagagatgcgccagttaggtcatcttatatatcttgagatagctgagatggtcagatcaaccaaggaccttgggttatttgccgtttgacttcttgaaccctaggaaactgattctgaaaatcctactgtccagcgtcattagaattctgatcacctttaatgcaccacccaagaagaacagtagtccttgcattttccaagtcacgtttattttttaaattataagatacacaatcgttagaaatattttttctcaggagatttcctacaattgtgttgataattgggaagttaatccaaatcttactacataagaccttagaatgcaaaattatttcataattcagatccatattctaaaataatgaataactgttacctagtatttgacagaatattgggatcatcagtggttgcagaaattaaattgcatttaaaaatagggtttgactatagtgtgttaatatagaattaataatctaccaaattttagctttcctccaaaaatataaaacacacaaactaatagtaactatgaattctggagtttgtgatccgtgatcaggggagaaagcatgaaatgaattctcattgtc

SEQ ID NO: 49553 - DNA, 723 bp, Homo sapiens
caatttttttaacattggtaaatcacttctttaggactcctgttaatcagccagttcttacacctataaacgagtaaggataacttcctacttttacttggcaggaggtaggggagccaggagaagtattcaggattaatgattaagcttaataaaaccacagagctttacagctccaggaggtataagccaaaggtgttggctattacaataactaccgataatttatattatataataatagctactgataatgtatatttctaaagctgatatttattgtgtgcttattgtgcaccaggcacttttctaagcactttatatatatagacttatttaattctcacaataatcctataaatacagcggagaaaagtgaaacttgctcaaggtccttctgctatgaccagacagagctaagattcaaactcacgtgctcaacttcaaagcccaacttttttgttgactcgaaaagaatatacagagagtgtgacatccagcttctgagtgtcatccttcatagcacaagcaacaaaagagaggattaaatatggatgatgttgagaaaggcaagaagatttgtattcagaagtgtgcccagtgccacactgtggaaaaggcaggcaagcacaggactgggcctaatctccatggtctcttcggatggaagacaggtcaagccgttggattattttacacagatgccattaagaacaaaggcat

SEQ ID NO: 49554 - DNA, 1049 bp, Homo sapiens
gcttcccaattcatacacaaagcagtgctttagctatgagactttgaagtaatgggcttaagacattgttcctcaaagcagatgtttagaattatattgacagaaaagaatttttgagatcatattttagcctcctgttttataaacagggaagctgaaactcagaaaatgtatccaaaacacagatcaaggtagtagtagaaatgagactagaattcagggtactgactctagaattaatgctctacaattttctacatggactgttacttgccatagatgcaagagcctggatgccaggaatggttcaaagtgattctacatctattccctcataaatactacccaagagtgcaatgtattaggtactatcatggcttctccattttagggagaagtaagcaacacaggcacagttgtagtaactcacttagctaaagttaatgaataacttgctgaaggttgcacactagtgaggaatgaggttggactttgagcccaggtaatctggtttcaaaggctgttcctctcaagtcccgggctccaattctactgcttctaagtactctgtgtaccaccttcaaaacagagaatagttaacttgaaggaaatgaaataacaaagctcctaattatttcctacctcttcaaccaaagataatctttagtttttggcaagagggcttttgataattaagtgctttacccagtaagtattacaagctccagccaatgtcaagagtggtaaggtatttaatcaggaaagacaattgaaaacaatcttattcttatcctgctattcgtagagctcaagggagagtgaatgctaggaaggagagccaggactttagtaggtgataaagtactaacaaaggggcagtgtttcagtaaggaaggggatagacagcagcatccagcacagaagggaattcaaatgagaggagaactgaaaagtcgttattggatttgggaattaggaagcttttagtgagttttgaaagagcaaattcagtggaatctagcctgcagagggccaaggaaaaaacataa

SEQ ID NO: 49555 - DNA, 2064 bp, Homo sapiens
ggaccattccgtcctgtgtataactacatctcacagctgcaccttccccactgataacccacaacatcaaaaaatgttaatccttgttcaagttactgaactaattcattctctctcgcgctcgagcgctctttctctctctctcttccgctccccccacccccattcccctgaaatcaatgtctgaaaagcacatttcttcttctgaagctgtcaggatagacagacattcagccccattcaaccgaggagggtgggtaaactgcttctccccgcgccccgtcccgcgcgagcgctcacaatgggctgcatagtcccgcaggggctgaagagttcaggaaacccagacttgcaaggcgcccaacttccacccatctccgatccttgctggagaatgggtctgtgtctcggagagtgggcagcccaagatggacaaggagagaagtttgtgatcagtttggctaagctgggcgtggggagggaagggggaaagaaccaccccgaaatctccatccaccgccccctcagccagccgtcccctctaagcacgccgtccacaaattaacaagccgttgtttcctcagcttcatcagttctttattccccagccacagcaccaccactgtccgccaaaaaagaaagaaaagaaatccgaattgcaatccctcgcctttctacttagaaatgctggagctgcgctgaccgctctccctcccttcctcgcagtgaaactctctgcgtttccgctctccctccattcctcgcagggaggcccgaatgctcgccgccttctccctctctcggcccggccggggtcgcctcgcggcgccgggacccgaaggccaggctcgcgggcccctcccagcgacagcccgagcccggcccgctatctccaccgcatctcacaggctgagcccacccgcgcgtctgctcagctctccgcggggacctctcctctcctcacctcgtccgctctggggcgccgacttgtcccccgccgcctcgaatcttccgagtcgctgcaggggaggctccgaattcctagaagaaactgggatggaaggccgggaagtaggaggtgtttgctcaacttctgaggacgtcacgcctctgcctcccgtagccaatcagcagccgccctgagggaacaaccttctcatctgccaatcggcggcgctgccagttgctacgtcatgcccggcccctgctcctccccaagatccttctgtctctgatctctgatctctgacctgcgttcttagctgggacgtcgagttctcccaggataattatcgaccaggtttgtaactgtccgtggcagaaggcgggcggggacggaaagcaacgaaaatagtctgggcattacgctctaaatagaggtgcacatctcctggggaaaagttgcgagcgccggtacctcacgtttgtttagctatagacacttttcaaagcatttcaccgccttgtcacaaccctgtgaagccagataacagttcttacaacagttttagaagccagcaagcggagaatctgagaaattaaaactgagtgtgttcatgtgcatatggcaatgtccaatgttattgaaaagtcctaactacctaggaggcctggagggagggggaaaacgtatttcatagacactagccccagcactaggaactgaagaatcgtctgaagcccagctgtgattccccaaggcgtcaacggtcagaagttaatcttccctcctgtttttacaactttctccaccacttactcttcttatacctgccatagatgtatttagctactgaactcctatgtcaacaatctatagccagaacgttcttgagactccactcatatctccaattgcagagaaaattatttatttatttatttgtggtagacatggggtctcgctgtgttgaccaggacactggtctggaactcctagcctcaagctatcctcccacctcgtcctcccaaagcactgggattacaggtgttagccactgtgcccaaccccaaattagaattttatctgtaagtagagttggaattttcttctgtatcttcagc

SEQ ID NO: 49556 - DNA, 825 bp, Homo sapiens
agaagaacattaccttcaagcagcatttactaagcttctatctgtgcatattttggggaatggcagtatgccaagaaatttcaacatatataaccaacactcagggggtcaaaatccaaaacaacaccaaaatccttggttttctaaaatgaattgtgaaacttcttcctcagttattgtctgctatgtatctataggaatcggctttcccttctaaagaaacagagactccatattttgcatgtttcctcacactgtgatgtgtgcagtgagaatgcagagatggctaagaatgatatttcccaatgctcctgcacctacctgcacatggctatctgactaattctcaccaatgaaacatgagagggagggtcctcctttgtggccaagagttttaggaacctcatgtaacttctctatctcttttctcccttccaccagctagagtcagatgattataagtccctggaatgatgatgccacaagatggaaggagtctagctacatgattcattgcatgggtaaaagccaactaggaatgtccttcctcaaattaatatattacccagagataaacacttactgcctggaaaaaaatagcctggctcttcttgttccacagccaagcattatgtaattcaatgccctacataaaggaatctaatacacatttactgaatttaaaatgacaggctaagacaggcatttaaggtgctgcatagaatcccaggcgcattctatctaatatattgtagttacttagagtgagaggggaagtgatagataggatgatgtgtaaattaggagcaaggttgaaataaaaag

SEQ ID NO: 49557 - DNA, 569 bp, Homo sapiens
aggctctggtaagtgctttccaaaaatatatgtgaattttttttttttttggctcagttggagttacctgattcataggtcactagcagggggcacgtcattgtgggtcccttcagagactgtcctcatgcattcatcagtcacacttccatatgttaagtatcacatagagctggagctacagtacaagggaatttgaacacaaaggcctgaagttgaaagccccaaaactgaaaatgctccaagtaatccatgactcaccttgtttgtataattgcaacacacaaacatacaagttaatcctgtctggagtacaaagatgacatgagccaacgacttcatggctaaactcctggttgggtcaagattctgagtacagtacaactggctttgcaacagtcagatgatactgtatctgggctatctgatatagaagaatatgtagagaggaaatgtgagtggcaaaaagaatatcgaattcccggcccaacccagaatattctaagtgttggcaatagtagaaaaggctatggctgctgagacgtccttccaacaataaaattgtctct

SEQ ID NO: 49558 - DNA, 756 bp, Homo sapiens
cagcgtccgtcagccggggctgggttgcgccgtccgttgccttgttccctgcttgtcacagacctgcggagagggggacgggcaccatcaccaccagtagcctcctcctcctcctcctccccagcatcaccagccgaacctgcctgcccagcccaatggactcctgccagcccatcgcagagttcttggcgcaccaatgactcggggacaatcactacttatttctatcaatagaaagtgttgtgtcaataacgcagccaagatctcgccaatcgttaacttccaagaggagaaggtaaactagataattgctcaattcgcttccaacagtcaacaggaaaacttttttttttttcatctgcagtcagtaactacttttcattggtgagtgaggttccccgcccagaaaaggcgggggcgctttcacccgcttggcgcgccctcccctctgcgcacacactctgccgcgcacacttcactaccctccgcacccccccatccccaccccccttttgcttcctctgcctttctaattctcaatctgcttaaccaggctttagaggccaagcaaatctgagatcaattttctcgtttagctctaagtgacatcatctaaaatcattgtgcaagggctaaataaggaaacggagtctaattcaggggcaaacgccaggctatatttatcaaacgccaagctccagaaagcctcggctaggaagcctcggcagtgaaatccgaggtttcgctgcttggttc

SEQ ID NO: 49559 - DNA, 852 bp, Homo sapiens
aagactggatgaccaccggcctcccggaaaccccacacgccaggcctccaacttcttcacaaaagtggggtgggtggcggagggctgtggcgggggcttggagctgctgagagccgagaggcgcagagcgcaagctggcaggctgggctgctatcccggcgcgcagatgccccgccgccagtcgagcgcgaacatctctccggaacatcgatctatcacctccctttaaggacccggaccgggaaatttccattttctgttttgggaataagaaataaaagcgaccaagctcttgccctaatttccccccgcgggcccttccacgcgggctggcgggatcagaaggacgggtccgagctcgggggcgcggggttcctgtgaactccgggcttgctcggtccggtccccgcgcctgctgtccccaggccctctcgggaggcagaccgcggcagcgcaaaggggcttcgaggatctctgagcaacgacggctgagtgacctctttccctctcaagcacaccttcaaggagccggtggaccctctcaccgccggtagctgcaggctgagggcggcgccaggccaggctggactgtgaccctgggtggcggggtggcagcacatagacgctttgactgggcgtttattgcaaaagaagcgggaactcccttctcctgagagagggacaatgagcaaggactaaagagaattcaagtggaaaaatcagtgaatacaagaaagacccactgctggagccaagaggtttacattaagctctgcatggttctttccttttccaggaataggcattattattttttttttcttcaagtgtttgaaaaaattttccttcttg

SEQ ID NO: 49560 - DNA, 610 bp, Homo sapiens
ctggctgagacattactgctcttattcttacctgttcattgttttttctcaaggaccccttaaaaccctttgctccacctttgctctagcttctaatttcttctctgtggttctagtgacaggtatttagttgctctctttctgtctttctctgcaatttcctgttttgaaatgcacatatccaagctcttatttcagggttaacagcaatgacctcgggagctagatgctgtggacatgacaggtgccttttatgaaagtgaactagcaagatatgcaccaaatagctggcttggagccacagagagcatctggaatgacctttgcctggaaccacagcctgcttctcagctctttccaagtgtctcactttgcagactgttgggcaactgggtcatatacaagtgaaagtaaatagtgatacacaaaccatcaacaccacaagctactcagtgtcagtcttgctgacagtgaaggtcctgcataaagaataataatcagcattgcacatgtatatatatgtaactaacctgcacaatgtgcacatgtaccctaaaacttaaaagtataataaaaaaattaattaaaaaataataataattatatgtat

SEQ ID NO: 49561 - DNA, 1446 bp, Homo sapiens
ctctgtctcacggatggtgagctgacagctcctgccagcccaggcggggaggaggagaagaggtgtccgctgcagccgcatacccggcgggtgaaagcaccgtcttgtccccaaagattcctctgccctcagagactaacaaaaatacggtgtcctgcgtttcgcagaaggacgggaggcgtcccagagctctcccgggagaaaaacccagggagaagtggtggtaggaggcgcccggtcccgcaactcaccttctgctgcctccgggccatgtcggtgggctgcttggcgttgaaggggtacgcgatgcacctcacgacgaagacgtagagctgcaggcggatcctccgctcctgctcatcgtccagctgccgctggggctcgtctcgcccctcgctgagcacagaggggctcgggctcacagatctggccgcgccgccgccgcccgcgcgccccggcgcgtcccgccgcccttcccgagtcggggctggaggagctcgctgcgagctgccggctgccaccagcacatcgcggctttcctcttccagcccctcgtccgactcctcttcgctggaagacgggtccagcatggtgctcggggatccccgccgctcggcccgcggtccccaagcgcctcacccccggcggctgcgcccgcgggtctgagggagccgcggggctggctgcagcggccgcagaacgaaaggaaaactggccagggctttccggacacgtcgagttagattcaggagtgtttcctaccaccagggcgaaaggggcgggcaggagccgggaggaggattgggaggggggagagggggagccgccgggactgaataggcggagttagcgttgggggtgagcttgggcgcctcaggaattgctccgccagccccgggcgcgccgacccagcggttccccagagcccgccggcagaggcggagccgcccgagcgcccggacgcaggtggggaacctgtggcgcctacaacaagcaacacgtggaattgaatgttgaagagccgcgcggggccgcggagtgcgcgtgcgcgcgccgccgctgctgcccgggcccgcctggagccctagcacacagtttgcaaaggcggggagcggccgagcgcgatggcccgtgtaagcgtccaccggggctgctccgactaccctcaccctaccacctgtgatcttttctccagcaggtggaggtggaatggggagcggggagggactgttccctagcaagaggttagggggagcggccgagacatctccccaacccgaatcggctgcctaggattgaaccccagcgcggaaaagcgggactggagcccttcaccacgaagtatctttgcgacaagactttgaaaagtctcactctgctctgctgccgttttgatactcatgctgaagcccaaattataaaagtcggagtaatgaaaaaaaaaag

SEQ ID NO: 49562 - DNA, 2035 bp, Homo sapiens
agactggcttggggatttccaaccttggcctggggatttccaggagacaaggctacctcagatgcaactttcataaacaaaaaaggcttactctttccagaattgtttaaactccctttatgagagaaatggctggtaactcacctgggctgagtacaagcataagtaagggggaagggtcctttaaattctgagactggtcactggacggaggccctcctggtcagtcagtcatctgactgcatctggcccatgccactggcctgctcttcatcttcatcttggaaaagtcagaataagctgttgagcattagaataagctgtctaagactcatatttgacattaaccaaatgaaaaaggagaagctgttgagaataagctgttgagcattagagtgtctaagactcatctttgacatgaatcaaatgaaaaaggagaagttgcccctggggaagctggttaactaggaccacccaggagcctcaaacatgacacatctattgaggattttgtttgtttttttaatctcagtgacaaaattccaggatatctaactagttttattttatactttcctgctcttgctttatattttgaaaaataatttgtttctctttttttgtttttttcctttcctaacttgttgatttccctattattttcatttcttctgagcggattttgtcagtctttctttagtgtcttattgtattttgaaattttattttcaaatttattctgagtggtagctttattcttgtgttttcttcttctgcactccttgtttctcatctagcacttttacagttgcttccagccagttcctagttcctggttcagatgggtcttatcttgacaccctagagttcttttcttgccagcataacatggatccagtcatctagctgagttgggtagtatgggtgaggtcttggctggggagctgggcagtgtttgcttcctgtgagccatcatagccagcgatcaatccagctctttctgtccttcacaggtttgagaaaaccattttccagcccttagtttctggcatttaacctgactctggtccctgaatggcatgggagtgctttcaaccacaggtttccacattcatgccacttgtttgcttttctgactcattctgatctacagagatctttatttgctttgtgtttccaatggagaaagagcttgggaagggaggatcctaattgtctaaaacctcatctagactgttgatcatagactttatatatagaaaaacttatttaagatgtgaaaatatttgccaagtagacagataaacctgttttctgacttactataggatgggcaagtaatactcatgaatgcttataatgtgccagataacaacacttggcactccacatgacattttatttaaccctcgccaagattctttggggtagatattgtaattccatgctgaactaaggttcaacgatcacactgctagcgtgtggtagagttgagatttgtccatgtataaactctatcagagtatatatttttaaaatttactaccctgttcccaacatttaaagcagtacttggcatagagtatacggtcagtaacatatttgagtgagtaaggttcttctttctgttctttctaatattgtttgtatttatatatcttataaaacactaaatctttatcttaggcataaggttccttagcatagaaacttctttctctttgccttgttcccttttctctgttctctcctccttgcctggaactggatattttgactcctgccccagtgggtgaatgtgtttacaattttcctgcagccctcatctctcttgctaataaacagcactggaactaaaatgtccacctgcataggtgaattcctccatcacagacattcccacttacccagcccccagttaaaaatatcatagtcatatcttgtcttaaccacctcaagtgcacagctagggcacttgctgaaggggtgaaaaaggcaaagaaagctatgactaggcaatttggataatgacttt

SEQ ID NO: 49563 - DNA, 900 bp, Homo sapiens
cacacagaacccagagtccagcgcggctgtcaccggctctaggctggatctaagcgtcggaccaggaggccgcagtcaaaatctgttctcctacctgtgtacgaaaccaaactattctcgtcgaagtgctttcccaggctcctaagacgcagcttccatactcgccgcgttctcagctgttggtcgtatcctagcaacggccctggcaccacctcttcctgccggagcacggcaggggtgggaaggagaggagccagaggcgggtgggggggaggagccagaagagggcagcggggaggggccgggaaggaggagcgcggcagggtagggggaggagccaaagactgggggcggggccgggaaggaggagggcggcagaagagaaggggatgagccagaggcggggaggtggggccgggaaggaggagtgcggcaggagagaagaggagtagccagaggcggaggggcggtgtcgggaaggaggagcgcggcaggaaataagggaaggagctagaggcgggctgggggccggggtctggaaggaggatcgcggtagggaagaagaggagccagaggagggggatgggggctgcaaaggaggaacgcgatagggaaaagggggaggagccagaggcgagggggcggggagaagaaacatggcaggagaaaggggaggagccagaggcgaagagacaggaagagggacgcgtcagggagaaggggaggagtcagaggcgagcgggcgtggaggagggaagcggcagggagaaggggcggggccagaggcgaaggggcggggaggagggacgcggcagggagaaggggaggagccagaggcggaggctgttaccaactggctacctagatccaagtgaatcaggacactaacttctctccaag

SEQ ID NO: 49564 - DNA, 1532 bp, Homo sapiens
attggagaaaatagagataactcttttgagttatctgtaaagtgaagcaaagaaatggtgtgattatagaagggacaagaagaataaaaaaattttgtgggtttttttgatgaaaacattcgtgaatacagatggaaaagacctaacagaaggaaaagggggcagtacctttagtaagcctaaatatatgtaatccaacgcacctaagcagaaacggtaaggcaaggagaaaagatggaaaacggagatataaatttgagatggcgctgacagaagcaagcacaagtgaagccatgaaaatgtcaaggaaaaagtcaacaagaaaactggcttaataaagaggtcatggcaaaaataaataaaaatgtgacatcggatcaacgaagtaggtggacagcgcccgtgtctcaagagctcacgcggcttgtaattaagggcttgaaacatctgtatcccgttaaccctgcaataagcaaagtgacaggaatttagtcttccttgggaattcaagaacgaagaaagaacaaaggtacatacctcgtgaggagtattgcacacagccaatcccacaaggccagtggtctgttcaaaaacaaaacacgattcatgctgtttactacggtttccatacatccagcacgctaaggaaatacaaaaccacgaatcccccggctaaaactggtctaaagccagctactggtctctcagtctcgcttgtttggagcttttttcctgactctcggagcggaaccactaacctgccctacccggtaaggcatgcagaacgagtccccgaaaagcaccgccgagcccgcgacagtaggggtcaacacccgcgggaagtagggctatcggactgagtctacccccacagtctaaattccaacagtgacctccattcgtctcaccttcttcagcacacccgccatgacagcgccaacgactcggtgacgcacaaccctttgggaacaattctcagacctgctcaatcgaccaccgaggtcgccactctgtcaccctggaaacagcttagctccaccccttcaggatcgccaaaggagcaaagactctgccccgcccatcttaaaagagaaaaattgacgcatgcgcgatgggcatacaagcctaaagctaagctagaagacgattggggaaagaaagggtttcccagctgtctgttcctgttcctgccactgctgacggcttgcccaaagattgagggaaacactcccaactaccaaaaaactccagtcgctgtaggaacctgcactgtgcttaaccgttgatgcattcctcaaccttcctttctcagtttagtaaaatgaaagtgataacggagcttgagcatcctctgaattgatctctcaacagcaagttagttcttcgcacaaggatatcagtattctctgtgtcttacgaaccaaagccctatggagtgtgaggtcattttccatcgctcttttcgatttcactggctgaaatacatcatcttatttccagatgaaatgatatcagaccataccactttttcc

SEQ ID NO: 49565 - DNA, 1140 bp, Homo sapiens
gtcttaattcacaaaaactggcagaacttagactaagatacatattctctccttttaatccaagtttgtttctcttagatacacttgaaatgcctttcacaatagtgaaaattaagtactttgttcgcaaaaggaaaaacaagaaaaaaaaagatcaaccagcttttaaaaaatttattgtgactcaaccttaattgacttaaactttggttaaacagaaataactgcgaacccatttgaacaagtcatcagtgttcaacaaaatattcaacacatatttgatgagtgccaaaaactttactagacaaagtgaactttgaaacccctaactgaaaccccatacaggatcttcctcactgtttgtttgtcattaatttagtataactacctatagtgctaccttactaaaaaatactatttccgtcacttgcctttgcttggctacatggcaactaaatgaccagagtaatgtcaacaacgtggattcttccaggggcctgtgacatcagtgctgttggaggagttcagtgctaatagatttggctcatgttttcagttgtttgattttcagtctggaaaaacagcgtacagcatagcaaaaataaacaattaccaaggttctgggaagcatactagaaataaaggatttattttatgtttttatattcttttctactgttttatgcctaaccaaaataaaatgtgcatttcttaaatcactgaccccaaggccaaaataatggtcaagtacaaaaaagaaagaaggagaaaaaggagaaagcctgaaatataccaaagtgaaaatgaagccaagagagatatacatgggtattgcttactaaacaacaaaataagaggataacttaaaaacaacaacaaaaaagaataccaaaaaaacacacaaaacaaacaaaaaataataggataacttaaagtaggactccccaaggtgtttgaacaacaccattttttgtagaaggcaaagataaagctccagttctgacaaagcctcataaagaatgggctggatcagaaaggacttaataagtggcattgtagagggtagatgggattgtatgactaatcatagcaagagctgttttttaaaatccaggcctgcaagtgccacactctttttca

SEQ ID NO: 49566 - DNA, 1093 bp, Homo sapiens
acatttttaaattattttacttaatcatttatgttacaccaatactgtgctttatgagttttcattatttcagtcatttattggttaagaatgtcttcatgagttagcttggaagggatttcctaccatttgcattattatttctatgggaaatacattcttgatttcaaaaaattaaattggaagtgaagttttgattttttaaaaactatcttaagttgaagatggcccatttatgcagttattttcatgaagagaaactattttaatccatatgttttctgagtcagacaaaaggtaaaaagattatgagggaacaggctcattattttaatacattttttttctaattataaaaactgccatcagagcaagaagatccatgaggacacatttctcttagtttgtttagcttacttgatgtttgctctgcaataacaccagctagcatgaggtaattcactgtaattagagctgccagtgacagttgggcaattcagagagaggcatttgtcaacaggttctactttagacaaggagagggagaaaaacgggcatctcctgcagggatggcttgcctgctcccaaatgaagtaggcaaagttcgtcttcatcctcccattaccacattgggagctgctttccttgccttggctttagatcctttctgcgttctgcctcctggttaccccagaatgttccatgtggcctcatatcttcttctacgtttcccagtacaggcccagactttgagtctctctttaaatagaaggcagcataggcttcttctctaggccataaactctacgagtgagatccaaatctgtctcttcttcctgttgtccacagtgcataacacagagcctttagtggagctagccgtattaactgaataggaaatgagtgagtgaatgaatgaatgagtgaatgtaactgtgtacatctccatttgtaggggcagcactcatcctaatctgtattttaataagattttacttaaaaggaaaaaaaagttacatttttagaagtgtatacatctaaatggggacaatctcttaataatccaaaaggggaaaaccttgtaacagtataa

SEQ ID NO: 49567 - DNA, 1268 bp, Homo sapiens
tgctacaacatgtgtgaacctcaaacacattaggttaagtgaacctcaaacacattaggttaagtgaaagatgccaaacacaaaagatcacaaattgtataattccatttatatagaatatccagacaaagtgaacattgagagactgaaaacagattagaggttgcttggggctagagcatagggacaaaggttgactacaaatgggcacaagggatctttttgagatcatggaaatgttctaaaattggtttgtggtgatagttgcacaactcagtaaatttactagaagaaaaaaaatcattgaacgttacacttaaggtaggtgagttatatgatatgtaaatttcacctcaatatgtctccttaaaaaaaaataatgacaggaggagcatgtgtcttactggcagagaatgccatgtttacaacctcacagagaggcccagcacaacaatggaatcatctggctcggaggaaagcacttggtttttgtgctggcagcacatgatttattggttttgccctgctgataaggccattaaaagcagatgatgacacattcttcaagggcaacacaaagcctgctgccttcaccagtcttactggacctcaacccgaacacatgtagcttgttctgccagcctctgacattttcattttgtttgtaatataacttttccaccttttaaaaatatgtattttagaaaacaaatgcaataaaacatgtagattggagagctaaaagtgaaagtttccagtcctgttaagggcaggaattggcaagggatcatgttaccagtgggatgggtcttttgtaacttctctgaaaaccagctctgattcactgaggatgccttagaaaggagaacaaagagaaactggggactcccggccggggggaatcagagaaggcaaatattcaacaagccctagatctcaagaacacagggcgctgtggaagtaaaggtcagttaggagctgtgagtctgtgtgaaaagagagtgcctttgatattcgtgataaaatttcaaaaaaaaaatctcagtaaccagataccagctttcaagcactaactgtcccattgtcgggccacactgagtcctcatattcctgtactttgaaactgactttacctctctgacctcattcacagcaagatctcaacttttctgccctttaatgtggcatttacctgcaggacctggagtcttctaaagtgacagttgtcatgaccctgaggagggaaccataccaaggagatcgctgtc

SEQ ID NO: 49568 - DNA, 583 bp, Homo sapiens
ttgggagggagaaagatgagtttaatttaaaacacatggtgtctgaggtgcctatccatttgaatgtgtgggtctaaaaacgtgggggtgggatttgcgctggaagtaaggatatgcgggtcatgtgttatgaatggtatttaagggtaggggtttggataaggtcactcaggaagagtgtggagaatgacagaggctgagtatgaccagagagggcagagataagccagtcatgttgtagagcagagagctatattacgaaaggcggggtcaacggcataaaatgcctcagtgagtcctagagctagaaagtgtttacctgaacattgaccttggtgagagcaagttcatgggacagtggaggtggaaatcagattgtaggagtggtgtggcacaactcaccaagacgaagagtgtagtgcagtccttcaaaaagtgagcacactgctctggtggagactcagaggttccccaaagtctcaggataaaaaaggcacatcttctagtatattatttgacttgacatgagaaaaaacatttctcatataaaggtatataaacttatatctaagatccaaataaa

SEQ ID NO: 49569 - DNA, 730 bp, Homo sapiens
ctagaagttatacttcaatcttctgcagttcttgctttttcaacatgttagcaattgagagttgtggtgactatgcaagaaaccagcaacagctgaaaatatcacattcaagaggagcaaagtaacaccaacttcttctctaaatcctgccaagaatttctggtgactctctgcagagacactcatagaaaatttaacaggaatcttgacctgttagaacttgctcggatggattacaatccttttgcctcagaagctgtcactaataaaagctgtttttaaagaaatacaaacttttttttttcttttaagcaacaaatccaagttgttcctgacctccttaaattaaaaatcaccattgggttcattcaaaagtataaaataaatatgaaatacttaagaagacacattggcagagattactctaaattcacaaagaaaactctgaggtaatgccaaataaactgttatgtaatcatttattaagcatgtgggattactcaaacataccagttacctaatctttcaagtggaaaaaatatttcattggtggtgaagtagggaatggggatcagggatgagcaaaccagataaaatattttaaaaattctattcatgtactccaaaaatctggggctgttctaatcttaaaacttgcctcagtggctgctggtttagttgcatgattataatgtattttcctttctgttgcatatttttttttaaatca

SEQ ID NO: 49570 - DNA, 543 bp, Homo sapiens
ccctctctctcatcaataataaagccaggaagttggatttgaagcattgtttgtccttgtggtccttggaagaactcccggtctttaaattgacagtgcagctgttgatcaaaattattcagaaaattaatatattcttaattttctgtcagacaagttgattgtagacttatgaaatacttatgtctaagtaaaaacaatgcctatagtttctgtaagaaactaacaaaaataatttggatgtagaatgaaaagctcaacctcatttcaactctgtactagatgacagaagtgccctgtgatgaccaaatgctcgggcaatgtagggtgactgccgccaatgagccaaaatacaatcacatgcatcagagtcagaggctggctcctcaaaacaagccagcttttctggttagagatggacataggatgttggcggcatctatcaacacccagatgatatgagaaagggtgacatttgtagccatatacctttcagaaacaaactaaatctgcatttatccttaagaaaaagagaaaggcata

SEQ ID NO: 49571 - DNA, 1191 bp, Homo sapiens
ttcaataggctcctcacggcaatggaggatgccaagtatcacatacagaagtaaaggcagtagctgcaaagcatgttctctaacatattcataacagtgtactatacctttcctagaggcttccttagaaagcaaagttttttttttaatccatgaataaatgaccaagagattataaagaatgctgtgttttggaggtgagatgtgacaatgtcaataaatgtggaaggtaaatttcccaacttttccatacaggcttttctattgtactataaataagccttatctctatatttgtcctttaggaactccgtttctaaaacaagagttatctcgggaatcccctctgttgattagataaaaatgacctgacagaaacaattcttaggcatctttaaaaaattattttaaaagtctaatatattcttaagtgttcacatttgtacaacagaaacaactttttaatagaacgtattactcttgaaatggttgttaaatttggccaaagctcttaaaaggaattttgtagcatcctacactctgaattccgcaactcagtttaatcttcagacacccacttgtgccagggtcagtgaaacagaaaattctatctatcaaaaacagagtttaccgtttaaaatgagcaccctctttgatatcatttattaaaagctacttatgtcccatacaaactgctatatttggcatttattgaaactaccaataaactccaatatcattctgatttagaaaacttcaacatttctggtatgtggaagagttccaaacagtttgaccttgcaatgtcaatgctctgtgaacgacagcagtggcttctaggggagctgctgagcagctgtcatgtttcccaacagaacagggtgcaacattcttctgctcaccatgtttatttaatggcacactctaactctcagggcatgcagtctgctgaaaacatcaaccattatcattgatcgctctgtacccttcactatacagtttaaaaattttaaacctattttactctcttaacaataaacacatgaaacacattattttattctatttgggtcaaattaattttattatgctccatgatgaattgccaccagtgcaacatcctattcactatacatttcaaaaaaagaattcacatactaaacaaaatttcagttgtctgaaaatgaaatg

SEQ ID NO: 49572 - DNA, 2912 bp, Homo sapiens
aaagtgtgtgtgaatggggaggggcttaaagttgttacccaaaattctcgttttgagccactcctcttgtttcatccttctaatcaggaaactcaatgttctctaaggtctaaattccgaaatatgaaacacatctgaaattgaatggaacgattcaatctccaaccggatggcacaagatacaaagggtggactcctatgaagttaacaatgaatccaataactttccagaaattgtctaatcctaacttcttaaagaagcaggtgaaatctggtttggcatacctaatattacttaaaggagttataaaatggtattgctttgttgaaatttccgtgttttctgggttccagtggcacatactctgcaggtgctagcaaagtggagagaaagggatccagccagtatttcaacaaaccacacttcaacccagtcaccgcagtatgatcccgacaaggcctacaccacagagcagaacctccccacccccagaattgccagcagccaatgtaatgaatgcttccgtcaacaacacacattccccttcccacagcagaactgctcgctcccaaccggccatctggggttggaattggccgcacagcaccaaactaagaatcattctcggccccaaaagccaagagctaccagagattgaggtttccctgcgcatggctgcggggagagcagcaccccctcccaccaatggggggaaaaaaaaaatcagtgggaaggagagtagaaaccaggcctaggcaaggttgctagagaaataaatcttgtttctctttaacgaagagcaataacatttcttgcaccctctctaatccgaagagagcccaggctcttgcactcgacttcattccctcctggaatcctaatgggagattaaaaaccaccttccttccccgacctatccactcctcaaacctggcattgttaaggaacgtacccccagatcaagcagtaagaggtgaagcgagagctagaacaagggcccagattctaggaccaagcggctcttgcaagaaaatccccttgtggcctgagaataaagttttaaccagcagcaagggcgcgggccgaggcccggccaggctggaggacaggcctgcggaggtgacactcccttattctccagcagctcgggaaggcggcgcccgaccgccacggcccgcaccctgggagcagggcgagggcgccgacgaggggccggggccggggccggggctggcgggaggcctggcccgcgccgctcccgcctccttccccactcccacttcccggcccccaagcccgggcccgtgaggtaatgtcacgggtggcgacgcgggtctcgtccactgaccacacatttcttgccgaggaaagtgaagagggactcgttctcctgcggggtgagcaacagggaccccacgttggtgaccctccgcggcggcggcggctgctgctggacggagctcatggtttcgccggcggggttgggagtccagggccgtctcctccggcgagtgggcgagagctcgttccccctctcggtgacaggggcggggagaagtggagtcagaggcgccacatctcgcagctcctccggagcggggaggaggacgaggtcgagggaagcaggcgctgacggcgagccaccttcgcgccgcgctgagaaagggaagctcccggcacccgcccggccaggctagggccggatggtcgttgtcctcgcactccggcgactgcgctaaactcccaactcctcccccaaccctcccgcagcggcggcggcggccgcacaatccaacatggcagcgggggcgggcgagaccacaggacggagggcgcgggggagcgcgccggaaacgcgcggctgcggcccgggagaaacccccccactcggcggcgggcctcgcggcgcgggcccgaagccacgcccccttccggccgaggcgcggaccgcgcggagctaagtggaatcccggttggcttggggcgcaggcttccaacttcgtactctggcctctggcgtctcggctcgtcggttgggtacccgaacccagctactgctgcttgaagagaagatggatggggactcctcgccgtcgctgcgccgccggccttccctgggcggacgtacacctttgcgaagcgtcagtgaggacccagggcccctccttggaatagctcttatttctcaagcgctgcagcgtgaagctcgctctgcgggtccgagaggcctgcgatctgaagactgaaaactgggaagagacgctctaccctgtgctcctcgccggcttcgataggagccgcaggtgcctgggattttctcaaactttgtcccaaacttcagctgtgggagtggaggaacaaacaggcctctcccagaattgtgaaagagatcgccctggtggatgaaacaaaaacaaatgcacttgacttccaccgcctgcctggcgtgtcacgcgggtttaatgtatgtgtcacatttaaattcaaagtattttcttctaagggcctggacacatttcttttctccctgtatcgtgaattggaaaataccttaggatattaaaagttatctaagataaccccctttcttctgtaagttaaatactaaacggcttaagacgaaattttggaatatagagatgatgatgcagactgcagtgaattatcaaatatgcatctcactgttctccacattaaacatatttttgttgcgtaaattcatgttaagacgtctataacaattacactttggtaaaattgttggatgttaacatctctgatagctcccaatagaaatctctgatgtactaaccagactggtaaaccattatcatgcactttgaaaatataataaaatattataattaaagctgccattaatgaaataggctgagcaacaataaatttacaa

SEQ ID NO: 49573 - DNA, 549 bp, Homo sapiens
gttaataaagaaggttggattccgtaggaagccaactttgggatggagtttagcagttaggctgtgtataggagtgtttatgggacctgtacctgttagagagaggggaaggaggaagcaggagtaggcagaaggaaaagttaaatttggagcagacccagcaacagttttgctgatccaaggaaaacctctggggttagaatggcccttcagagtattcctgacattgtgtgaattagtcattgtgtatgagctgccaagaaaggggcatgaccttgactgaggtggctctctgcaattggagcaataccgaaaaggctggcagctgatggcttctgccaacagcccttccagcatgggggaaacaagtcctcctgaaggaggatcttggtgatgcatcacagtgtccactacaattcaccgtcaagtgtaagagactacacaatgcaaacatcggtctgctctatagtttaaacagtccttttgtaaataacctcatagagtaataatagctgcctcaaatctgtaagtgaaagagacttgaaaaaa

SEQ ID NO: 49574 - DNA, 397 bp, Homo sapiens
aagttccagggaagacctgggagaaaaagtaacattaaagttggaaagataggtaacaagatgagtcagggtggaggtttctagctgagtggacagtgtgaacaaaggctcagagatggggaagagcagggcgtaatcacacaatgaagtgtagtaattctgctcaggggagcattagtcatggagaggagtgttgagaaatgaaactagagtacgttggggtcagattattcagcagacaataggaagtagtagagattttggggcaaagaatttacatgatccgagttgtgctttaagaaaagtaatttatcaaaaaaaaaaggttttatatatgacatatgcttaaaatggattacatggcagagattctgtgtcttattatgaagcaattata

SEQ ID NO: 49575 - DNA, 1079 bp, Homo sapiens
aaatgggacccagatacttgaaagctgaaaagccaaaaacttatttttcttgcctttgcaaaaacaaaacaaaaataaaaactattatttctgaaattggctaacaaataaatcaagtagatatgaaaaagggcccctgttggcctctgctgataagtactaagtaaattggagattggaggcccacactaaggcctgggcctagcatatgtaaacttttttaaattactaaggcacatggctctttgaagataatagtctcaggttataagtaaccttctcatcattactagactctgctttaactcgcctggaattcatacaagtagctatcaatcaaaaatggcaatttgcaaagtcatgcactttctctttatcaatgttttctaagaaaagcattttgttccccaggactcaattccaaattctcaaaaagcttatatttgaaaacttaattacacctatggcaataataataattttaaaaagtgcccacaattatagattcctcaataagcaagtccacaaattttccttttattttacccaccagagggtgctacttccttacatttcctaaagatgtggcctggcttctgaaggaaatttttatattgttttaagtaccctgtgttgatattcaaattggcaactttctgttattcaagactctgtaatgcaataggaattttgtaattggacacctgtcagcggtagttacagagctagttgcaacacactcagatgtttaaagtcactcttgtgtatttaagccagaagtaaggtcaagtgattacaggtcagttgtggttatagaaactatgcaattatcagagcctccacccttctacttgctcagtgctttattcttaataagggaaagagtaggtgtgttccttcatcccataaacactgcttcatttaaagagagagagagagagattacctacaatgatcttagaaccataatttagccctaaataaagacttataaagatcttgcactatccttttcaaaccacaaaatgtaaagccatctctaaaaatggataatcatattatcatgagcttaaaagcaa

SEQ ID NO: 49576 - DNA, 799 bp, Homo sapiens
ctggtacattcctaatttgggtttgttccttttccttttatacccattaacttgggagctagaaggaagaaaaaaagaatgtaaattgcagaaaggcaaggtctcatgtgctgattctgggggctatttgcaagttcagttgcttagcctgattataacatagtatccatctcctgcccctcagacctctcccctttctgatttgggacccttgttatagtgcccaggagcctacaagttcaacaactgaaccaagccattatgttttaatcaagaccaaagaactgtgctagaagctctaattctatcagtaccagcgagaaacactaaaatcgatttctttgtacatttctaccagggagaacacactaaaattgatttcttcctacatttctaggccaactgtacaaaggtgaagcagtttgtgagttctgatttagggagctacatagccaatgtgaccagagctgctgaggtatgcagccttcacctctgcaggaacaatggcaggtgcataaggaagatgtggaacgcgcccagttaccttcacttgaaccctgcaagttaccacatagaggcctctgaggacggggagtttactgtgaaaggaaaagcatctgatacagacctggcagtgatggcagatacattttcctgtcattgttatcagggatatgaaggagctgattgcagagaaataaagacggctgatggctgctctggggtttccccttctcctggttcactaatgacactttgtctactgcttttagcaagttatcgaagcattcagttgtga

SEQ ID NO: 49577 - DNA, 2000 bp, Homo sapiens
aataagagttaaaaaataatcctgggcctcaagcaaaaatcgtagacaaaaattctgttgtaggaataatgtactgatatattcatttatttgtttgtgtttgatgtttgctgatttttgatatataaagaggcattttttcttctatctgaatgctttacaaggtgtgactacgtctttgttggtctttttttctcatgggtgactacagggcactgaaattcccagctccaaccaagattctggacttcagactcggccacgtgatgaggggatagaagagcggcaaccttctggcatctctgtggatttgggcaattatcaaacctgtaactatcataataaattcacgtgaaaggcctttgcttattcctctggcaccaggcaattctggatcccatgttacaatgagggtgtggcaagaggaatatccccaaaatgtatttaaatgctcatcaaatgtctggatagaggttttaaaagatttaatttgacttaaagaaaataatatttctcttatagtcaagattgtggattaagatttatactcactactcctcctgaatcttctgttaaatattaaacaaaacagtgatgaagaaatactcactcttcttttttggaataacctatgaaacagaaattctctgacttgaaattatgttattgctaaatcccaccactccagactttggaaaaatctctactattcatcatttggctcaggtatctttaagtcagtggttgctccattcattttattcttatgagatttgggagaattggcaatttcaggatgagagttgccatttttgtaactttgaggttcaaattggtgtttttatgagacgctggtcaaacagcatgaagcacttcagtaacctctcttctctacttagcaaccagatgaatatcttcctcttgtttgatttagacaagcaagcaaactattaatttacaaaggactttagttttcacttgatttcaccaaagttcagaaaagaagctcccagggtacactcctatcactaccagtttctttttctccatggtgcttgaaagtgcatttcacggaggaaaagaagagctcgatagatggcttatctacaaaataaataacacagtgtttgccaactgctgctgtcttttatgcctgggtaacctggatttgcattagaatccagccacaatttaacagcctaatttacggtgcttccaaaagacctgattttttttttttttttaatttcttggactgatcatccaagttcactctattgccacagtagtgatttagagatttccattttccccttgaaattgccattttaagaatttatagttgtacccagagtaaatattctttaattcagcaaagatagtttataattactttattcctgacttacgtggctttcactgggatttggagtcacactttgattctttgatcagcacttatttctaagttctgtacaaaccggaagttagagttatacatttgtcctctgagttttaagatgtaatatcaacactatgggttagaatatacattgtcaacaacttaacaggaaaaggctgcagtcttggccataagacttgctggttagtaaattgaatatgttaatatatataagacagtttgtcaatcagaaatgaaagcacaagtattttacactaagcatgaagtgtttgactgatttaattcttctttctcagtttgcatggtctccaacatgtgcataattccatgttggtctatcttcatttctttgttgattcagtcaatatgtgaaacgaacaacctagcaagataaaatgtattgattatcatcctgttatacgcatgccttatgactatcatttctctcggtaaataaataaaatggctatcaattatttttccaaagtgcctaagagtaaggagttttattatatatttaatatatttagaatgtatatagggttatatatatatatatatatatatatatatatat

SEQ ID NO: 49578 - DNA, 997 bp, Homo sapiens
atgaaagccagtttattagaatgattcaagagagaataaaaggagaaactttgagattttgtgaattttatttaagattatgagatttgacattatgaatctgagattgtgagtagcaaaacttcttgggaagtttggttgtaagggacaaaaaaaggaaaatgaggaatagcacgttttcattttctttgccttttgtaagatggggaaaataagacggatgttcctctatttgtgggcatttgagagttcatgaaccaaaagaaaaaagaaaaaaaaggcaatctgtttaagaatctgtattccaaagagaaataaaagatagtaagatctttgaaagccaattttcaggcaaaggaagcattactactggaggggggtaacagtttgtgtaattgcaagagcagtggtttaaagtttataaacacaatctgacctttggccttttttcaaacatgcaaataaatatttctcctcggcaaaatgagtactatttttaaacacgttaagcttcttcctttgtttttttcaaacatgctaagcttcttcctttgttcacaaaatattagaagcagagtccaaatctttgaatgaattttaagagacaaaaaggttgagactagaagcagtgttttttaagtgcccaagaattcctaaagatgggaaattccctcatttttatttatttacattttgtgtgagtcataccagggaaaatgctagtcaaatatcacttcaatagatgtttttattttacagaagcttaaaaaccctaaaagtgtaatttgttttcagcatatttttgaaattaaatttaaaatgctttattgctgaaaaaggctaacagtcatctgagcctttggcgagctataatcttttcgctggtgaagtgtcttgccttgatgttgatggctgctgactgatcagggtggtggttgctgaagattggggtggctgttgcaattacataaaagaagacaagaatgaagtttgccac

SEQ ID NO: 49579 - DNA, 741 bp, Homo sapiens
gataatattcattttaagaccaccacatctgaatcatgtgacttacttttaagaggaaaaaaagtatgaattttcaaacatcgagggtaaacactcagtttaaccgtaagcatttattaaaatcatttattaggctgaggctgctccagcactccaggtttctacctaaagcaaaccaaaacccatctcagtgtaaacactaaaatgaaaactaagctaaaccaatcaggaactgccaagtaacctctaactagaaacttcctactggaatgatctaaataaaactactgccccactttaaccaatcaaatatttatcttgctcctctgttgaccctatgaaagccatcctctcattccttcagcagagcccccaactgcttgcagtgtggagctgcgtaattcatgaatcagtactcaaataaactgtcaaattgtaatgtgcctaagtttatcttttaacatattatatgacttaaggtttttgaagattttgtttgaaacctcccagcagaacttctgataactttttaaaaattctcttctgctagctttgaaagaagcagtattataagtagtaaaaaatagttttaagtttaaactatggtcaacagaaaatgattgggaaatatttggtgaagaaacaatttgcatgaggaaacaaaaactacagaaactactgggattgttttgtggggttttttttgtttttttttgtttggttggtttttttttttttttg

SEQ ID NO: 49580 - DNA, 447 bp, Homo sapiens
acactgaatgtggcccaagaacaaatttcaaccaacatgaaaagccctggtgagtgtgttagttggatgtcttagactcggaggtaacaaaatgcagagactacctgcagggatagaattgctgattgcatgccctattctgcaataagatacagatagtctcattggcttggaatttttgtgggttctgatatttgcaaaccttttaagattaggatgaattgcagacttgtgcaatgatctgagctcaagttacccaccttacatttgtttacacagcaagtgtatgacccaaaagggagggtttgattgggtccaggctgtccctatttaatctaggggtgtttctcttaggaaagttcctactaagccagttcagtggtgatgtgcttctcttgcagcagtgccttattctttgggtttgctttgtgatgatccttaatttgt

SEQ ID NO: 49581 - DNA, 1784 bp, Homo sapiens
aatatttatggctttgaagatggatgaaaggactcacaagccaaggaatgtgatcagcctttagaagctggaaaaggcaagaaaactgaacctccagatagaaatgcagccctacagacatcttgatcttggcccattgagatgggtgtcaggcatctgacctacagaactactgtaagataataaaattcatatttgtaagacattaaattatggtaatttgttacaacagccatagaatactaatatactgagtttcacatagcttggacaagcttagacacactgctgaacaagtcacattagcaaaggagatagcataagctgaatcatttaggcatgaattatgtaaccaaattattttggatggtaacatgggacaagaatcaataagcctactttggagctgagggaagcaacacacatattctacgactaccccacaatgactgccccaccatccccacaatagaacatgagtgggcagcctgcaatatgtaccatagtgcacttacttcagaagggatgtgaaactggcaggtactttaagactccagagttcgttcagttcaaagcttactcagaaaagtagtttcttctttccttcctaagaagggtatggattaatttttcttctatgtcttacaacttctcttgatcaatgtatttttaatgtctggagaggctgtaatttgtcacaggacatgtctgaaatgaggccaatgatgcttagtgcttggagactgcttgctcagtgcctaacagaggaaggaatgattcagcggaagaaaaatgagactaagacataagtatgaccaaatgtttatgggagtacaatgtttttattacctagaaaggacaatatagggtcataaagtcgtgaagaatattgcagcaaactgtttgaatttattttataatgcttgtgtcactggggtctttcaagagttctttaaatgttggtacatagcaaagacttattttccaacttttatgtttattttcacttctggcatacagtaaatgctctgtaaatatttgctgtgagtattgtattgctattttaactatctaatgggtatcagcagtatgtgaggtgactgagtttcttccagcgatggaaggaggacaattttttttctgaaggtaaaattcctatcaatcccaaatagaaagcaacaaatcatttctttgccatgtaggaagtaaacttggctagaaataacattcaatttaatcagtgaagttaacacagaagtatagaagagtaaattcttgaagcttctctactactgttcaaagtagagagacttagaatctgggagacataagcatttcagtcatgaaagaaagatatttgccacaggatcctcatggcctaaatagcctagccctctagacctgcaatctcccttgattcgccaagcaactatgtgattactaatgcaactcctaaggctctttgatattgtgactcagcaccgtggatagaggatgtgagcatgtacttaccccaaatatacacattaattgacattcttatcacatctcagtcagtcagtttgtcaatcccagtcacaggccaaggccaagacacagattttggaccttgtcaagttcaactctgtggtgaatctttccttgatggtacctctgttcagcattgggcctgtgacctttatattcaaaaaatgtctacaatttgttaaataaatattagtaatatggactcaccatttctatgggaaagtgtgcataaagttacaaataactaatttttaaaa

SEQ ID NO: 49582 - DNA, 1265 bp, Homo sapiens
attaagtaaggagcttgtaaacattctagctaatttgatcaatcaaagcagtgaagtaagatagctcaccttggtaacagggaattgcagcacgagaaacaaagtcatgtccctaaccccacttggtacgaatcagtcattctgtgtttttaattaattacacaaaacttctttccactagacgtaatcatccaaaggtgacagtatagggggaacctctacacattcatgcattttctcaaacagattacaaaacccagcattatatgcccactctactgatgtagaaataggttgggctacaaatcatggatgatcaaatatcagagctaggctgaccatttacacaaaggcattcattccaggggcagatgcagctgggtctctcagggctgccctagacaaagactcttcagctaaaatcctttatgagtgaggtttaaacaatcacacaatcaattggcattacagcatccaatctttttgaactcggtgaccaaagatcagtcccaaccagtgaactttctaattgttgcaaaatgccatgtaaatgcccagtttgtcctgcccaaaggttttcagaagataaaagttaattcagaaacaaagttttatgaaagtcaatgaagccttttaagaaacattattgagattttttaatctcttgccaaaacaaaaagaagaaaaagttaaatttctatccaacaatctcaaaatcagcaagacaaagaaaaataattcaacccccaaagccaacaaaaggcccatttacgatctgacaccctgcgtggactttgaagccacacttttctaacaatcgttgtattatggccacagaataatgccaacctgttaatgtggggtttgtttggtcaatttggaattcaaatcagaataaatcaggatagaatgctgcacccacaacaactcactgaggctaagtcaactttagagaaacaaaaacaaaaacagaatactcttctttccaggagtcgtgaaaacaagattaaaacctaatagatctaaactctgcccacattagcctaactatatggtaccagagcacattttcaaagtgaaggaaagcatggcccatgtaacatcagtgacttcaatgtgattcatcatattcatcctgtccacatgctaataattcacaaaagaacacacttgtcttcacaaactgttctaaaatctttagacttaaaatgtaaaatgtcaacatgatcaaaacaaattgtggacagtcttaaaacaaaaacacg

SEQ ID NO: 49583 - DNA, 1420 bp, Homo sapiens
gataagccaatacacttctctgtcattgaggtacctctcttgtccgctttatacttttgtctctttcttgcataagtcaatttcttctgataaaaaaaaaaaaagaaaaaaagaaatttgaaactgaccttgaagaggcagtttggtaaatagacacatattctctaacatgagttcaactggctccttcacaattcaaaaatgaattgtctaccaaacaaagtagatgtttcagagatacgccaagcttggcaacaggagaaatcatggacgctgctaaagcagcaacagctgatttcatagtcatggaatgatcctgcacctgatccctgtcaagataacagagggtcttatttactgtctccagctttggtccgtctaagtaggtactgttttctgtttacttatcccccagctttaggcctggaacaatgttgaacatagtgtcacaggccctggtgccagacaggatcaggggctgcggaatatttacagtttcccttcttctgcttccataaatgaaatggacagtctgaatggagaaaatcaagggccagctggctaaaaacacaactggcagcaaaacagttgggccccttccaagagctggtgtttaaagagaggccatttaaagagcaaagtccacctaccacaatagtgggccaggacactagctgtaggatgaaacaatgcaatttcactcaaaatgatttttgtttccaaagtttggaaactagatgtgcccccttcttcccaagaaattttctagtcttagggtcaatcccttaaaatagccaatctttccacccataacaaataacaaatgtataactttgagaatgttaaacaaattatgtgccacgctggccaaagtcttatttttgcttaagttcacgcaaacacacaaaaataaaattaagaaaccgagatgggaaaagacaggaacaaaaaatgacttaagaatttagatgggatagcatggaagacagtcagacacttaaactaatttgagaggttattaatatatcatgaggccaactgacaaacacaattttctttctttctttctttcaataaaatgttactccaactttgctgtttaagaaaaaatgcaataatcttcttgggggaaaactcacattgaagcacttggtaactagtacacaaatgctaatgtttttttttttttccttgtaggctctgatgatgacaaccttaggctggccatttacttaaccctaaaatctctgacaagtgccaaatcagaaatacgcataacaccatattcagggagatagatttatactccaaacaattctgtatattgtgagatcatcctttttttacagcccaggagcagatgaatttgaaggtgatttcgcgaagctgcctctttttgtatatacatacatgcataaat

SEQ ID NO: 49584 - DNA, 1189 bp, Homo sapiens
aaaggcgttcagctagataggtgcatccagcagcagttctctgatgctataatcccgaaaacagataaagccactagcttgagagcccctggaaggcattacctctatatagggcacgatcttgcaggagaagtcctccagcagccacttcttggtcagctcgtggaagatgaccagcggaaggcagaagaagatgatgagaaagtcccagaaggccaggttggccaagagggagttggagatgctccgcatgtagtagttgtggcacacgatgcacatcaccgccaggttgccaatgatgccggtcccgaagatcaccacggacagacacatgaccgcgtaggctccataggactcctgggtcagcgggtagaaggggttcttcagtctcacacgccggttcgtgctgtttccccggcggggacccccaggctcatggattccttcacccaaggatccattctgggccagcgcccggcccgggagtgcaattgtccacccttcgtgccccgccagtccattggccgtcttggacaggggcttgtggtgggaaccctggagtttcccggctctccttggccagtaaaaaagatcgctggctccggggactgtcttcacactctgctcctggctacgcccggaaatgccagcgcctctgggacccttctcttcctcctctgagatctgaaggaagagctggagggccgtggggttccctctccccaaagtttcagaaggctcctgaccccgagcacctttccacctccaggggccaggtggcctggttggaggtcccgggggtccggctgccgacgcctccgcccctctgcctgcagccgggtcacggcccggggccgccggcaggtcccaggagggtcccgcaagaaacgctgccccctgctcctccctgggtgctcgggctcgcagaacgtctcttgcagaatttcccggtccccaggcgtccctgccgcggcgctggatcactgtaggtgcacagctctcccccagacaagtttcgtttctggacgcaggggcgaccccgagggcagaagaggcagacaccttgagcagtagcagaagcagtagccgcgacatgcgggcgagaagcgcgcccggggctcgcatggcttggtgagggcacacccggcagccgcagctcctgcttagttaggatcgacacctgctgccg

SEQ ID NO: 49585 - DNA, 1293 bp, Homo sapiens
gcccgggtagcggggaaccggagattagggtgatagcggaagatcggtcttgggggtcacacacacgccccctataatccttcctcctttggcatcttgtgcatttctcagccaagttgagtcccagcaaggtatgccctccaaggttcctagagggaataggctactcccggtggctgaccttgaaaagttgcaatcaacacctgactgttgattactgttgagactcgggggagcccagacgaagccccacactcctcactgcctttgggtgggggtggtggccttcttggtaacagttgctctgcctatttacatcctttcgacagcgtttgatccagttgcaagccgaggtctctagaggaaaagaaaaacaagtccccctcccccagacgactcgcagtcacaaccccgctcccagctcgctggaaacacgttgcaaacagtccgaagcagcgctgatgcgccggcgaaactcttgccccacctaaccccagcgacttgcgagcctactgctgccgaggagaagcgggattccaaccccgcggccactgccaaagttgcttctcctccagctcaaagttgacgacggggcgaagcaggctgctggacggcgtgccgccgcagagaaggaaatcgtggggagaagggggagaagagggcgccgctcgtcggtggacagtgccgctagccgcgggagctagtcactgccacagcgggctcagcccggacgggaagggtggtgcctggaaccgccgcgggccaggcagtgcgcggccgggaaggggaggtggcccggcctcgcccccgcgctccagccgctgcgcgcgcccgcgaagctcgactctcggctcgttgcctcctcccactccttcgcctcctcctcggagagatactggtttgtggggagacgggatcccctggtggttcaccactcactaaacccacacacgtttcattcaagccatttgtagcggcttccactcggaggagctgggagggaacaagggcggaggcgcggagcctgcgcggctcgaggctagggatgggcgggacaggttaattccccagctgtcgaaaccagcctgacaggtccccgagcccgggctaggggcgggtgcggggcgggagtggggggtgggggtgggaacgggaatatgagagcggtcgggggagggaagagaggagggtagcaggggagtgagcagcagggtcccctccaatctgttgcggctgatgcgcatgcccaggtctcagctctggggggcgaggggcggggcgggggaggggcgg

SEQ ID NO: 49586 - DNA, 1371 bp, Homo sapiens
gtgacaggaggatggattattttacaattttattgcaaagatcaatacaaaacattcttccaaggaactgaaacttaaccattttctacttagctgcgtaaagtacctccaaaaagccagttttaagatctgtaacgtcactaacaaacgcttttaacattgtgctttaaaatgtaaaatttattggggaagagggaggctgaaaaatcgtgtttttttttaacccccacgggagctgtaatattgtatagacaaactgtgcaccaaaagcatcgtactccaacatgtttctgtggccccctcccttcacccgctaaataaatgaagaaacaaaaattactgaactgagattaacttctgcatcgtaggctcaaccttatttcacagacctcttgacggggacactcactagtgtcgatatctaattttaatgtttgcgcaccaaccttcccccaagccacctgagctctgtgagggcggggacttggacttaactcctgtctgcttctcccaaaacaccaagaaagatgctgaacacagcaggctcgagataaacactcgtaagaaagcgtttctctgcgataattacatcaaattttgatctaaactaattcaatcccgggcccgttacgtctggcacccactcaaatgaacacaccaaaccttacaaatttcactcacccgtactctagaaagaaccctaggaagagtttaggcgggcgcgcaggtgacgtcacacgcacgctgacggttcagctccacgcatgcgtgcaggatccctgggcatagtcgcttgttctccgcccgcggtggaccagctgcgtaacggttcacacactgatggcgcctggaggtttggcgaaatactgacaggatgcgacgtcaacgggagcgcagggccaaggtacaggccccgcccagtccggtcacatcccccggaattctcgcagctccccttagctccgcccccagtgactttccagctttcgtggcgggaggcaagcttaggggaagcgggcgggtccgctgggcgggatttgagcttccctttggtagattcgaagctcctgtaggcagagcctttcttttaatgtccagttctcttcctccaagaaataggcacctactgcagtctttacaaggaagcatttacaaggataacaatgttatttgggagtttttatagtaatttcgggcattggcataatgccaccattgagtcttgctatttacagacagatttgattaaccttgtcattgttttatagggccatgattttgtggtataattaatatttattataatttattttataggtttattatagtttatttaatatttattataacttataattgataaatattata

SEQ ID NO: 49587 - DNA, 1193 bp, Homo sapiens
attcaaaaaggttgcctctctaaggaggtccaaaggtctggagaagtgaaatcagatattcttgcttttgacttaaagcaatcttctaaaataaaaacttcaaaagaaattaagaagtaaaacttaaaacaccattttaaatgacactgttaccatcacccacctaccctggagaagaaatgcacatttctggcttcagccaatgaggcttgttcaatgttccaacactgaaccatagctattggtttaataaatataccattacatcaaaaccattactatagttactggcagaacattgaactcctcatcaatgtgggagataagcaactccactgattttggctggaatataatacagctcttagataaccttagagagttccagcatgactgactgcaggcttggcaagcagtccagtaagtctgtaaacagagactaaagggatattaaaaaagaatgtgatgaatttggaaaaccatgtattcatcataacacattccaatgctggatgtgtcatctctaaggagttagggattttcccacctattatacggtcagtgatgaagctacatcttcaggactgaggtttgaaatcttactacctgaatcttcagatgtgttttccaactctctcttcactttgctttttttctacagagttaagtctttgagtgctttgtgatctgaaatcccccaaggcaactaacattccacttctttttcattttctttttaattagacactcacagaatacactgtactattttttttagaaacaggctccttttaattttttttagactgttttgcagactggccccaagactacatctactatctgataccattgatcgacctgactgttaaggtgtggactcagcacttcctgtgaagaggttccctgatgaatactgactctattaggcaagggtagtataacatgactcacagtcttctgtcagccctattgaattccaagctctgtctcagaactggctcgaattctctggtgattccttttccctcagttaactttgagcaaccatatactataagggtagacaacagatcctctagggcaggggttcccagcccccaggccatagactggtaccggtttgtggcctgttaggaactgggctgcgtagcaggaggtgagcagcacaagcattactgcctgagttctgc

SEQ ID NO: 49588 - DNA, 802 bp, Homo sapiens
caaacaagataacaattacacagcattagtaaaccaaatataaatttctaacgtttactaattattagggcaatcaatgctttaggaacataaactttgaaatcagagggcatgtataatagttccaagcttctatcactctcagcttctgtgaatttcagaacttctgaactccagagtctgcaggctttaggaagaaagtgtttgcctaaacataacaggtcaaaagtataaattcagtaaaactactttgtttgcataaacctaatgacatagtgtgtatgctgggaatgtacttgaacctttgaattcagttgtttaattagtgagctattgtggtgggggtggagtgagtggggaaacccacagaggaggagcctccgctgagtgatttaaagcgtgcaggaaagaaggcctgtggcctgtgtatgcatagggggagctcctccctaatcctcattatagatttgtgttctctaaagccggaaacgacaaactaaaattaagtaaagagatgctaacggttatattaatttttaaagaagaaacaacagcctgcagctgatgatgtgttggctggaatggcctgagccgctgggaaagaatttaatggaactagagcttttaaaagtcatatgagttcaaaaggggaaacaggaaaaataaataaagagaagtaggcagaaagaacaggtgagattcagctgagtgaagttgatggcataacatatgctgaggccacacatttccaacaacagtccatcagccatgagctgagttatggctcccagagtcatggaaa

SEQ ID NO: 49589 - DNA, 1066 bp, Homo sapiens
gatacagatattgacagctggaaagctgaggactcctgctagaaaagccaactttttctgttccccaagcagtacaaggtaagactgttgctcagagcatccttcaagaatctcctatattctcctaggccacacaatggcagccagttcaaacattcaggtagggcaggcctggatttcccattcgagcctattgcttcagatgacctcaaggaagaagcccttaaactgagggagttaggagtgggctaccaaaccaataaataagctacaaagccaataaatcaaaaggtagttaaaaactacagccaaaggctactttaatgtggaactggaagcagacagactggaatttttgcgggtattacattgccaaagaaaacaaaaacctggctgacagagctagtgactgttgaatcactaaaccaaatctcaggttcccaaacctgcaccagtagaaagcaagctgtacaaggagggaagctaccaatgagggcatattatctaacacccaccacagatgtggccacaaaagacagaggccatcaaggacaatggacagggagttatacccagagagtgagtttggattggccaagatgacctaataaagactgccaagtagttcttgcccagagaaatgtaataacaacaacaacaaagcgctaactcctactgactagattatgctgtttgcctcctcctcttttccctttccaagtagggatttcatggcagataacttgtcctttagtgccggggtcactggaggcacatccaccctgatagagaggcctagacatatcccagagacctggactctcagctgggtgcagtaaataaatgggctttggtttgcctctttgggaagaaggtgggcatatcctctacgtgggatgaagggtaggaagggatacttagatgctagggagacaagctgtgaacagagactattcattatctcccatgtccattcttctcttgtccttttagataaggaactaccagaaaggtggctcagtaagagcctacatttcataaccccctcttgtagctaactagacat

SEQ ID NO: 49590 - DNA, 1493 bp, Homo sapiens
tctgatatagtcaccacccaggtctgacctagttttctaagctgatttttctcagccatggagcctcttgctgagtggcttcacagttcatctgcttccattccctaatgccatggtccctgagaccatcttggccgcatatggtgggcactcactggaatggttaaaattgctaccctcttcactgaggcctcagaggagtatgtaggtccaactcacactgctcagcagtgtcagagctaagaccagaatccatcaactttgttgtcaccatgtagacaagagcccttgatcctccatcactcaaaacaaaattaaagatgagctcccaattgaagtgttctactggtaacctcatataggcacagacttattccagaactcctggttatgctataatatcccttgctgtcttctatgattgtcatttggggtcaatttgttgttgttgttgttccttctcttcctttgaggatgcttttggatttgtccagctggattgtttggtccttggctggttgtcccggctaagagcccagcctggagccagtgcccactgtgtaagcaatgcagatgacattgtcgaaaaagggactctgtagagcattgtttgcttagttggcccctttctagctatctgtttgcaactaccttgataaaaaggtgctgataatgagggacagagttttatacattttagttaatcatctccgcagcaggtttttatacaggatggtgatcaatgttgaaattctacctatctgcccacactgactcattagtcatgagcatttgtcatcatacatggggacttcccagtgccctgcactgctttggccatgtgcttaggaaacactgggccaaaggacatctatccagtggacgttttcaatctcagcagaaacaattctaattctgcacttcctgaaataaaatcttgccataatcaaagcaagaaaattaaatcccttcctagaaataaaatatacttatttgaaagtgtttcaggccttgcgcggtgactcacggctgtaatcccagtactttgggaggccgaagcgggtggatcatgaggtcaggagatcgagaccaccctggccaacacagtgaaaccccatctctactaaaaaaaaaaaaaaaaaatacaaaatattagccgggagtggtggcgggcacctgtagtcccagctacttgggaggctgaggcaggagaatggcgtgaacccaggaggcggagcctgcagtgagcggagatcgcaccactgcactccagcctgggcaacagagcaagactctgtctcaaaaaaaaaaaaaagaaagaaagaaagtgtttaattagcagacaagttcgtgtcatttttttaaatagttaacttttacttccagaaaaatagcaaacaagataatactcaaatgcaaccgtggttgcagaatctataaacccaaaagtctgagagatttacaaataatcaatattataaacaaaaatcaca

SEQ ID NO: 49591 - DNA, 776 bp, Homo sapiens
aatatttgcagagctgtattttagacaacgaatgatactccataaaaaacaattcttttcccactgtggggcagaatgtcaaaacatgacaagatcactagcccagatcccctggaaaacaccatagaatcatttcaaaggcaagagattacaatgatatttgccttgttaaggctgtgtctatacggtgccagcaaacccttgattaggttgattcactcaagcaaccagtcgatttcgtgaaacatttactcaggcctgtgtagtttgcataaattaaccaagtgattgattgactggctggttggattggttggatacttggctggacttcaactgactgctctcccacatccgcttcagccacttggagcgcccagccacagtagtctcttcccaattccactctccacaaggctattacttgtttctcagcttatctctctaactaaatactgagctcctcaaaaggcaggggcagcttcctctctatcttccaccttcagcacagtgatgagcatcagactccacatagtgtgagaaatcagtcaatggtgtggcaacttacaagctgccctttgacataattggaatctgtgatgtttcttaatccccacagatttcatcatgcctagagggacctattaaaaaatgttagttaattcttcccgtagaggagccacacaggctcccatccccatactgcttccctctcagatggcttttttcactctgttctcctcttgagcctctccctcttctaattccacatgtca

SEQ ID NO: 49592 - DNA, 762 bp, Homo sapiens
tgaagctatgttccggagaacaatgagagtgttctgttttatagcaaaacctcctacccaggtttccagtcaggttggtttatgcaaatgaacgatggaaactagcttagtgctggttggctggcacagctgagttttgattgatcaatacagcttagccctgcttggttgatacagctgagccctgtttcatccagtcgagtcgagggagctctgattggttgagctctgattgagctctgtttggtttccaaacccaaaaccaggagtcttggctgatgtttctttctggtgagaggaggggggattgggcctccgttcatcttggcactaacaataggaactggtttagcttgattgtagaaagagaggtcctgtgatacttttacatctttctgagaacacaattaccattccttcccccagctaggaccacctggttctgttttaactttgagagcctcagcctcaaagattccattttcagtctgccaggggaatactttagagttcaaagggcctccagagcagagacaggggaaaatacctgtctgcagggtaagtaacaggattgcaacaggttggcatttgaactgggccaagtagagcaccagagagaaaggaaatgggttatatatctagacagaagagcaaagaaatggcaggtgccaaggcacagaggggtcatggttttgattaagatgaagtggggaggtgcaatcggtgataaggttttaggaagaaacggaaaaagaattttaa

SEQ ID NO: 49593 - DNA, 3116 bp, Homo sapiens
tctgacaccaggcttcacagtttgggccacgggggaagtaattccccagggaaccgcgggggtgcggttttgcgcaactgggtgactcgcgtgtccctccgcatttcatttgcaccaagggagcgcgtgtcagacgaagggaatttttttttcttttttggtgattctgttattttttcaccaactgtacgaagctcaagggatatccgagctttctggctgggcggatgggcttcgcgcttggcatggctgagcggtccatctctacctctccgtttctatctctaccataacagcgaccactcagcccgccaggagcccctgtttcccagcgcaggttcctttttcttctcagttccttgggctgttgaagccgggttctgggtagatagagactggggccgtggggagagcgccaggctgcttttgcctttcccgcgccccggggcattccggcgcgctggggatgcagcctccgcccccgccgcacctggccgcccgagcgcccgcgcccacgccccgcgcggggccgcccgaaactggggccgcgccagccgcgggagctaccgaggagctgttggggtgcgtttgcctttgctttttaaacaagatccccgagaccttttctccatccccccaacccccagcaggacacggaactccggcgtttctcgaaagccacaaaagaggggcacggaaatcccaagctcgccgtgctaactcggagaacgcaaactcgaggcagagcgtgcgccgtgcggggatgtgggtgtcgaggaccccgaagcgcccggcttcccccgcgacccccatcctccctagatcctggttagacatccatccagcccacgctcagagggcgggggttaccccgactcatcccggaagccgctaacttcagaaatccctcctgttaggttcgcgaaacgaaggtacctcgtcatctcggcggggcaagtccggattccaccagggcaggtccgggaggtcacccagggcagacgatccgaggcagagcgctttaaaatcctgccgccgcacgcccagtcagagcgccgagcgcgcctgcccccttcccgtcacccttcagtctcccattcgccgactaaacttttgggggatcacatctccaagccttgggagttccgggtaaagtctccctcttttctgaacctctttactgtaatgtaatcatgggcagacaagaggggtggctgccttgttctttgcaacgtaaaatcaacagacacccaatcaagctccaatgcccggccagcccctcgccccctggtgcccactctccttctccccccattcccgtcacctccgcccgctatttctctcacagactacggacatgcagggccatctacttgtgctcaggaaaaacaaatcactagagtgatatgagaaggaatggtgcacctggctgtccgctgaaaggttttagagaagaaaacggaaaggggaataaaacggggggattctccttttccaacaagcagggcgttttggggaagtttgggggccaggggctttttgtcccgtggttcggcacttgctttcctcggagccgctttctgctgccgggcggcgagtcttaccctgctccccgcagagggcgcggtgaggaagcccgccgggggcccgcagctccatgtcagcgccgccgccgccgccgccgccgccgcgtgaggcgagcacagcggccgcacttgtggctgatctctgggctgagggggctgagctggcctagcaggcgccaagtctcttccatgtgaataacaaatactcccaccggcggccgcgattggtctgcgcccggcgcctcccgatcctccgcccgcggccattcacccggcgcggcgcggggagccgcggccaggatcgcgcccgggatcgccaatcgcttcgcgccaaccagtcacctcgggaagcgggaggaggaacccccgaggggcgggagcctctggatttcggtgtcacccagcggccctggcgcgggcagggagggggaccctcggcccgcggatccccctccgctcttcagcctgaagcgacgaggagaccagaaatgtcaatagttctgatttttaaaaatcatccccccttccccgcccccaagaaaaaggggaggacccaactacagagtgagagggtgggaagaagcgggagcggtagaagaaggaatatggttgtggaggagcccagcggctccggctgcctggcgagcccgggaccggcgcggggaggcgcgacgcccgcccgagcacagcgggcagcacccgcgagcccgggtccccggtgaacacagctccagaaagcgtcaccgagaataacacatggtagatgacaagtgtcccgccacatgctttcttttcgggaatgcttaaagtagagccggcaagccgcgcggttcccttgcaaagtttgcctggcgccgcgcggcggttccgccatttgtcccgccccgcggctctggcgattgtctccccactccccgcccccgagggtctgagggacgcgtgcaacagagtccccagggctcgaggtaccacacagcgcggtccgctgcgggcactgcgcaggaaggggcatgggtggctaccgggacggtcattttattgagatgattcaaggagccgcagacgcggggcaggaaactccgggggagccgtgctcgggttctgcagggaaacctcgggattcccttcgcatgccgcatgcggaaacctgccgggctcgacgtgcacagtccagcgctcctccccactagttactgcccaggccccccgatcctgcacccgccggaatgagagaaagtagcccctcgccgcccagctcccgggtagctgctccggccgggccttgcgttggtgagaaagttccatctagaggcggccgcgcgcaactgcaggcggcgccctaggcccgggcgagccagggagagcggggcgcggggggagagggggcagcccaggagataaggaggatggagaaggacgggagagaccccgaaaaggcaagctctagacccccgttcggcatctctacaatgaattttatcttcctaagcatcatgaacttataagcattatgtcaggaatctttcatta

SEQ ID NO: 49594 - DNA, 828 bp, Homo sapiens
aggctgaaaggaaaaggatggtattgtccagtgacaagattctcaaagaagccgggattttggcaggcagaggacgtgctgctctgcgaacaaccacgactcgcacggaggccgcccccagcctgtccctaaggcacgtggtcctctagagggcttcgcgggagagttctggctcaaaccagggacggcgagggcaaggggtgaaaggggtttgaggcgaggcagaggactcaggggtctgcggacggctggtcggcccgtggagacggccgcggcgaggcgcctgaggtacggcggtgcggagcgagggcgaggtcccgccggcggccaggcggcggcgctcacggagccgcgggcttccccaggccccgggcagcgtgctggagctctcgggcggcgccgccgcggagcttggcgcggcagctggcagcggcctgacgcgtggtgacggcgcccgcgggcaggcagcggctcccgggggcggccgggcgcagggcggcggcgctgcgggacgacggcttcgcgaggcttcggcccgcacgggtggcagcggtccccagggaggaaagacaaagatatgcgggttagaaaccaaggaaagagcgccgacgcctctcagccccgcaagagctgcagacccacgggcagtgcggtgccactttcgcccaacagggtgccaagagagaaaactgcggtggtcataggaaaacagatccaattcaggtctcatgcaacaacttggtggcaatttaggaaaatgtatcaaaacccttaaatgtctgaatactctttgacccagaaagtctagcttgagaattttcccttaag

SEQ ID NO: 49595 - DNA, 2938 bp, Homo sapiens
actgcaggatgccttgaaaaagaaagaaaaaagactgagcgactgatcttgtggaaatgatttaaggtgacacttgcagtacttttttttaagggatcaagcaggggagacctcttgtttgtacaagcttttagcttcataactggcttatgctagggaatatcatagcctgcttaagaatgactactggggcaggaggaaaaaaagctagaaaaaaagagaaggcagagtggctctgatggagggcaaagcaactgcggacgaagaggggtctacctggttcacagcatccgtgatgatggtggtcagtctgacagtatttgtcccttaaaggcattttcagtggactcgacctactttgctttcactgtaagaagctcttcattgcggcgtggctgttgaaagaagcacaaacccgtcactcgccctgaacttcctggggggcactggctgcattttccagatacgttcccatcatcagctctccgctttccctccacggacccgcacctccctctcgaaaagaaaacagaaagacgcacaaaccctcctgcagcccaaactccccacacaggttcatcgccctacccggaaacgcagcctcgggtgcgcagcgcagggcgaaggcctggccggcagcgcgggcggctgcggcctcgccgtcccgggcgggcgcgcggaaacggagcgcagagcgcggcgggcaccgccgggctccgggactacggaggtgccgctcccgccggctgctggcccacgccgcgccctcccgctacgcacgtgcgttggggtctccctggcggagaccccgtccccacaaccaagtgcgcccaacttactcaactcttagggcgggccggcgggcgggcggaaggaaggaaggcaggccgggcggccgcggggacagcctggcgtgggaggcggctgcgggccccacctggcgcagcctccgctgaccacgcgggggaacccggactcgggcccgacgcgctcccaaagagtccccgccggcgctgacgcggaagcgccacagctcaccacgtccctccgcgggccgagacgactgcggcggcggctcacggcgtcctccgcgctgtgtggctaggcgggaggcgcgcgggcggaggcagttgacaggaggaaccgcccggcagcagctgccgccgccaccaccgaaggagccggaaccggagcgggcaggacctgaggcttccctcgccggggcaacggctgccgccgcaacccgggtcccaccagcgccgctccacctgcaacggtccctcaggctttaggagaggggcggagaaaaatgggggtctcccccaaccttgggccttttcggtggtagttgttgtttcaggaaactttattaagtcagcctctcttttactctgtcgccccctcctccggagagcccgagctaccgccgcggagcgcgtaggaagggggaagcagagactctccggcagcgacagggagcgactgactgaccccggacggagatggggcgagggcaggaagtgacaagctcaccgagtgggtggggggagtgtggccggcacgcccgggagcgccgcgcgcatgcgcccggccggcgcccccgcctgtgggtaggcgacgcgctgtgcccgccgcggccggtggggaggggaccggggccgccggcgcgagggccgtgtccgaggggagggaaccggggcgggggacaccagggccgcggccggagtctcgggccgaccgagagccgaagcccaaagtgaggtgtgaggcccgcgatgcggcgtgcgcgcccacggagacgggctgctcggccaccaaactgttgctctcgctgttctctgttcagtggaactgaaactcggggagggttgggagaggacttaggaagcggtgggcagatgtatgagccataagtagtgatgatccccaaaaggctgtcagtgcattgctaaatggcaaaagttgaacatttttttcctgccaacaattttcgaagcatgcctcccggaacttggggattcttttatcaggcccaagggagggaaagcatctattggtagcagatgggtatttatcctggcagctccgcttctcaaacttgaaagtggagttgggtcacgtgggctcacgcactttccctcctcttctgcgccccgatcctgcttggaaaatcctcgaagatcccagtcatctgtcaaattctgccaaccaagggccgcttcttgggggcgagagagccgcctccgttgtttcctcccagctcctggaacgtaattcttgctcttggtgacatcaagcaaatatgtgtccaccgcccgtcaggaaattttaagagaataaagcccattcgccttgtctccgatcctccccaagatccactgaaaacctttccagttggtccaacttaagctgccattgtgcggggtcctgaaaaaactgaagttcagtagatagactttgtttagaagagaaaaagttcagttttcaaaatccaaaggaaagtttgtaaattgatacatttgttactttaaaaatgttgggccaggcgcagtggctggtgtttgtaatcccagcacttcgggaggtcaaagcgggaggatcgcttaagcccaggagttagagaccagcctggcaacatggcaaaacgccctctcaaccaaataaaaaaaaattagccgggcaggatggcgcgtgcctgtggtcccagctacgggagaggcgggggcggggggcgggatggcttgggtccaggaggtgaagcgtttgcattaggtctccggggattgcagcagcttgattctaggggatgacaagaaagggatagaaacgtgatctttaactagtcacataagtggtatgatcatatatatctgtcccatagttaagaggcatcacccaacgtgaaactaaaatatgaaatgccacagtttataaatta

SEQ ID NO: 49596 - DNA, 1801 bp, Homo sapiens
gctatttgctcctgcagccccttcaattctccctccaggcgggccctctcctcctccgccttgttactggcatcctctaagtcctgtttcatctttttcttgtcagccaagtaagaagcctccatgcgggacttctcctgagtgactgtagccaaagaactggtcaaagtagccaactgagtcttcagctggtgcagtcttttgtccacctccccacctgcaaatggcccatccccactgctactgctaacgccactctcggaccaactggcctcttcggactttggaggtggtggtccacgggccggtctgtcatcttctaccccaaactcacccttggtgctggtgagactggccgcagtatccaagctagtggcggtcccagtgctatcctcgctgtgagtggagcaccggtcatccacagagtcaggaaaggtgaggcctggaagctggacacctgcgaggcccacatctgcctcgtgggataccgacagcaccttgatgctggcctctaatgcctctttctccttcagcaggcttttataggcacggaccacatccttgagccgtgcctggtactggagaagctgcttcttctgggtctctatagtctccagcaagtccttcttgctcgggccgcccccgaaattcatcccaaacttctccatggagggtctgaacggattgccccacgtcagctttccagcagaacgggagagggccgtgaagacgcaggcgggggcttaaagaaacagcgagcgggctgtccggcggcgggccgcacacctactccacctagttatcccggacctaatgcggaacggccggacggactggcgaaagcggccgcccggtcccaggcccggagggctggggcggattctaccccggaggcggggcgacactggcaccagaggtgcgcactgccagggctcgttagcgctggcccagaagccgctccgcactctccgctcgtctgggccacagcagcccgggccggccccctcggcccacgtcggccagagggttacgctgagctcggtcccatcacgacatcctaactaaagctgcctgccgacaacggcgcttccgtgtccgctggaagtgacgtcagcgaggcgccgcaggctccgcccccagtgggcccaaggtaggcggggccaagtcggccggtgggtgggcgcggcctgttgagaacgcagtggggccgcgagcggcaaaaaacaggcttgggaaaggcgaagccagcaaagtcgaagacaccagagtggcaccggttttgtgagagcgcccaagcttgacctcgggctacgctcagcgagcgacagagcaacgtcgcactgcattcttaccaaacacccaggtgaacgacgcatccaacgatttgggagctcaggacccatggtccctaaaaggcaacaattaagactcccatttagaccacgaaaactgcagtcctctatagcacagtgcttggtacctagtaggcatacagcctaatagtacccttccttagttctgctgagttgattccacaaatatttacggagggcactctatagccatgtctatcctgagtgccagctatataccaggagctcacaagagttttgctatttagtctttacagtaattcttgtaagcactatactcattagcactattttacagatatgaaaacatgaggcagaaaggttatacgtaacatgcccaaggtcacacagctagtaagtttaggagttctaatcagtctgattctcaacgtatcacgtgctgtgccagatggtaacaccattaagag

SEQ ID NO: 49597 - DNA, 1568 bp, Homo sapiens
tctgtggcaaagtgaggaacttcggcaaagcggccagcgcctggactgagaggcggggcccgcagggcgatccaaacgaaggtggacttctccaacagcccaggagtgggtctgtgaccccgccgcccaaggccgggaatcttacactggttctgcggattgggaattaggaagtaggcgttttgaggaaccatggaagctagctagcactcgggcaccttcccctacctcccgcgcactcttcacacgaccacctactacgcgcaagtccctcggtggaagatgaggcagtaaagggaggaccaagacccctaatcgcagcttccactccccaaaggagagtggtgcacacgttcagtgctactggttcccaagggctaaaaccggagcccctaggggcctggacgcaacaaaccaaagcccagcggccggccactgaaaatgggggcaggggccgctgcggagcgatgaatcctttcctcagccgcgctcgggctgccggttcggcggccacaggcctggcaggcgcgttagagacctagacccgttcccaagtaagggccgcacgggacccaggccagcagcggcaactcgcggagcttcagctcccctaggagccagagccgggggaggcggggccgagagccgggggcggggcccggacgggggcgggcccgcggtgacgtcgggagggcagcgacgcgcggaggcggcggcggagcctcctcctgctgctgctgcgccccatccccccgcggccggccagttccagcccgcaccccgcgtcggtgcccgcgcccctccccgggccccgccatgggcctcaccgtgtccgcgctcttttcgcggatcttcgggaagaagcagatgcggattctcatgggtgaggcagatcgagcgcgcggcccggaccggggcgccggccccggcgcagcccttccgcccccgcgtccctccagccccgctcacctgggtctctggccccgagtcacccacctcataacgccccggggcctctgctctcgggcgggtcccggtctgcatcgccgaccccggggcctgacacccggagctgcgggcctgggtggggtgaagctccctccgccccagcccggctggtaagaagggaggattccgcccttggagacgacttttaaaacgagcgcggcctacctcccgtgccccttgcctcccagtcctctcccgctccgcgccctctttggagttggctcacgccacccgactgccctccaggcctcaaaggtagataacgacgcgcacctggaggcgctcccgctctccgccccagtcaccatcagctgttgtggcctctccctttccctggtctctagggggctccctcgctcccatctccatccctgtgcccctttccgttgcagttggcttggatgcggctggcaagaccacaatcctgtacaaactgaagttgggggagattgtcaccaccatcccaaccataggtgagcccggggacgaagcagggagcgggagcgccgcggcgggccctcgcggggtctgctcccagttctgccacttttctggagctg

SEQ ID NO: 49598 - DNA, 1012 bp, Homo sapiens
agatacccttgcaggagctctatctgcccagccagatgtcctacccactggcagagcagctggggttgaggaggggtgcttggtgctctctccacctaggcccttctccttacccaggtcctgagccagccttcctgatgaatatgagtaatttgatgtcaactgattaactagggtttcctcatactccctgcaaaatagcatctggaacattttgacctcatcctcctaagggccataaaagctgatagatttttcttggttatcttgaacttaacaaaatacttgagttgcaagggagccaggcagaactcacttccttgggagaaaggaggttgctttctatcctgttaccagaatgagaaacggaggtaaagaaaggaaaaaacttgcctaaattcacaggttgaagttccggatcctggtctcagctcagcctactttggtgcccaaaggggaataggaaggcaaacaccggaggctctgcacccgcctcctctaggccatggattaatgctgctgcgccagggccctttccccactgtggtgtgataagaggctgccctcacagtcacaatgctcccgggtcacagaggtgctgggccccaggccagcctctgcctgggaagttctctctgggaacatctggtgggtactacaggccctattccaggccctatggcctgtggaacctcaccacgggggggagggctgggccagacggagacatcacctgtggtgtcagccccatggatgagacagagtggatacacagacatcccaaggctgaggacctaagggttgggctcatcagctgggcaggaacctacctcacctttgaggcatgcaagaatacagtcactgcaactgcgaagagtttgggcaggagacaggtgacaaagcaaacccatgctggcaccagttttctgagtggccaagctgtgtgtgtgtgtgtgcgcgcgcgcgtgtgtgtgcgtgagtgtatgtgtgtgtgtgtgtgtatgtacttgcc

SEQ ID NO: 49599 - DNA, 729 bp, Homo sapiens
tgtatatgaaagcagggtgtactctcaacctaatcactttcctaggttctgccagtgccaggcctgagacttttctactctaggcttttgttcacagaccctattgccccatctcccacctctcaatttattccgcaaggtgaagcctcagccttgcccttgctgccttgtcctgctctaactgtccctattccccatcccagcacagggtggttgtgtcagaaagaagagaagtggagagcacagggtggttgtgtcagaaagaggagaagtggagagcccaggtgggaaagcagaattgtgggcatccaggggaagttggaccagtggagttattgcaaagcctatgtttctgttctggttgtggtttgagaatggggaactccagaagccctagcagtgtcggtcttcattctagagaggaatgtaggcacctctgggatgggtgccagactgaggcaggggcaaagttcttcctcttataacaaggttgatcacagctgaaccaggcagttgcatctgaactgttcatgctcccatcttcatccctggagccagggcctgcctataagagcttttgcttctgtcttgccatgctggaaggcaacctttggggatggaggtattggctaagtgtgctctctgcggacaacagtgaggaagaaaaaagtaagacttacaccaaagcgtttctttaaaaattaggtattgaagagtgggattaagaaa

SEQ ID NO: 49600 - DNA, 2264 bp, Homo sapiens
ataccagcactttaggaggccgaggtaggagtatagcttgagcccaggagaccagcctgggcaacatagtgaaatctcagctctacaaaaaaaaaattagctgggcgtggtagcgcggacccgtggtaccagctccagctacaccggagactgaggcaggaggatcgcttgagcctgggagtgtcaaggctgcagtgagccgtgatcgtgcccccgcactccagcctgagcgacagagcgagactttgtctcaaaaaagccacaaaaccaaagaaacaaaaagaactgcaagggaagtactgtcttcagtgtagagccaagttttacgattaaatgacataacacatgcaaggtccttggttccacatagtgggcactcaacgaatattagttctcgctaaacagtcacttaaatatttgtaggccttggctttcccgttccttccccgacctttttactggggctagggaaggtatccggtggctggaggcgcttcacactgggtcgggtgagagcgtgaagcgagccttttccctaacgtcacgggagcagctgggaagagaccgaagaacgagggtcactctcccctgtatacgtggcatgtccttcctctgagacatttattcctcccaccaacaaacattaatggaacgcctcacaagtgctagaccccagcgacacaaacaagggcgaggcacactctctgactacaaaaagggcgcgcggccgcgtggcaggtcaaagcccacatcggtaggaggttccacaaagctctgattttccaagttctctccatacttttagccaaggtaaaatgtcggaagtcgagtggagcgggtacggagattcctccaggactctgcctgcgtggctccaccctcccaggccgcattcccgggtacagcggcgcccacctaggtgggtatacaagtgtgcgcccctgaggccagcggggaaggacgtcatgggcgaggtcaggcgggagggcgcggctggctccgcccctggggctcccatggccccccgcgccccgcggccagatgctgacgtgtcctttccttcccactacacctcccgacattacctactccggctgccccggaagtcccgccccatatttagcccatccttgcaaatcaactctttcagcgcttcctggaactcaccaccgttttggggaccaagaggcggggctccgcgagcagggtgcctattggcctgagggccggcgggctctgggcgctaattgggcggagggcggtggcgctctggcacgcttgcgcggcgagtagaacgtgtggcggcggcggagatcgcgtctctttcgctccgtgtcccgctgctgctcctgtgagcgcccggcgagtccgtcccgtccaccgtccgcagctggtagccagcctgcccctcgcctcgactccctttcaccaacaccgacacccacattgacacctccagtccggccagccgctccactcgttgcctttgcatctccacacatggcgtcctccgcgcagagcggcggctcctccgggggacccgcggtccccaccgtgcagcggggcatcatcaagatggtgagaacgggccccggacaccgacccctctgcctgccttcgggcgggagtcaggcattgactccaccttccgccagcctgctccatgtcccagatcccctttcctctgcccccttcctcacttttcgtcgattctccgaatcctctcactagacggaagcagacacggagtccccttgttccttgcctcccggacaccttgacatcaggggtcacagtgatttccgaggttgcggcattcggatctcctgtctgtttaccaggacagatcgattactgattgattaacagagacaattcgttgatatctgtcctcccatcccccgtctttctgttcattttgacatatgctgagtagttagtagtttttcgagatcctgacatcggctcttctctactagtacttggccatcatgaaacttttctgttcccacaaacgctgttacttgactcccaagttttctcactctgtggccctcttttcctctctttccctccacctcttgtgtcgacctgaaagctcctgatctttgtgtacttttgacttctaaaaggttaggccggcaagaatcttagtaatcatcattgttctcccgtcccttaaagataaggagataggcttgaagaaggcaagtgacttgcttaaggtcacatggtggtttgggttggagccatagcaagagccc

SEQ ID NO: 49601 - DNA, 467 bp, Homo sapiens
tggtagtggtggattccatttgctgagtctgaatgatcttgcatccttgctttgttgccaggtttgccaaagagcgcaggctgagaatatggagagactatgtggctcccacagctaatttggaccaaaaggacaagcagtttgttgccaaggtgagtcattctcagcatcttgatatgcatagtggacattgccaggcgagtaataatacaagaatttgaacaattagaaatgctgaagctcttgaaaatttcaaggcaagccagtaggagtgtgtgtgtgtgtgtgtgtgtgtgtgtgtgtgtgtgtgtgtgtgtttattgtagggggtttagaaaccattagactatttaaatttctttgtaaattagctaacttcaaactagcttgaaatatctctcatagtttaggacttcttttttatctgcctagcaaatagcattatcttaagatttcctatgtccaag

SEQ ID NO: 49602 - DNA, 1731 bp, Homo sapiens
ctgtcaggcttttttactgtaacagaatgttctctaatcaaataataaacatttcatggtgaggtgccttgaaactatataaaatcaaattaatttttatcaatatggactcttggtttgatactttattcagtgagttataatacattaatttttttgtttgttttcatacttaaattgtccctgatttggccagtgagagctcttaaagctagttcctgtgtccttttgatgtgtccccatccttctttgatccatttcttgctttgtgggatgaggcttagtttaaactatctccaggtcagccctagagtcagccattttgccaaggaatcttgttccttttagtagaaaatggtatctaaaagtcaagaccttgccatcagatatgctcattgctactggagtgttgcttgcccccagaccatctcagttgataagctctagagaatacataggggcatatacatccatacgtatatttatgtctgtatgtatttctgtaactccatatttatgttgcaaaccatatatccacaccaacacctccagttccaatccaacaccacagggttcagctagttttctccctttctgtatttgtaactcccttctccaacagtgagaagcctttgcttctgttacctttaatgtatttactgattttatcatttcccctgtgtgtaacaaactgtcgcatttctgctgccagcctctcctctaggaatgtaccctatagtgccccaatcaggaccttccttctctccccaggtgggcaacctgctcgacatacttgggctcttgtctctcccacgtgtctctcttacctggcttggtttcggactcctcatgacaggctgccctccctatggactcccctcagtccacttgggctctggcaccaacatgccagacttgctctggaaatgtcatcttagtcccttcatgatttggatttgcacttctttgacttatttcattcattaatcattaatctgtcttgtttatttattatgtgagagaccggatgaggaatggaaaaggaatggactttaaagggtgggctaattgtgtcggaaaccagccccatcactagttctgagatagtgggaggataactgtatttagttctctgtttgaatgcataaagtgggcaccataatgatgacttttcagttgttgcttggtaaatgaagttgaataagataacacatagaagacatttaacaaacattactgtctttttgtttgctttcaagaggaatctaatcacctgctcatagcctgttaagggcaaagtattttgtttgactttaataacactattaattttgaactttcctagctttgcctaggagaatcattatgtgccttgatgtcagtaagaaagattagttatgaagttaatgtataactttgcaagagtctaaaaaggcacctctctgccatacatttcgcctttctgccttctctttgccaacattaagggaagagcctccacaaacttttttcccttaacctaattatctttatatccagtagccctttggtattagcttttcatctgacttttcctttctttacttaagttgcttactcatgccttcaagcactgaggccctactaagtgctgggccatttggtggttgctggtattgcaaggatgcagtcctgatgaaccagaaactatattgtaatcgcaaactgtattctcaacgaaattctagatcc

SEQ ID NO: 49603 - DNA, 729 bp, Homo sapiens
taatggtttcacagaggtttcttaattgttttttaatctttaactgtgttacctactgccccagattgatccccctcttagttgcaggccatgataaatggaggtttttgttgagctgacagtgtaggcaatatctgccaaaataatttacaatgaactggtgtttgtgcataatatctctcaccaccctcctctccatcccagtacacattgttggtgaggaaaaagacatgcttaagtgcacattctgtctcctaaacactcttaagaaatgtgttgtatggaagagattatatcataatggtggagcaaataacctgtaattttgttctagtgttaactgcctccattttaggggttgagtttctactccttttccatgatctcttctcttgctgtttaaaaaatgatttcacagagtaaaggtcagagtgcgttaaaatgcttttgtatgaagacctagcaaatacaagacctgcttggctgattgcttatggttggaagtgactcatctaagcacaggagtgtgaggtttatggcttagaacgtaagataccagcctctgtagtggccaaataagccggcctttttgtttgttattacagatgggttttgatgtcaaggtcaactgagttttgagttgtccataagatggacagaacatctgcatataacaccaactgaatgaacccccagtttgtctagggctttgataaaaaatttggccct

SEQ ID NO: 49604 - DNA, 889 bp, Homo sapiens
tcactgtagcctcaacctcccaggctcaggtgaccctcccacctcagcctctcaagtaggtaggactacaggcccgtgtccccatgcccagctaatgttttgttattttctgtagagacaggctttcaccatgttgcccaggctggtctcaaactctgggctcaagagatctgcctgcctcagcctcccacagtgctgggattacgggcatgagccattgcacctggcaagtgaactttaatgtggtatgtttggagtgtcttcaggcttcaggcctccctgttccgtttgtcctaaacattgcaagccatgcccattgtctgaatatcccctatggaattacataattcaactcatatctttttagaacacagctcttaatgtataatagcaaggctgcctgagccaccagcagagcacaagcagactgtagatggcattttttctccaggtaatactaacgttgtggtgtttcacatgtgactcgcccaaggacagaggggcaactgttctggtggatgagctgacctttaccctgccctgttcttgccattagcatgcccactccctgtgtctgttgccaaggacttgaagagaacctccgtgttccaaacctggctttattgatgaactttccacttgctactccacccgtgacggtttctggtcagctgcacttaaatggattttgaaaatgaaagtgaccaatggtctgttatgaaatgctgcggtgcatgaaataagattatgagcaagcttgagaattaagaacagagataccctaacctggtcaaaacaacatgtttcacatagtgagaaaggaatagctcattcttagtctcttctttaggacatttaagggcatcttttccttcttaatgaaactctg

SEQ ID NO: 49605 - DNA, 1159 bp, Homo sapiens
ggtgcagaggggccctccgtagccagcccttcagcccttccaggtgtgagaaagggctcttcatgccacactcacatgtgcacccacgcatgcctaacacccagtgactggaagactgcctccagggaaatacatgcaggcttacaccgcccagacagtctttcatctgtccttcctctttcattctttcacccgcccccttgtgtttctgtaatttgtacagtatcgttgaaaggtgttgaagagatcaatagcaattcaccttttcccttattgattcaagtgatggcaagaaaaaatggcaggcagtaccaattcatttgtcatgagctatccatttcctaccaagccaccagtgacctctcccaatgcctgttaggttgctgatttacagttgggattacttctttttccaacctgctttgataggaatgagagaaccactgtgtttgactcctgtaatcaaagctgggtgaagaaggagactgcaggtactgaacaggaaaactgctgtggagcctggtctccaactccgaggcttgctttatttgaggagctccccacctgtgctgggctctctagcagaggcaatacggcatcagctgatggagctgcagtctcccccagcacttctcaagtccccacccccagcccccgacctttttctaaaggacacagccttcctttgttatctttttccacagaatgtaaaatgagtgtgctgagtgaaaagtccatgacccctgtgaactggctctgcttttgccaaaggtgcaaaggtttgtcattcccttcatgagccttcaagtagtaacttcagctgaccctgggggaatgtgaggtgcccagggtctggccttagcagggctgtgggtgaaggaagtgttcttgttcttagagggttctgtatccaccaggaatgtagagtggagacagttcttctcagcttctttttctgccctagagaaacaagcatgggaagggtgcgtgcgtgcgtgcgtgtgtgtgtgtgttcagcctcactgggaacagtatcttgactttcacttggaaaaggtaatggtggatccttgtgtgtgtgtgcgtgcatgtgtgttttgaccagcctcactgggaacagtctcttgactctcatttggggaaaggtaatggggtatcc

SEQ ID NO: 49606 - DNA, 942 bp, Homo sapiens
acacacacacacacacttttgttcttcaaatcatctttttctttggagttggttgcactcctggtttatctagatcattctcatttgatgaaacaccgtggtgaaaaccctcctacctagtgcttcgccctcatcacgattatccatgtggtgagtctttaaaggccaggtgacggcccttccccctctcctgggaaatcacgccagcgctgatcctgctaggagaggggagaggggagagaatatgaatgagaccttgaaagcagaagcctcactttggggtcatatttggaaaagcccctgtcttcagcagccacagaagctccccctgggacctcctcaagccaggagcaggctgtgagaggtttccctggaatgggggtctgggtgccccccacccccgtttccacctcccgcctgcaccgccgggagctccggaggagttcccggggacctagaaacagcggcgagagcgtgagaggggaagagctgggggtccgggccaaaaggaggatggaggggctaggcttctagagcgtgggaaggggtcccagggaccgagccaagtggaaggcttgtccaggcccccgcctgctcccctggatctggagggagcctccacgtgcttccggctggggcggcaccgcgcagtgccgggagcgcccacgagggggcgcgcgagctcggcggcggcggcggcgccccagcgggagcgggaggccgcggggcacaaagagtggcggggcggaccctggggcgcccgggttccctgtcccgtgggtccccagcaaaccgcagcggtaggagaggtgggctttgcctctgaagcacagcaggcccttaacaagttttcacggactgaatgcgtgagctatgtaagccctgccgcatcgcgacgttagaggtttcccaagttacgcccccgcaggcgctctgatgctg

SEQ ID NO: 49607 - DNA, 437 bp, Homo sapiens
aatatctcatttagagaatatgcttaacaaaatatacatcttaaaaattcagcactccagaatgctttttcaggtgtttccatttgagaaataaagaataaaaattggtaataattatagacacaacttcatacaataatctggataatatgcaagaagcatcatgttgactttcagatatttctctttgtggctaacgaaccacacatcaaaggatggaccaaagttcagatgtacacagtccagggcacctccgagcacagtggcagtgcccttggggattttctttccctcagtgagagacacgggggatggggaggagcccaggagtgtcaccagaaagtacacaacccagcttcttacccagcctgctgccatcatcaactatcaaaccatttgctcctctttgcaagaggtgctcctttagaaggtcccaa

SEQ ID NO: 49608 - DNA, 1316 bp, Homo sapiens
tattggctctcttccccaccttgaagacataaaatcaaagatttttttggtttggtgttgtgcactgctgcatccccaggacctacaacacttcctggcacacagtaggtattaagtatttgctgaataaatgaatgaacaagtggatagcatcctggctaagatgtccaggtctgaggatcaaatcgggggtccactacttaacagccgtacaaacttaaagttactaaattcccctaaatcccggattcctgtctgtaaaatgacattaagactctccatccggtaagattgctgagaaaattaaatgagataacctgtatcaaactgatcactgtacctgccaatcaggtgactctcaataagtcttactgatgctctagttaactattttcatttttagcgcgcataatcaacagaaagcgctatagaaacgtaagggaatgctttgcccttcataaactgactcctatgaacgcatctaaagcagaatcagtttggaaaagaaactcagttccctgtcccttctcttcggggagggtaaagaatgatacggctccctgaagtttgggaaggtgccctcgatcgcaggaaaccccagccctatcctcgaccgccccgcccctacctttttcagtcaccacgaagcactgcttcaccggccccacctgactgaacagttcctccagctgctcactgcgggccgagggcgggaggcggcccacaaataaggtcaggccggccatgagaccgggaaacccaaagcgcgtgaggacgcgagcaaactaggccggcgcacgcgagccgaaacgctggctttggtaggacaaccaagctcacacgccgagagattccggaagtgctcgttgcccaaaagagaccggaggaaaacatggtcgggagggggataaaaggttccggaatgaaaaaataatggcgccccggggcgtagcttctggagcggggctccgccccctgccctagcatcgccctcgccacttttgtgtaaacttggcatcaataatttctaccctagtgttacagcttttttagaatttgcctagcaggctttctggtttttgccggaaggcctccaaaaagtaattttttttcttaatatacaaaataaaaataaataatttctaccctgtttaaaaatctcacctccagatcctccccaaagttagcaggacaggcagaagaagtcgtttttgccccgggcgtaactcaggatctgatatactgtgggtgtttgatattttctgaagtgcctccacaaattcccagattacgtgcataaaacacaaccggaacac

SEQ ID NO: 49609 - DNA, 563 bp, Homo sapiens
ggttctgaagatggaggaagggacagccgctagaagtcagcaaaggcaaggaaatgggttctcccctagagcctccaggaggaatgcagcccggaggacccactgtagacttctggcctccagaacagtaagattgtacatttctgttgctttcagctgctaaatgtatagtgatttgttacagcagccaaaggaaactaatacactgggccttgtcaggtagaagccagagcctgctgtggggcagctgtggggcaggagggaggtcagaggggaattttgcagaagggcagggcaagggctgagcctgcaatgagagggaggaggggccaggccctgagtgctcagcctatgacctcagccttggccagctgaagctgccctggcacccggatgcctgtcagcctgggcttatatgcctgactggaccagaaagagatccctgtgtagccagtcctgaggcaagggtgggggtgtgacaaagaagtttgatgccagagagggagtccaatcagccccagggctgcagagcacacaaggggagggaggaggttggtggggct

SEQ ID NO: 49610 - DNA, 1970 bp, Homo sapiens
tatcaggttaagactgttatgatctcacagaacagctgaggaaacagaactacaagaaggttaaagggttcgcccaaggccttcacctggcaaagtagtggcgtttggatctggcagtgatttcgcagcttgagacctatttaataacagtgtgagagaagggtcacacagtcaagcaaaaaaacagacgaaactctggtatagcgaaggaccaaaagttctgcgggctgagcaggaaagttggctccaaatgtctgcctgcctgccagcagacctccagccccaaccttctgctttcccggcttccccaccccctcattcccgacagaccacagccagccagccaggaaaggaggggaaaggtcgcagtggggatggctcctcccttcccgtcttagagcccttcttaagcagagcccgccgagctcgctgagatgtggaaagtcacagggttctttcccatccggcacgggcacttgacccgggtacacggaaccgccagttctaaagccaccagcggccttcccttccacggcgtgtacaccccttcccgggggtcctccccattcccagtgtctctccgggactctactttctgagatcccccgttgcgtgctctcaagacagaccgcacagtcttggctgggtgggttcgggggtgattagtaaggcagcctagccccccaaatctggacataaggctggtctgtgacctcctggctctttagttcaagccgaaagcacccttaaaaatcatctagcggccgggcgcggtggctcacgcctgtagccccagcactttgggaggcagaggtgggaggatggcttgagatcaggagttcgagaccagcctgggcaacatagcgagactgtctctatttaaaaaaaaaaaagaagaagaagaagaaaaatcatctagtggccaatgtcttcattacagatgagaaaaccgaggcccatttaaataccaagtgacttgcccatatgcagttaggatcccacaccagggccaggagtatttcacgttttctgaagcgacacgacaaactctcatagaaagcagagcttgcagagcttaatatgttgcacaagggcctcaccattccagagataccgatggcaactgaaactcgggatttggaatcttggtacagctatgaagtgaaacaaaaccagctcttcagtccttgaaatgaagaaaataacgagtggggtaggggtctggtgccctctgacaatttagtgcacccgaaatctctggggaagaacccacccttcacggcggggcttcacggacacgaaggccatcggtgtttttcacctactggggagaagggatatgtgctctctgactccttcaaatgttttctacagcagagatggcagtcgagattaatacacacgcctcgtctcactccagaacacaatgactcaaaaccgcacgacgtgtacttttggaaacagctccgcgggagagcacccgggacaatccccaaaccccgttgcccgcggggtggggccgcggacgtgcgccacgtcgtgtgcgtcccgggcgtgcgtgcggcctccagtgcgcgtgcgcgtaccctcctggggcgtgctcgcggctataaggggcggaggctgggcggcgttgctctgcgctctgcggctgacggcgcttttgtctccggtgagttttgtggcgggaagcttctgcgctggtgcttagtaaccgactttcctccggactcctgcacgacctgctcctacagccggcgatccactcccggctgttcccccggaggtgagcggccctgtgggcttccccggctccccacccccatcgctagagtgctcgccgcgctagcagcctcgcgttccagggctgggggtgcgccgccgggatcctctctgatcgcccacgccccatctggggtccccattcagccgtcagccctgttttgtcctaaggtggtcctaactaggat

SEQ ID NO: 49611 - DNA, 971 bp, Homo sapiens
ggatccgggaacgggtggacccgggcggccaagcctcttcagcgccggcccaaccgccccggcccgggccagtccagcggggcgggggctggtgacacaaaggcggcggcgggtcctccgggcctccgacctcgggcagtcgcaggacgccccgggccgcctgaccttccctggcgtcgcggcccgtccgccggcgccgcccgtcgcccgccctcagccgtccggcgaggtgcggcctcctcagccggcgcggggtgccctggttaacccctgcccggcagcgcggccgctgattggaggaggcggggcgccggggcagcggggaccccccccactccgcactttcctcgtcccctccccctcctctcccactgtcggcgcttcccccaccccccaggaccccccctgcctcccagccgtgcaaatctcgcgaggaaacacgcggtttcactagtgtgtttacaccgatcagtactaatccggaccgaaccgatccggattaaggggccggaggcgggtcctgggcaccagcggttccgacccaccccggccctccgcgccgcacccgagtggcccccagccgagcgggcccccacctcctggcccggcctgggcccttctgcgcctcccttggcctttgtccagcgccaggaggccggtcccgcgcccgcgtcgggcgcctggctctgtacgcgagcccggggatctgcggccttcgtgccccccctcccccgcccgccctttcgtggagcccggcgcaggcggctgctgcccgggcggggggttgcggcgctcaggggaggccccggctccgccccgggcctgcccagggggagagcggagcggcccgcagccgggtcgggtcggggcccctcccgggaggagcgtggagcggcggcggcggcaggtgagaggctgagccccgggcgggggagggcgccaggcctggggcattaaccgtcccggggacc

SEQ ID NO: 49612 - DNA, 2513 bp, Homo sapiens
aagggtcactgacactcctttgaatgccagaaggattagttgtaaacctttcacgttgacagtaactagcttgctttcatgagcttaactgtttcatgagtttacaacttgtctcaatttgattttaaactacagaggctttatgtgctaagaatgccacaggtttacattccatttgtgttgaagctatagtagcctttatttgatatttgttttaatttcatgacatgaaattaaattttcagggacatgcaacgggttcggcccattcccttcacttaacattactgagctgggcagtaagctcagagttgcagatataaagatgaatagacagatacctacccaggagcttactctagaagaggacagatggataagctacattttatagcagaatttggcaaagtgtactgaagctataaacagctatgatggtaaataaggtaagaattatgcttagtgaggtcagggaaggcttctagagctaacatctgaactgggacttctattggcaaggcagaaaatcaggaaaacgcacttattcctggcagaggaagcctcttgatcaaaaatcttaagagatgaaaaaggaccggttgttaggaaacagatgatggtgcccagagcgcaagatgagggggagtgttgggagatggagctaaaagatacactggtgccaaagactgaagagcctcctgtagatagcgcagggcgcagcgctgaagggaaagaaaaagttgggattgttcaataaagttggtgactgattcagtcggattaattccgccctggtggtcttgtgggaatgaagataactagcaggatagtctaagaagccctgtggaagcagagtcatgagctgtgaatggggacgtggcggccacacggccgcgcccacgccacccgcagtacggggctggggctggggctggggctggagcccgccgtcccaacaatcccggggacgagagttgggcgggaatccgctccacgcaactcggcgcggtcccggggacgtggcgctttccagccaatcccggctatgcgattgttagaccaatggctactcggggacgctatgcgacagcggcgggtttgctgatgattggtcgggaggccgccggcgaggcggatgagggcggggtgcggacccgcttccggttgggcggtgcttgcgcgcgtgagctgagccggtgggtgagcggcggccacggcatcctgtgctgtgggggctacgaggaaaggtaagtacggtgatgcccagccccttcaccactgcctcatctttattcgctttctttctgtccccggtcttgttcttggcgcggcaggggactgcctcactcggtgccgctgtctctgctggcgcccgggtcccaggcctgatgctgctggagatcccgggaccctctgtgtgcagcctgggatggaggccgccgcccgtcttaccgcgcgctctgggaagggggctggtccggtggaactctgtcccgttgggtactgttctgtgcctggtttgctgcgtcctggtcctccatctctaggtcacgccactcaccgagtctctggcaccagagggtcattttttgcctccggaaggtcggagggcatttggatagtgttattgtaagagttccttgccgcctccactcaccatcctgcttgtatctgccagctccgccccaaggccacatcccgacagtagggtgcatctgccaaggtcgtgttcactcacctaaagggtgcagaaacaaggggggagagaacgagtgacgacactaggtgatatctatgattttaaagaaaagctgaatgtttagagcttccatatttggctacgtacttcagttagcgacggaaaatagtttttaaagctttattggggaattaatttttgttacgttttttgttgcttctagccccatatcctactgatttttagcatgctgcggtcagaaataaacttaattccctatagctgccgcgattaagcgtagagtggcttgcagtttcaaaagctgcttttgcatcaaggcccaagctccgtgggtctcctgctaaaacttttgagcctgtgatctgaattcctaagtgtataaaattctagaatagtgtcttcgagaattgagttgcgttcattttctggtgtggaccatgaagtcaacgttaatgaattgggaataaggtggcttctagttgttttttgttctagtagcttattcagcttggaggcagagaaccttggaatctctgttaaattagtctgccatagaatggaacttgacacaagacaaatgcaagtttgacctcactcagtagatttaattaaccaaataccaaacgacagtaatcactgaagaatttatatagtataatccaaatgagggaccagatataacctctaagttgtatttgtcaagaaaatgagtttgccaagacctaatctgaggttttactgtgattggggggtgggggggttccaataggattcttttgagaatcacaagtag

SEQ ID NO: 49613 - DNA, 1264 bp, Homo sapiens
gatgaaggattctgaacagggactcagtttctctttttgtggcttattctgtctttcccctttagccttatatagcatatcttatatatatatatgctatatagcatatcactgtatatgctatataagtattggccagattcagaatccaaggtctgtcactgtttttctgtgaccttgatcaaggtgccttgggcattctgtttagtatgataataccttctgtcatataatgtattttgccatttcattggtagcttcatattgtaagaatggggggaaatcccattatttaaaatatcccatgaccaatagtcagacattgagtaataacagtgatactaaagaactctcacagaaggcagttactgacaacatagactatctatagctaaacacataatcactggtcacatctcctgttagtgtgactttagcatgactaaggctaccaggtagatcatcatgggcttgatgggatagtttgtcattaagcagtgtcagtgttctgtcaggaagactcagttattttagattgaagcataggaaattgctcatgttttaccatttcttggctagaaatggttttaaccatacagacacacatgcatacatacatacatacatacatacatgtacaagtgtgtttaatgaataataaatgtttacctaaactagatactttactttcttctggcaaattcagagaccaacttaatagtctcttcttattctttcctgtttaggaaacaatggaagatatagataagaatgctgatggtttcattgatctagaagagtatattggtaagtctctgcttttagtgtttttcttagaaaagctgagaagctttgaaaggtgtatttgctggctgggcacagtggctcatgcctgtaatcccaacactgggaggccgaggcgggcagatcacctgaggtcaggagtccaagtccagcctggccaacatggggaaaccccgtctctactaaaaatacaaaaaaattagttgggtgtggtggcgggcgcctgtaatcccagctactcaggaggctgaggcagaagaatcgcttgaacccaggaggcggaggttgcagtgagccgagaacacgccattgcactccagcctgggcaacaagagtgaaactgtctcaaaaaaagaaagaaagaaagatgtatttgcccatagaaacaatttactccaagggtcaattctcactagctcattagctgtcaccagatcattaaccagaccagtgtgatagt

SEQ ID NO: 49614 - DNA, 919 bp, Homo sapiens
gcccaaatgggcatgttgcccagggggctccctggcactatgggggaagagtctctccttcccctcttatcatctcagttgagtcagacttgggggagggggatacacagtgtgagtcactgggtacccttttcctgagctcagcttcataccgaggcgatgaggccaaacgggctggtgacagggacactgagtcaggggcaggggccccggtcttactcctgggcctctggatttgggccctacatgaggcttttctatctgtaaagtcaagcaatggctgggaggcacacacaaccccccgcccccccgcaggcttctccttcattggcccgggcaaggtccctgcttcctctcaggccgtctctgcacaagcacacacacttcccttccctgtccacaggtggacaatgccctgggctaggagccagccctcgcaggccctgtcaacagcctgccaccaactagtctagaaaattctgtgaacaccagatcagtgggttttgccctaatcactggcctcagtttccccatttacctcttcagcccgtgcggggtgtggagggagcatatttcattcctgacagtttggtgtgttgggtgtggatggagaactgtcggccctccccgccaccttccagcgcggcggcaccgggggcccagggggtgggcgccctcaaccccgtcccgccgcccgggcggcgcgggggaggggcggcgggggcggggcgtcctgtgcggcgcggcccccacccgcgggccgggcggcattcctgggaggccggcgctctgacgtggacccgggggccgcgggcgcggcgggggggcggcggtccgggggcttcttaaaccccccgccccggcccagcccgcccttcccgagcaccgctccggccctggagggagagagagccagaga

SEQ ID NO: 49615 - DNA, 1770 bp, Homo sapiens
acttttgcattcctttaactgaacaaacgtgtgttacttgttaactatgtgtcatagttacacacatacatacacgataaagacccagaccctgcccttgagatgagtaactgcgtctcttctctggggtctcggcgtctaacagcgtcaggtccaaagcgcttgttgaacgaatgaaccaaggaacgagtgaatgaacgaatgaatgcccgcgaaggacgtggtgccgcgcggtcttctgggaatcgtagtcccctggttcgggcctgtctttacggcgcaggcgtattcacatggaggccgtgttgctgttaatgcgcatgtcccggaatgcggctgggaggactgcgcatgctcgaagggtgggggttgaggccgacggggcgccgtacggcggaggcggggtttcagtggcttctggtgctctagggtgagctctgcccggctgcagggatggcggggaggggtaagctcatcgcagtgatcggagacgaggacacggtgactggtttcctgctgggcggcataggggagcttaacaagaaccgccatcccaatttcctggtggtggagaaggatacaaccatcaatgagatcgaagacactttccggtacggtaccgcgcgaggcctgaacgggcccttctgctgctcggtggagtgcggggcgaggctggaggctgcccggacgggggtgaggggacgatcctgaaagtccttccgcccttccggagcggaggcctccgcgccccaagtccccgtttggggctcggtgggacagaagctgtatcaggtccacgagcccccccacctcacatgatcgtgtgtcatgaaagaaggggaacagagctcgtgacagcctagacagtgggcttggactttgttctgctttctcctcctttagaggctcaccatcgtcccgtaaggcagggatgatttttgtcctactcacaggtgagaaaactaaagctcggagagggtaaggcacacactaaagttacgagtcggcagaggcagagctagaatttgaacccaatctcaaccctttctgcctccggtaagccaggtacacactcttggcaggtctcctcaggcggcctcggaatttccttgtagtcttgagcacagtaggcagaaatgtcgggactgtgagagccttctgctaagaccttgcactcaagccctcactgcctgccttaggtcagagtgtgggtgcaggcatgcttttaatccaccaggggtcctggtgactggaattaaggataccagcctcctattttattcctcaccccttctccagggcccctgtaccaagtctcaggaataaaccactcacctgtttcccccaaacagtccagcccagggctgctggctgagactggttcctgctgcctggtgtattaggtagtccctgacctgggaggctgttatctgccattctctaagctgtctggtaaagtgacccaagttatcatgggagaaggacaaattttacttcaagaattttttatgtttccaaccaaaagggacctcagagatcaaatctaacccagtgactggcagggggtgggtgctcagtaagtaatttttaatcagtaaataaacgaatgagtctgggtgcagtggctcacgcctgtaatcccaacagttttggaggccgaggcgggtggatcacctgagctcgggagtttgagactagcctgaccaatatggtgaaaccccatttctactaaaaatacaaaaattagccaggcgtggtggcgggtgcctg

SEQ ID NO: 49616 - DNA, 545 bp, Homo sapiens
cctcaggctgtggctacaagaatgagtgagcagcggtgggtcctgggccacaaaaacccagagctgcccttggccgggacttccggcccctccctctgcctgctgcagcctcttccgggacatgtcttgggccctgaactcaaggctgaagagagactcagtgtcttctagacgtgctcctcaccccatgccctagtctctgagatgatgtctccttctcctttaagtcacttgggcctgagccctcatgtgacctttgatcctccggcaggctcatgccatcctcctccccaggcccatggcttagtaccctgacctgtgatgtcatttgcctgctccaagcccttccatggccttgcaaatagaatctccacaatatgacccctagccacgtcccaggtggctctccggccatacacacccgccctgcactgcagccaggggggccacctacggcctcctgcacacttggaacctgcgctccttgtctaaacccagacctcctggccctgttggccccaaccctgccttgtctcctggccaca

SEQ ID NO: 49617 - DNA, 1583 bp, Homo sapiens
tgtaggcaggcgagaggagggcctggagctgtgggtcggccacactgcgccctcatttgtgtgcagccccggaggaccagagtggggaagcaccccaccctctcccagggcccaactgagcactgcagcgggaggtacggggttgtcaaatgacagttttgccattccagattgccaaaagagccagtggccagtctagggcaccgcgccgtctggcatctccctggaggccctgggcctggcccgaggctcagcccggatctgcagttgccaggtcagtgcggggcccggagtggattcgcggggcggggcggggcactgcccgcgcccggagctcagcagcagctgcccaggggcgggggcggcaagacgcggaagtgcccggcaggttggcggaccggcgggaggcgcagcctgggcagagctcagcttggtcccgccgcccggccggtgctccctggcgcagccacgcaggcgcaccgcagacaggtgggtcccggccgccgcgctctcctctctgcgtccgcgcccggcgcgccccgagggtggcgggagcggtgccggctactgcccccaagtctaggcctagactgggccccgcgccccccaggcacctgcgggcggcgggatgaagactggagtagggcggggtccgcgtccagctgcgcctggaaagcgagctcgggggggtgcctacagcagggtgcgcccggccggcctgggacttccaaagcgcctcccacgccccgatcggtttggggtgctggcgcccggggagcccagtgacccaggcggcggagtgggcagcgctgcggggggcgccggctctgctgctctccctccccctcgccatcgcccagaatgggggttcccgggagccccgctggaggctggcttggaccacagaggagcgaggcccgatccttactttcgatgcactcgcccttgctcttaccgggccaccctcaccctttcggaaaagaggttgaggttaaagcgttcatcccccgggatcttcaggccaatggcaggaactgtgcaagagtttgggggaagatggtgtcaggtagaggctgcgtccctgggctcgcggccgggaatggcagactctcgtcccccgagcagcggaaaaggatggggcgcaatagttcctgggctggtttcctcaggtcctgtcccagaacttaagaaggcaacaatgaagaggctaaacgtggaggaaaagtgaggctagcatggccgggatgcgtggggagatggttgtctccggaccccgggaggggcgggagcgggtacctgggagcagaggctggagtgggggactttcccagcctcgcggccacgctgaacacagcagggcgaggaccggggtgctgctcctccagcagcaggaggagaggtccagaggccgactctggaggtgggggtggctccgcgggctggcccagggggtgtgccccagcggagcacgcgggaggggtgggggcggaggggaggggggagcaggggcggaggactgggctgggcctgggctcctcgagggcccagaatggggataagtgaccagaaccagagagggctcg

SEQ ID NO: 49618 - DNA, 974 bp, Homo sapiens
ataacaggttttttttttcccccacagcactgctttacttaggtctcttttccttgccccaagatttatcctaaattaggaaaggatatctatgaccttgatttcagacttaccatattattttatctgtcatatattagtcccactgagggaaagagggcttgacaaagacttattctacaatgtgtgggattccagaatgtgtgggtggctgccttagagtcaacaggagacatgccccagctagttttgcaagtacataatgacattctagaagtttctcctccaaggagaaaggagttaacattcactgatcacatactatgtgcaagatcttctttagatttccatttggtatctcataataaccttatgagactggtagtactaaccctatttcacttgataaataaactgaagttcaaagtaatagggtatgtggcaagattcaaaccaacatacttgactccaaaccccatctttggagggtttcccctaggttcccatttgctttaggaaaattagagccaatacgatcctgcccttatactgtaaccagcactgaatggaataatgcaaaacagaagcagagagaagcaactactacacttctttcccctgaaacagcttgtagacagaatactacttctactgagaagattcatagtaaaagcaatcaaagaatttttaaggtcaccccagtcaatatatgcctacccagtggaggggaaatccccacttctggcaaaatgtgtcatgaagggtcacatgctatttttcagtcatgcatgtcacttgatctatggctaaaagtgagttatttctggggcatactgggcttactacttaagccacttagtgaactataaaataatagcattccatggtttgggattttaacattaacaaaattgctggagacattccagaagatgagaaagtaaactattttggaaagtgacattaagaaatca

SEQ ID NO: 49619 - DNA, 2327 bp, Homo sapiens
ccaagaccagatttttaaaaagtcaaagttgcaaatttttaaatattatgcacttgcagcctaggagctgatttaataaggcagagcacctttaagtatcagttatgagttaaaataaagggaagggggccaaaaaaaatatggttgtgagtataaaatgcaaaaataaaggtaaaggtgagtattttgtcagcctgtaaaaaaagcctctttagttttcaaagtacttaatttttaaagtacatcctacattagaacctaagtcagccagataaccaagaatacacatttacacagaaatgaagcacagcaaaggtgtgaaaattagggcaggaagcataaaacatgaatcaaagaatgcagaaatacaacagatataagctacaattaaatatctcaccggatgcacacacagttttatatggaataatcaaagcagcagtgatacccatcttataaataaaaatctaaaagccagagaaataacaaggttagaggattaatatgaaacaaaatgagaactccaaagattttctgaaagcagaattactgttttttcttcatattatgttgccactccaaagcaaggggaaaactcgcatgagtaagaatctagaaacctgagaagtttcgagaagaacagactcaaactggagtgaaaataggcaaaaagagtgaggcataaggctacgactgggagcaaaatgccagatgcaagtcttggacacggaggggagacgaataaagccttcttaagcggaaggtggagaaacactggggttggatttggtgggaggaagacaaaacggaaaagcacggcccaagaagcaacggcaaagggagaacttaaacaagattagattgatgccacaatcgaagagtataagacctacaaatcagattctgccgggtggggaaagggccagttcgcgaccgatcaggtgcgactagtttcccaaaagcggcaaagatgtagcttcgcagccccaccccacgacagcagctcctccccaaggaggacctcacgaggtcaactgccgggctcaggttctcccccggagcctaggttccaccccgccccggccgtgcggcacagaactgcctctctgggcccctcaccgaacgctgcagctccccaagccaaaaagaggcgcgctcctttccgctgggatctgggtcgtggtaaagcgcctgcactgcctggtacacgagctgcaatgtcggctttgctccttccatggtggtggcggtagtggcggtagcgacggctctgattcttctccggaggattcctcggttgctccgccttcgcgcttcctcactgtctgggccacggccgctccctgactggcgccatctcctcctctttggccgttaccagggcagaaggctctccgtggaagttgccccctcggaaacagctattaggtcgtattcaggttcctggccttttttccggtttttccacttgattctagactcttgagtccacagattctggcgctcccgtcttcagtcgctgacttgccctcagaagcctatcttgggaggccacacaccagtgtacctaaggttcgtttacccggaccggaagcgacagcaccgatacctttggcacacttccgcctggtacactacaaacggcctccttcccggcacgcctcctcttgtctccccgccccctcccggaagtaaccctgccgggccaggagccgggaagaagagccggtgttctctctgttcctcgctagcagcttgggacattagcgccgagatgtgccccatatctgagctgccttcagctccttggaaacggatccaggtttttcctaccccttccgactgccccatccctctccagagaatccttttctgccctggtgatcaaggcgcgtcaattcaactctccctagagtggccacagtactggagatccaaagatgacttaagacatggtacctacgctggctctagtggaggagacagacacgtagtcaactgaactattttacaaacctgaaatatgtgccacattgagataaatccaaaatgcctagaatctttgttcagctcccctttacttagttcttaagcccaaaagaggtcttcattctgcttacagctcctggtgctctaactccagagcattttgcatacatctttagggttattctcacattgaactgtatttttgtgaatgcctttctgtccgaatccaataccagtggtctaacaattcacaaaagaaaacagaaatattggaaactgtactatggagaaattagggacaaaaggtaacagtatattgatattaacattgctgctag

SEQ ID NO: 49620 - DNA, 1078 bp, Homo sapiens
aattagccgagtgtggtggtgggtgcctgtaatcccagctactcgggaggctcaggcaggagaatcgcttaagctcaggagtcgaatgctgcagtgagcagagatcatgccactgcactccagcctgggcgacagagcaagattctgtctcaaaaaaaaaaaaaaaatctgtcgaccgcacaagctcctatagagtaacatcatccttagagaatgtgtgagactacaccctacaatccactgaaaggacacccaataatctcttttgcccttttcctagtctttaacagtttttcctggcaatgtcaaggctcatagcaagggcgattttgcaagacacaagatcacgcagccctgggcccatggtgcctgtgaacaaccaaccacctgagcagggaagcagctgcccctttcactaggacatggtcactttgtccctacccagccaacttggcttgtttcccttggcctctgagagggttagagtttttcatccctggttactgattaatcatattatattcccttccctccaccctggagggatgaaaacagagcagaaacatttagtctataaactgggaaagagttagaaggagacaacgagggaaaagagacatacaagtattaataggacacggacaaagccaaaccttatccacttcataattttgtgtatatctggcattgttccagggctggggcaggaacagagagtggggtggagatgtctctccacactgacctctttcctgaacccatttggctcttgtggaataagggagagccaggacatcccctataacaaatccaagatggcttcaccctattaaatgtgtggacctggtgaaatggaagtagctagccactcttgattaagccaacaattttcaaactactcctgctcaaagccccatttaatactgactttccccactggttagttactcatctcctccttcctgagcaaatcctcctaaacaaatggcaattaactaagacataatgaggagctgcctgatggaggccagaacatagtttcagtcaaagccagagtaattcattccttcccttagca

SEQ ID NO: 49621 - DNA, 912 bp, Homo sapiens
tttagtagagacggggtttctccatgttggtcaggctggtcttgaactcctgaccccaggtgatccgcccgccttggcctctcaaagtgctgggattacaggcgtgagccattgtgcccgagctgagggcagatttcaatcctgcacacattcctttcttcccttctgctgcatatacttgctcctgcattacatgtgttggactggtttctccctgccctgtagctctgcaatgaagcccaggatctggtttctcccaacttttgaccttggactcactgtctggctgcagttctttaaactgctgattctatgaaaggcctttgggtcacgtcagctgctgctaccagttattcagtaactaactcacaagctctgagattcccagtcaggcgagaaggaagagcttgcaggggctctgcattcgttccgcttggctaacttggtgttgcaaagaaactttctccttctagaggtgaattccagcttttacagtcagaggagccaaagttctgagcctgcagcgccattcccatcctcccccagtgcaggccaagtccacagtcttcttcctcttccccaacactgcaccaaagcctctgctgtctcatgctagcctgcttcgttggcatcattttttgaccttcctggcctcatactttgcgggcaaggaaaatcatagaataatttctgttttcctgacctattgagaaactctgaaatggtttgtgcccctcatgtagtcagagagaccctaaacagaatccattctgctgtattcctcatgggaccatttggaatacaacagaccccagcaggcatcaatcatctgccatttcagctaaggaaggagagagtgagcctctctttcatggcattcggtttcctggctctggatttgacctatgcgca

SEQ ID NO: 49622 - DNA, 856 bp, Homo sapiens
atctacccttggtctaattgttatgtgtaggttagttttgtctccctgattttattgtcatcccccagggattgtttctgttctcccgcgttcccagagctttcggcgcattgctcaacacacggtgtgcgtacttgttgattttaatgtatgtgtgtttgcatatgtgcacagcagctgggcggaggacgtgggtgtgggatgcactgtgcattccttctcctcactcttgttcctttgagcagctgcagcctggatgctttcccttaggggtaggggagaggcagaaccgctgaccctttaacaagttatccctcacagaacaggtgtctcccccgactctcggtggagagggatggctggatacttagtgacatcagccacgagccaatgggaagtcgggctcctgcacggcgcggctcggctcatgcccccgggcgcggggcacacaggccggccggcagccgctgggaaataggcccccgggggcggtggcggcggcggggccatggcgcggagaccccgggcgccggccgcctccggggaggagttctccttcgtcagcccgctggtgaaatacctgctcttcttcttcaacatgctcttctgggtgagtctcggggtcgagggcacctgggcggcggggtccccccgcggggtggaagggtggcccggggtgccccacgcgcgggagccgcactgccgagttttctgggctgacggcactttgggggaatttatcctggggagggacaccccggggacgccgcgtctgcagggggcgttgtagggaggagggtatgccagggaatcagtaaagactgatgggtattctcggggcgtcggaggagggtct

SEQ ID NO: 49623 - DNA, 1488 bp, Homo sapiens
gagatggaacagaagtccccgttgacttcaggcatcccctgtctttcccatcctgagccaggagaaaagtccgcttcctgcagacgacctcagaccaagcaaggtgcccgccgagtctctccttgcaggtccggcccacgatttccactcatctctttcccccgggcgcggggcggcggcaggcggggtcaccagatccccctagcccgggcccctccaggcgccagggacgctgacgctcgcgctcttcctctctcgcctcccctccccacctctccgctccttcgtccagtccctcccccagcctcggcgcaggggggccgggcttggctccgcgaggcccgtgcattccagagagcccagcgagctagagcaacaaaggagccgggtcgccggcggggagagttcggggggctgcggcgcgctggggcgaaggtggctgctgggccgcgggctggcgcgggggcggagccggagctgcactcgcacccccggcccgcgtctggcctccctcgcggggcggggaggtggctttaatggtgggagagggaatggggctggggattgggggcccaggggtctcctagggctgaagacaacttggattgcgaggctagggcttggggagtcgtgcatcccgttccgggcctccgcagcccaacatgggccccgggttccaaagtttgcgaagttgggcgccgaggggccggggcgcgcggagcgtccgggggggcccgggcccggattctctgggcgcacaggtcgcctgagccgcctccgcggccgccgaggtcgtgcgtgtggccggggggctccgaggagcaggcgggggcgccggggcttttgctgagttggcggggttggccatggccgctgcccgcccagcgcgggggccggagctcccgctcctggggctgctgctgctgctgctgctgggggacccgggccggggggcggcctcgagcgggaacgcgaccgggcctgggcctcggagcgcgggcgggagcgcgaggaggagcgcggcggtgactggccctccgccgccgctgagccactgcggccgggctgccccctgcgagccgctgcgctacaacgtgtgcctgggctcggtgctgccctacggggccacctccacactgctggccggagactcggactcccaggaggaagcgcacggcaagctcgtgctctggtcgggtaagtgcggcggagccgggtctggggggcgggaggtgccgcggtaagatgggggcacccttggaaagaacaggctcaggcctgagttttggagagggcggggacagcacccgggagagttggagggacagatcccgaaactttgggggcaggttacgtgcaggatgggaccctcggtcatgggaaaaggagggcaaggaagttgacgaagcgggtcacaaagggcctgagctggtgggtgagcaaaggatggcggggatgaggggcccgtgaggaggtggctctaagcca

SEQ ID NO: 49624 - DNA, 2102 bp, Homo sapiens
ataggtgaaaagatttggcctcgtttaaggcaacgtgtaattcctcagccttgaattttgatctagtgatacctaacttctttgaggaatgatcttagcttccaaacccagaatgtgacagaaagcgccacagcaagcaaggtcctactttatcccttctaaaaacaaagccactgaagtttggaagggtgttgagttctcaatatcacaaagaaaaataaagccacttccagcctggagccgccgcttctcctttaaatactcgctcacgtgatcgcagacgggcacgcgcggaggaacttcacgctgtcaggacaacgagccattcctctaccacttcccctcccctaaggcttcttggcgttccctccccggaagtcacaactcctctggagactttctcttcctcatcccctccgtcgagtcacctatcctcactcctttctgttagctgccggccctagcgctccctctcctcggctgaatctcacttagtggaggaaaggctgaaaggactacaactcccaggggacgctgcgggccccgcccatggggcgcgcagtgtaggtcggggcctgaggtcccacggtcttctcgccgcgtgcggccgggagcaaacgcactacaggttccgtggcgcctcgcgcgaggccagaccgggacggggcggggcggggctggaggggccgggactggcgggcggagaaagggggtgggagaggaggcgatggaggggaggagtggggacatgggggagggaagaggaagggaggtgggaggcggggccgaccaagagcaggagctggagtctgagccggtggttgcagcggaggcggtgatgtcggtgcaggttgtgtcagccgcggctgccgccaaggtgcctgaggtggagctgaaggacctgagcccctccgaggcggagtcgcaactaggactgagcacggccgccgtgggcgccatggcccccccggcgggcggtggagaccctgaggctccagctcccgccgcggagcggcccccggtccccggcccgggctcggggcccgccgccgctctcagccccgccgccgggaaggtgcctcaggcgtcggccatgaagcggagcgacccacatcaccagcaccagcggcaccgcgacggcggcgaggccctggtcagccccgacggcaccgtcaccgaggcgccgcgcacagtcaagaaggtactggggccgggctgcctctctaggagaggaagggaggggaggggaactgcagatcctctcggcacggcggcaccaccctccacgccctcctttctgatcgcaggaccggagataccccttgtccccttaaacccactctctcagagatgccccccagccggcccctcgtgctgggagcggagactccaggaggcacggccgtacttcgctctgaataacatggaggtagcgctctcccctactacttggaataggcagcgggaggagagacacctaatagtacgtcccgcggccccaacacgctcccgggtgtgattttccagcctatcggggaagagacctcgatagtatagaaaaaccttaccgctcacgggagttcacacagcaataaggatgaaaagatctttaatacttggagaacgagtaaggtgtagtcaccttgcatagaaatcgtcagagttgtctggtttccatacagttgatgactttctgcctttctgtggccaaccgtggccatacagcaacacgatgctgtgcccttcatttccagcgactgcgatattctctcttccctgaatatgtaaaagggtaatggagagattctcctcactctttcgtgttaagagctttgtcctccctgctgggtatagttggtcaccaggattattaggctgtgtatgaagagaatgaatgtcttattgattgctttattataatctgaaagtgataggaagaaatgctgctacttttgggaaagacgatctttgtggggttttcggtcttaggcgtcagcttctttcagacagttttgaggaggtctcagaataccaagaagtaactgcctaggtggatgatagccctgtattacccgtacattgtctatccatagttgtctgtc

SEQ ID NO: 49625 - DNA, 658 bp, Homo sapiens
tatacacccaaaaacagagactgagacttaaaccaaagactgactccagaacacatgaccgctatatttaaatggccattgggaagcataaaaatcatcatgactctgaaaaagaatttgagatttcaggatattctgaatatgaacactttcttcaaaagtaattttccataaatctggatcgggattagagatggctgttatctttttatctctcaggtggtagaagcatggttcccctaagcctctgatttattaggtatttctgaatattgattagtaaaacagatgacttcccagaaagctgtgtctgggttctgttgccaaaagtactttgagctttcactcaccctaggagagggaaccacaaactttttgtacagattagctcctttcaagaacaaaagtctctttggggatttactaattccctcacctcccctggtgcccatgttcattcctgttgcctcgtgttaggactttgctccagctccaaaagagattctgaagcccctgctgcccaaatggtttgtagtgccatgcctgattaactgggcaaggtcagacttgccttttacagccctcgcagaggtagaccctttgctaagaaatctcagaaatgccttaattctctgcatataagtagatcagagcatcg

SEQ ID NO: 49626 - DNA, 929 bp, Homo sapiens
agagcttctccgatgatctctcccaggttggccgagtgagcgggcctagcctgcgctctcaccccagtgccaccccagtgggagcgccgcccgcgcccgccccctcgccccgcgcccgccccctcgccccgcgcccgccccctcgccccgcgcccgccgctccggcagcccaaacccagacgctaaagcgccgaactgggtttccgggcgctggaggccgcggtcggcctcgtactaggtgacggcccatcccgcgcgcgcaagcccggaaccccgctccgctcaccctccgcgcgctgccgctttgccctggcaacggtaaccacggcgaggccctgccccacgcccggtgattgtgcgcgcggccccgcccccgaggcgcacgccggcccagcgcccacagctgcggcggcctaggtgccgcgtggggcaagcaggtgcctcgcgtccaggcggctccgcggctggctgcctcccgagccggccgcgctcctcccagcgaggcgtggcggggaggcgtagtgaggctgggcccgtggcggttccctgaggagggccgagaaggggccgggggtgctaggggaacgggcgctgggggcagcggccccggtggatgctaagggcttcgggatcgggagagtccaccacgcctgcctgctcggctgagaatcgccatggtaatccccgtctccctaaagtacccggggccagggcgcgcgccgtggagccccaggctgtcccggagaggcgcgggcgccgaggtcaccgcctctccctggggtcgacctcaacgcgtggcgaaaagatggagggacaaggggtgcccggcggtccgcgcctgctgggggcgcagcagccgcggagtcaggccagccgtctttccaggttttaggtcgtggtcctgttgagcagcccccacacccagacgg

SEQ ID NO: 49627 - DNA, 1765 bp, Homo sapiens
gagccgagatcatgccactgcccttcagcctgggtaacagagtgagattctgtctcaaaaaaaaaaaaaaaaacataaaaaatttaaaaaatagatcaaggttcagtgcagccactgtggaaaacagtttgggatattcctcaaaaagttaaacatagaacatgacccagcaattccccttctaggggtatacttaagagaaatgaaagcagggagccaaacagatacttgtccgcaatttccattgcaacattattcacaatgaccaaaaggtggaatcaaaccaagcgtccatgagcagacaaatggataaacagatgtgatgcgttcactcaatattcagccctaaagaggaaggaaatcctgacacatgctacaacagtgatgaaccttgaaaacattctgctgagtgaaataagccagacccaaaaggacaaatattctatgactcacctagatgagtaatttagaataggtgagttcattgacacaatgtagaatagtgctggtggtggtggtggtggtggtggtggtggtggtggtggtggtgtgtgggaggggggtgttgctgaggaggggctggaatggaaactcattattgtttgtttttgtttttgtttttttttgagacagagtctcgctctgtcacccaggctggaatgcagtggcacaatcgtgcctcactgaaacctccacctcccaaggctcaagtaatcctcaggcctcagcctcccaagtagctgggactgggactgcagggtgtgtcaccacacctggctgggaagttattgtttagagcatttgtttgggatgatgaaaaggttctaaatgcatgtcagtgattgttacacaacattgtgaagggtcttaatgctgctaatttatacacttaagcatggttaaaatggtaaattttatgtatattttacaacaatacaaaatacaaaataaaatcaaggcttctccctttttgttccaggtctctgagagaggtggcggcggagggacagcagatgcagggcagaggcccccatgccccgaggctttctctctgcgtgggggcagggtggggtgggtggcagatagaagggagaggctttctcagaaggaccggccaccaccccagtcctttgctcgaagccttctctcccctcgcggcgcagagaagccaatcctccctctgcccctgcacaccttgccccccagtctcaaggccacacctgggctactagtcacctggcccaccccactcctttaccctctgaggcctcgaacccacctcccacagaaaacagtccacacctgcctgctcgcccttcaccgctcctgacacacccagctggaatctacatttccttattcgcaccttggatctgtcatgcggtgaacagccgtctgcagttatttcaattttgtgtgttctctccctgactaggatatagaaggtaggatatagactaggaggtagagaagctgtgatgagacgtcaggctggaggcagagcctcagagtgcagactcggggaggccatgcaaactgcggctgcgagctcaggggctcactcatgtgtccccagtcactgtcatgcggactgtcatcgtatttgccaaaaacgcttcacaaggggagctataaacagcagtgtccacccaatagggcccacgccttgaccttggagttgaatcgtcagcaccacttgaccgcttctctctgtgtccttcacccttgacctctttgacagtgtggtgccgggtgtgtgcagcct

SEQ ID NO: 49628 - DNA, 920 bp, Homo sapiens
aaaaagtgacatgcctaatagtggcacgtgcctgtagtcctagatactcaggaggctgaggtggaaggatcgcttgagcccacgaagttgaagctacagtgagccctgatagcaccactgcactccagcctgggtgacagagtgagaccctggatcaaaaaaagaaaaacaaacaaacaaaaaagaaggttgtttaaagactatgggattcataagtcccccccagccatgtcggcaaaagccaaacatagagaaaaggttatcttgaaaggatttgtgcacaagcctcttatctaatggaatgaatccccatgacattcacaggaaacccactaggctcttgagaattttattccagcagaaatactgccagcttggactgaaagggagagagagaggatgaaatgtaagaaggctgtggatccccaaaattctactggcaagaaacaggctggtaaaactattcagctgcaaacaccagccatgtttcatgaaaaaggaatgatgactcagagggcgaaggtttgagcccagagggtggggtggagccttgaaccacagaggatcattaccaggtctggaaaactaatgtttgcccagatagattttttttttttttttttgagacagtctcactctgtcacccaggctggaatgcaatggtgtgatctcggttcactgcaacctccacttcccaggctcaagggatcctcccacctcagcctcttgaatagctgggactgcaggcacacaccaccatgcccagctaattttttttttttgtatttttggtagagacggggtttcaccatgttgcccgggctggccttgaactcctgacctaagtgatctgcccaccttggcctcccaaagtgctggaattacaggtgtgaacaccactactcctggcctgcctggat

SEQ ID NO: 49629 - DNA, 3923 bp, Homo sapiens
ctttcagatctagcttattgtctgggtttgggcaagtaacccctatatgtccttgtttcttcatctgtaaaatgggataatattagtaactacccaggccgggcacagttgcacacctgtaatccctgcactttaggaggctaaggtagaacggcttgagcccaggagttggagaccagcctgggcaacaggcatctgcctgtggtcccagctactcaggaggctgagatgggaggattgcttgagcccaggatgagactgcagtgagctgtgtttgcgccactgtattccagtctgggagatacagtgagaccctgtctcaaaagttaaaaaaaaggtagtacctaccttgtgggctctacttgataattaaatgagaaagaagataatgtgcataaaggcttccactagggcctgacgcatcgtgagcgctcaataaacgtggggagtactgggtgtgatgacaaagggtctaatgcacccaatcttgggagatgaaaaaatgctgcctggaggcgatggtattaatgttgggatctgaaagaatggtaagaattattcaggtgaggattcaagtaagtgcatagatggtgtagagagaaatgaagttatgggcaaagggaacagcccttgcaacagttgtgaggtggcacaatttccaggcttaaatgacctgagagcttcccagttttgagtgtagcctgagaaatatctgtggcagatgaggtcagagatggcaacagggatgagatcaccaatggccctgtagccacctcaaagaattttagactttatcctacgtgttaatcagatctttttaagagtcttaaacagggaaaaaacatgattttctttcttgaaagaccattcaagctgtagtggatttggagagggcaatttcggtggcagggagaccaagaggagtctaccgcagtgtctctaggagagatgacagtagcctgaaccagagtaagaactgacagggaacaacagttttaaaaatctaattggggctgggtgcagtggctcacggctgtaatcccagcactttgggaggttaaggcaggcagatcacttgagcctaggagttcgagaccagcccgggccaacaagatgaaacctcatctctactaaaaatacaaaaattagccgggcgtggtggtggggacctgtagtcccagctactggggaggctgaggtgggaggatccttgagcccagagaggtcgaggctgcagtgaacaatgattgcaccactgccctccagcctaggtaatagagtgagaatctgtctcacaaacaaacacatctaatttaacatggggactccagagacagaggaaagagtaatggatcatttccaggtttctggcttgagcacttgggtggctagtgttggcactctcctagaaaacactggagaaaaagacattcaatttttggatatgttgaattttgaggttaatagaatcttgaaaattaaagcttcctgattttgttaatccgttttctgacaccctttagcaattcttcaatgcaatgcttttcacattattatatgcataagaatcaccaggggtgtggagatggggatgtgaaaatgcaggttcctaggcaaacaagccaagattctggataccaactgggtcccaggactcaaaacaatcagcctgagtaattctgatggagggagtctcctgacgacactaaaaaaacaacaaaaacgacccctctgccgggcatggtgtcctgtaataccagcactttgggaggctgagtcgggaggatcgcttgggcccaggagttcgagaccagcctaggcaacatagggtgaccacccacccccgtttctaaaagtaaaaaaagacccctcgtgtgtctccaccgttaggttgttttcccactgtccacccctccctacttctcaggcacctgcttgggggcccctattgcttcgaataagctccgtgggagccaggactttgtcttgctaacaggtgcatcttcagcgcactcagaacaatatctggcacagcacgagacacctagaaatgttcgccgaacgatcgaatggctgaatacattcatatgttgctttgtacaaaaacttgctttcaaatatctgggaagagttagagataggaaagcagaggtcatttcaaagagagagagtgaggataccaccgggaaggcagcgccgaaaaaaccagaggggaaccacttgccgatcccccaggcacagtctggaggtcccaattcccgcggtaggggggcgagagatgccactcgtctgatcagcaaccattttgggcccgcttgcgccgcttctccggggcgtccgcgttgtgctcatccagttgcttttgaggttccggccccctccaaacctctgaagcgctccgtgcacgcgacgcggcggcggggtaagctggagccctcgccgcgagccctctccgctgcctgcccgcagcacagccgcgccgacctcctcatcatggcggcggccgggcggggaagccgggccgtgcgtcgcgtgcgtgccctctccctcccctccccctcctcggcggcggcggcggcggcagaagcggcagcgctcgccattgccgctggtggcaggaggctgcgaggagccggcgcggtcgcagtctccacggcgcaggcccacggtagcgcagccgctctgaggtgagtgccctaccgcgcaatctccagctatttcagccccggcgcagccgcaacacgccgcccgcccgccggccggccggcccgccccgcagccggcaccctgccgcccccggctctgggcctgggcccccgccggattcggcccgcctcgggcggggggccccggcccggcccagccaaaccgccaccccgaggatgcgcaggccgcactaggccccaggcgtcctggcgggctcgggagggaggcgctgccctcccgagagccccagggttccggcctcctccgccgcctggggctctcggggccgcggccttctccccgccgtggaacccggggcccggccttcccgcagctcgggagcgggaggcgcgggagagtgcgccgggcccgggagcgggaggtgggcgggctgcgcgggaccggagccgcggctctcggctcgccccctcggcccttcccggctctcgtacgcgggcgggcgggcgggcggcgcggtggggccgggctggggcgcgggagccgctgtctcctgcgggagaggaggctggctctttgggcgacctccgaagcttccctcctgccggggtggcgtgggcttgttacccaggtagactgggggacgctggaatatggcgcgttgcccaccttcttgcaagttaggaggtggccggggcggcagttcgaggaggagggcgcaaagtccttttgtacgcagaaataaggagcgacattgtgttttcttccccagctgagatgtgcccgcggaggggccgcggttcttcctgtgcctggggtggtggtcccctgggtgagggagagggggagtggcacgcccctccgaaggaacagaaccttttgccactggaaagacaggggctctgagatggccgtgtgcatggtattttcccatatccccagaccttttcgggtttgtcattgaatgttgtgcactccatcgtgcaatgatgtctgctgcctctctcacctgttgtgtcgtggctgctggtcccaaagtttctgcagtgtatttggctgtgcccaccagaacttgaagttgtttaaaaatcttaatacttggggggcttccagtgatatctgctccaaccagttggaggagctgttgcctgctctccattcttcttaagcattagattagaatatattaattgcttattttagagctggtgtcaatcgtgctgatttctttatgtggtcagagcaaaattcacattttt

SEQ ID NO: 49630 - DNA, 913 bp, Homo sapiens
tccgcccggcccgcccccccgctcccggccccagacactcacctgcgccggctccaggctgggcgcacagccgcctctcagctccgcgcggagtccacaccagagaagccaggcaaaaacggccccggtttggaaagagccgcatggacggagcttgaagcgcgcccggcccgggcccaaacctccgctgccccgcgagagggggcggcgccggagcgccgagcccagcgggggaacaaaggggagccgggacccggccgcgcgcttcctgggtgtcgggtgacaggtctgccggggaaggccccggcccggccacctgaagaggagccgcctccgcgctgcaggcgggggaggtccagaggggtacctgggcccgaggaccggaagaacagggggcgcgggctgcccggaccgcgcggctggacggaggccctgcggctccggcacggctgcgcgggggctcgacggagtgcacagagaatgactccaggagggttttaccgccccccgccccgggccccgcccgcccctcgcgcagcgccattggctcaggtgccgcgaggcggggaggggcagggggcgggccggggatgattcaccttgaatgtggctccggttggtgcgcggcgcagggcacgcccgtccgggactgcggagacgccgggagccccgcctgcttgcccaacccggccgggtctggccccaaggggtcccgtcgcccgccttctatccccgcctcctgccctcgggctagggtgccgctagccgaggtgcgcccggacgccctgccaccccagcgccctctgagcccggagctagccgaggtgtgtgtggcgtggcgtgcttggaaatccgaccctgggaggggggaggggaagtgcgttgggagctggggcgcaccgtagggccactg

SEQ ID NO: 49631 - DNA, 2035 bp, Homo sapiens
tccaagggtcaggagcccgggaagctgctctcaggctgctgcggctcaggatcgctgatgaggcctgccgcagccattctcagctgcaccgggtccgggcatccacagccggctcacgcgctggtggtcgccaagcctcagctcttgctggctgttggttcagggcttcggttcccagccaggtggggctctccaaaggagagggcagctcaaaacaacccgctggcttcccccagagcaagtgataggagacaggaagagggagctagagagagccctgaaggtggacgtcgcagtcttcactcaatcaatctccgcagggaacgccctgcaggcccaggtatccttccggtcccttcctcctgcccctgtgctccagatcccccaggctccagccctgcagcccgagccccacccactatcctcgcctcccgccctgccgctcggccctcccgcttcaggtctctgtctctccctttctcccttcccctctctctgtatcctttactttgtgcctctgatgcctgacctggccccaagccagcaccccaccatcccaccctcttcccaccctgccccccggccacgtgcccccgggccagccagaacgctgacccctccccctgagtccactccccgctccccgctccccgcacagcccgggccacgccctacccgggtgccctccctttacccagctccttcccatccagccgggtcctgatccagccccctgctccaggatgccccctcctagcggtgtgtgaggctttcatgacccttcttcctcctttcccgacagatcagcgggggaggtgggctgagccgcccctctcgtcgtcacccctgccttggccgcccagccgtgctgggagagtttggtggccgtggctggcactgcggcagtgcccatgtcagctctggcgcctctaccgaactccctgttttgggggctctttccctaccagggtcacgtcgatgaggaatctacgtccctcccagcccggttcccacctctcaggtggggcagatgccagaggcctcccgggtccacgcccgcgggccacttggaccgccctgccccggccaaccccgccccacccagactcccgcccgcgagcgggtgccgaagcacgaagcacgtacgccccctggtggccgtggcggggactgccgcgcggactccgcagccccgccccaccccgcccgcccagcccaatcccacccgctccgccctgctcgcccctgcctgctcacctactgggctgcgctgtccacgcctggagcccgggcagcttcagttccgcggaggacaggtgtaacccacagagtgattcctttaccggggcctgctaggctccggcccacgaggcaggactggcggcgttctcacgtcctggaagtcaaggccccaaggggaccgaggcgctgcccaggctcccctgactgccagctccggcctggccacccagtccgcccccagggaccggactgggtgcgccgtccacccttccagtacctggaacattctccgcggattgggaggttctgggttctgccctagattcccaagcaaagttgctcctttgctcttgtcacttgccagcttcgtggtttttgttttttgtttttgagacggagtctcgctttgtcgcccagcctggagtgctgtggcgcaatctcggctcactgcaacctctacctccccaggttcaggcgattctcctgactcagcctagctgggattacagatgtgtgcaaccatgcccgcataatttttgtatttttagtagagacgaggtttcaccatgttggccaggctggtctcgaactcctgacctcaagtgatccacctgtctcggcctcccgaagtgctgggattataggcgtgagccaccgcgccaggcctgcttctctaaagatccctgcagcacggagaggctgctagggcccgtgcttctgaataggtagccagctgtggctattgattatcacatttttcgtggtatataattttaattaatttttaatttta

SEQ ID NO: 49632 - DNA, 3291 bp, Homo sapiens
ttctcctgggaggggtttaaaagcagctgccttattgagatcaatggaatgactgctcacgtgacccatgtacctcttaagtccccttcaggctggaaagtgctctacacccccaatgctctgagtctaaaaactctaaacctgtgttgaaacgctggtgtttcgtggttaatatacagcatcctctctcagttactctatcctatgacggggcactgtttcgcagcctgggtggagttgagtcacaaggtggcagagtcagaacctactagtctagggatgtcagtttacagctcagtacccaaggtccatgaaagcccagtgaggagcctgaagttgcacagctaaaggaagggctgggactcgaactcatggctctgtggttcagtcctttggctaaagggtccatgaacgccacccacaaagaatgtattgaatgttttgcttctgggctctggaggcatccagggtagctggggggttccctgccagtgaggagggagcaggcactggcacaccattcctcagtagcccgacctcattcaatctggcaggtaggtatgaagccgggtcaaccggcgcgaatgcatcagcatgtagggaaggagaaaaaggagtttaggggaataaggagaaaacagtggaaaagagctggaatgagaacacgcgaacaaagcaacactatttcctttgtcttaaggtcctgctaacaaaaccgtctccattagactgagcggcatcgccatctggtggtaactaaaggcaaacgctttagaaaggaatcgaaacggtctaatccagcgattagcattttaccatgcaaaacccaccgttcctcatctcccaggaggcttagcacttggcagaggaccacctgtttaggcagatcagtcccagcaggaagctgcactgtccttgaactccaggccacggagtatcctcactcagcgtgagttgacagggcttagaaggtttaggcatgggggtagatagggaccttcgggctttccacggctctagtggaggagcctcacagccccgttcatagccagcagttgtgcatctgagttccaggttcaaggacaggcctctgggcagagcctcttggttattactgcctaagggtgccactcccttcccaaactaatttagtcatctgcattctaagagctgctcagccaaaagaagccagcgtctgctgctcaaaggagccagaacagagagggtattttagaaaaccagctgagagtaatcatgagggctattatcttattgatcaaggtccagccatttgccaaggtatatacacgtttatttaaaaaagtttacagttttcattatacacaactattaagaggttatagtcagaggaggcatgtgtcctgttgacagacgtgcctactagatcatcacaatgcaaggagaaaggtggaagggaggagacagggcgaggaaaaataagcgataaaaagcttcagatttcagttaggggctggcagtcccttttatcttttcaagtatcacacaatatgtaccaaatacaatctgtaaataatggccatttcttcccaagcccacagccaagatgagtgttaggctaaattcagagccctggctcttcctcagatgagtggaaaacctgcgcatgacagggccggctcccccttctcaaagggcttcctcccactcatcccatccctaacagaatcgccgaggtgttcacgggccagagaaagcacaaacatggattcagaagtccaaagaaatgcagttcgttgcgcccaatcagagatagatgatttcattcaacaaggctggaagcccagttgggaagtcgataaaaaatcttgctaacttttttaaatggcttttacttttctaagtcactgaaacaaggaagggccacatgccatttaaaatcaaacactagttcccagagacttggtgtccagaaacttgacccacagaggctagcggaggatctgtctttcatgattctcagccatcccaacgggaggcctaacataaagcatgtgccaggccaatgccaactaggacttcagggggcctttggagggaaaaattcctttgagaggagacattcctcaggagcttagatcagccagctggcagtcagaacagcttttgaagtggatgagaaatgttaggtactggagagatgatatggcaactcctgataatgacctcactaggataaaatgctggttgaaactgcacagtaacctcaaggagggtgatgaaattgacgacaaagccaaatgtcagtgtctaagatggctaccactgaccctgtgcccaaaagccccccggtgctggggcttccagagggagcccaagggtggtggattcaatgttgccaggttgcaaccatcttgcttgttggtgtttggcaagagcttgagctcagttatgtgaacaggggcaaagaatggcttgtgctggtaaaactcaagggaggatccaaaaactatgggcactaaaaaggggagggaaaccgccagaagtggctctgacctgctgccgctgccaccacctctaaagccaagaatgtagagcctctgcccagggatctggatgctctcctgagtgttggaagggcagcctggaaaggcatttggtggtgaaacaccgctgctccagacttacgctaccatctattgttgggggcccagagtccttggattcactgccaggccttcttccagatctttctgtacctgtgtgtttgggctcctactcccacctctcccaggcgcagggagaggacaaaaagcataagggactctgttcaacccagcaaaagtcagtttcccagtggagaggcaaagccccacccagaacataaacatgcatgggaccaaggttagtgcccagacaggacagacttgcacagaacaagagggcacagtgggatccatgcggcaattacaggagcttccagcactaacagaggagccttatcccaccttcatcacacacacttagatggacacacacacactctcgctcacactctcacacatgtgcacacatacacacactctctctctctgcagccacactcaaatctgctaaactcctacaacctcccccagcaggtcatttgacaattctgcatcttccgctctctggtgctggggctctggtcagaggcgagccaatgtcttatcattagagagatgtgggattaggtaaggggcagagtcatggcactgctcacacaccttcccgaaactggggtctattcagttttttgacaagatcaaaagc

SEQ ID NO: 49633 - DNA, 3704 bp, Homo sapiens
taccttaagagcttgtaagctaaaacatggtaataggatttgttattaaccttccagaaatgagggcagttaatgtgtaattagctagctggatagtcttgctgtcatactaaaactcgctattcaagcttgtaattactagacaataatttagttgttaatatcagaaaagaataacaagaggtaacttcctgcaattacaagccaagtgtccatacgctgggaagactttataactcagtaatcgtaagtgaatgaagataaaacaaatcaaggttacatttacatataatcaagaatgaaacaagccctaaaatcagagcccctacgaaagtagagcatagctgtggctgtctttcagagccataccctggctggctcatgtcccacgatccaaaaagcctggaccaccccatggttttaaagctgaccaccagtgagtgtggtatttttaatgaatgtccactaagttgttcaaagccagcaagactccatttttatgtatataactagttagactcctgagccacatacacctcatctgaagatttccaagcagacagataaagaaggttggttacggagctagctaagcactgttgaagcgcaaatccacaactgagcacatttctttattatgtacaacaggtgacattatcccaatagtactggacagaattgctctacttggcctctatctacaaataatgacatccagctgttccaaaggcaggatgacgtttgtgattcaacatggacagatcaatactgaagttctcaagctgttcaaatagtagttggccaattaatcatccatgaagacacatacatgtatttcttatctgtgtagttacactaaaatgtttaggaaacagcatgcactaatccagcataaagcattattttaagatataccttctgccaaaatctgaattatttgggaagattcacagactatctaactgaaaaggggatgggataagtgttaaatttgtattttaaatttctaaatgcctggtaaaataaattttaggtgcctgtagtcccagctactcgggaggctgaggcaggagaatggcgtgaacccgggaggcggagctcgcagtgaactgagatcgtgccactgcactccagcctgggcgacagagcgagactccgtctcaaaaaaaaaaaaaaatttgtatctcttgcctaatctcaaagtccttgaagtattccttctgttgtagtcaattttatttgcctgttactaactccccagataactctaggggaagacttttcccaaatgttgatttttctctccagcaaaataagagtagaagtatctagtccactggctagcaaccctaagagtgaaaatgtaaactgcccaatttcataagaaaattgtcttccacctcacttctccacaacttttttttttgtttgtttttttgagatggagttttgctcttattgcccaggctggagtgcaatggtgcaatctgggctcactgcaacctccgcctcccgggttcaagcaattctcctgcctcagctgtccgagtagctggaattacaggtatgcgccaccacgcctggctaattttgtatttttaataaagatggggtttctccatgttggttatggctggtctcgaactcccgacctaaggtgatccgcctgccttgtcctcccaaagtgctgggattacaggcatgagccaccgtgcccagcctacaacttaatccatcatataaataatttacgaaggcagtcaaagaatgagtaaaatgaaagctggagagagaaacacatttgcagggatcaagcatgcctggtccagaagggtgggatgagagagagattaaagctgtatcgcagtgaaggcacctgggcccccaggagtgcagggtgataagccaactacagataaaatatattttggagaaaaaaaggaaaactggaaaatagaagagtgcttaaaaagctacctgtggcttaatgaactctcctatcagtccttaaaattaatttgttttgaaatggaaatccagatccccttggctacattttatgtttctcagagcttctgtcactgctgtctggaagagcaggaagggatgcaaaaaaaaagatgctatcatgcaggaagccaaaatcactttggtcatctgctactttctgtttaatgtcataacaataacaatagataacttcatacttgataacttcatactgatggcaagcatcttacaaaattaatccgattcctcactataattagctctcttgtaaggttaaataatacaaaattaaaaattactgggtgagtaaaccacaattataccaattttgaactctgaataaacaaattgcacatacacttggcaaagagaaaacaggataagaacagaagcaatgagtcaactggcttaccagaaatcaatggcggggaagggtgtgaggggacagaggactaaatttactgctaacatgaatgttgtttaatatcaggctatgattaacatacatctgaaatttcaactgtgaattgttgttacgctacaaatatgtatacccacagaacagtacatgtcctggggcaaggtaaatggcaggaaatttcacaatccactccctgctccctcatcgaatctacagcagaggaaagtgttgaaacaagttttaggtgccaggcttagccttttgcttttcagttgaatatttatgttgacacgccaactttctcctattagttatttagtgttagttttttttttttttttttttttggcggggcaggggttggcgggggcagtcctttgaactaagattctctcaggaaccactgcaggaaatgaagtgattcagaactcaccaattatgaactaaccttcaatgccagaggctttaacagtttctaataaaaattcagttcagatctcaagttcagataagtctgaaaaaacacttcaaggtcatctgaacgaacatattctaccagtactttatataattgtatttacctgttcctaaaactttccgtgaaagaaatgttgaattttcttcagaaatagttttgagcaaaatgtcaaaacaattctcccatgctcagtgtacttttgactatactctgaaaatatttcttcttgttttcctgcacttacctgttagtgtgctcacactcctgtattatggaacatgttcagtaactcatacacatgtaacacagaagtctgctttcagttcacttggaccaacgtggtttaactcttgctgcttattaaatgctttgcaagctaatgtaagtacactaacattttataaatgtgatgaaaacttactcatgttggccactttacaaagtagtctatcagtcctcaaatagttaaacatattatccagcaatttcactcctaggtatatacccaagagaaatgcaaacatgtctacacaaatacttgtgcacaaatatttataacactcataatagccaaaagacagcaataacccaaatgtctattatctgacaaataatgtggtttatctacacaatgaaatattattcagccataagaacttccgatacatgcaacacggatcaaccttgaaaacattatgcaaagtgaaaaaaaaaacagtcacaaaagaccacatattatataattacgtttctaagaagtgtccagaaaagacaaatccacagaaacaaaaagca

SEQ ID NO: 49634 - DNA, 1721 bp, Homo sapiens
aaaactatatttggagagtgtcccaaagataagcatatcacattatattgaatatatatatttaaatattcagagagaaatgtcttaaagagcatattccagaatgtaaataatgacaccctttaagggataagattatgagacattttgatttttctttactttggcttacagattttcttacattgctctaatggatatgggtcatttatacaattaaaatacacatccatacacaaacacacaaaatagaacaaagtacatagacactgcaaaattccaagagccaagcattaaagatgtttgatctaaatttgcacagctgattgtttaaaagctcaaaatttggctcaggaagaacactacacctacccagatacaacaggggcaagatttaaaaagaatgttgagattgggttgatcttacctcctcgcccttctgtataattttacaactatctacacaactcaaaaaggaatccttgccttttctaagtgagccacaacctttctgaatgcttaaagcacatctcaacagtaattacactgttgatgacctgaaaatgggtcaccccgcacaactgattgaaactctcttatgcaaccttcctctagaggaaacaagaacagcttgtacaaatatttcagctaaatctactttccaaacagaagatgatacacatttgtaggcattatcaagtcctgaaagcacacagaaaggcaaaagaaacaattatgaagaagttaaattagcttagtcatttgtcccaaccaaatttcatattgcatcattaatttaagaaagcgtggaggctttttgtgtcattagttaataaacaagcaatgcctaaagtttagacattattacctagaaagttatgatgagataatcatattatctagaaaaaatacattaaggtctgagaaataacatttctacaggatatgaaattgcatttctataagttcactcttagtttcaacaagctctattgtttcctttctgactaggaatgtggggttaacaaaactagacttagcatgccagtttttagcctttaggtaaacaggtatttatgaaatgtatctgaatgaacttgcatggacttctataaaggctttaaagtcctatcactaaccaacataagagttttaaatggctgagtagacagaaacaccctaaagttagaagatgaataaactggggacagggaaccacaacacaacagaaaagccctctcaaaaggagaaggtgtacaggcgtatacgtttctacacctatacaggtgctaagtcagatgtgctcgggggctgtctcaaaggctcaacacctcacagctccactcccactttaccattcacaacgctgaaacttagaggcccctatagcaagaaagaaatttctgattcaactggttaggagtgggggtgtagtggggagtggtctagactccaggatatcgggcattacttcttaagacagcccacagcagccaggcgcaatggctcacgcctgtaattccagcactttgggaggccgaggctggcggatcacgaggtcaggagatcaagaccatcctggctaacacagtggaaccccgtctctactaaaaatacaaaaaattagccgggtgtggtggcaggcacctgtagtgccagctactcgggaggctgaggcagaagaatggcgtgaacccaggaggcggaccttgcagtgagtc

SEQ ID NO: 49635 - DNA, 859 bp, Homo sapiens
tcttttttgatcttattcacaaatactgctttatacccacttagcatttcactattaaggggtatcaccattttgtgtagaataatgattaacattcccaagaacccaagtccatttcactttttaaagtgccagccacctaccacattattttcctggaatgccattatgattacacaatctaatatttaaaggcaaatgccaaactgtcaagagataaatgacattcttggcaaaatgtgtctgtcagagttttacaagtgatttttatacagttctgaaattttccagaaaggaagccaaaggcaatgtctgggccttaaggactgacaataacaggtcaaggaccaaggattcagggaccactgagtcctaaatttactgataacaagttcataaaataaaagagtgccctccctgagctgtgtggaagggaatgaggtcctggcataaagaacgcgcttctgtgcagagggcagaagcaagtcgtgtggatttctgtgttcagacccacctgcttcctactctcctggagatgagtcacactaggaaagctgaagaaacttggcaattttcactacctggttttttgttttttggtaaaaaaaaaaaaaaaaaaaaaaaaaagatatgtctgttaatccattaatatgtaagtatcacaaaaatagtgctttgggggggatatgtttacaaggaatccttctcttttagagacataaatggaaatatttactaataaaaatgtttctaggatttgctagtaaataacccagtgtgggtagaagaggtgtagaagaaacagtagagggccagcaacgttaatgattgaatcctatgttaatgatcgagtcccagc

SEQ ID NO: 49636 - DNA, 1639 bp, Homo sapiens
ttgctctgttgcccaggctggagtgcagtggcgccaccttggctcactgcaacctccacctcccggttcaagcgattcttgtgcctcagcctcctgagtagctgggattacaggtgtgtgccaccacatgcggctaatttttgtatttttagtagaggcagggtttcaccatgttggccaggctggtctcgaactcctggcctcatgtgatccacccacatcagcctcccaaagtgctgggattacagttgtgagtcacgcgcccagccctgagtaaagccagtatttaagagaagaggaacctacaaggtatcctgagaaacagataggcatctagaattaagttaagtatttgttaggttatcatttaatgtctgctttcaacaagtatgcaatgtcttacagagaaaattcaagttttaaaaagaaaaaaaaatttgcttatagtaaagttactgaaaaagaaaaagttctttcagaataccgtaacatggcttcctgggacaggaaggaaaccaatgagatacaccctcctgacctcttaccagtacttcaaaaagtgcaataaagctggttgagagaaacaaagaagtttctttggagacctactttaaacgcttaatccgtgccaaaagtccaaagtccatgaagctaactacctttggatgaattttcaaggcagagataaaatctccaatgtgcactttaatgactaatactagttttgagagacattactacacatctatgctctgggacagaccaaaccttcagtctctacgtcaatggtacaacagagtactattctccccagtagtgttactgaatttgcgactcactgagttggaagagctgcttaaaggtttatcatcatcaaaagccatttattagggggtgttcttgtttttttttgagcaaagtgctaaaaactccgttgtacgtttcctaccccatcatagtttacaactttgttgggtaagatcaaatgactccaaaaaacacctctggaatttcaatacaagttgcgatagttaagtgccaaaacaagcggtatgacagctgtcgggatgcagaagtaatcagtaaagcctggatcgtgtaagaaaatggggcttgagccagactttaaggaaaggccaagcagtcaagaaggaatatgatgtccaaggaatatcataggcagggtacagctgacagcaaaggcacagatgcagcaactgtgcctagaaccagttgatcagttttattgcaataagaggttcatgtagccgggttgtggtagataaaagcagataagtagacaaaaagcaagacggtagagagccagaccacagcattttgtactttatcctatgaacagtacatagccagtgaaggttttatgccgaggtagatgacggatgcaaagcacaattttaggaaaattaatctggcaactgtgtatagaaaggttaatggaatatcatcattgtgacgaggtatacatgtgtcaaaactcatcaaatgtatacacttaaaattgctgaattttactgcatataaattatacctcaggaagaccaattttttcaaaacaaaggacaaagataaagacaagaataagcagattattaaaatacaggctggaaaaaaagtcagg

SEQ ID NO: 49637 - DNA, 4871 bp, Homo sapiens
tcattgaaaactcttggtattgtaagttacaaaattgtacatatggtgtatgccggtccccattattatccgatctacttttctgatttaaccttaatttttctaaacatttcttgtactctaacaggtcaggttttcctcttctctttttacccctcgaaaacacacttgttcctgtaacaccactcagagggcctccccagcccccacctcttttgtatataaacacactctcttgtcacatactccatcagctgtttggtagctcctcccctcctccttttccgggtagtaacagggcggccaatgagcgctgaggagcggtgcctgcggccttttgcctgcatacgcttttccaaaacaagcagctctagccttcagcaggggccactggttcacagatgaaaggatcaccagggctgtgcaacagggtgagacgagtaacccccaccaacaaggaaacccgtgtaatctgagctgtttgttcctccaccagggagaacttaaaccgatattcctttagggcaaatcacgctttaaggtcaccagagccccagctctcagacaatctaaataatcagctggttggaggtggaaacctcaaaggttgccaggctctgggcagcacagatcaccaatctacctgactttgcaaacaaatggccgcactattcgagactattccataggatctgggctaactgcaaggtttttttactgggacacattcctaaaggatccaaaagtcatgtaaatcagtttctaggctcctggggaggtttgcacaacccttagcaaaggatcagaagagaaacaatgaatgagtcagagtttcagaacataatcacccagcagattattaagtgcattggtgcaaaacactcactccctgcataacttgggagtcagctctcctaccaacccgtcacaaaagaaatatcactgactccaaacaacaaccagagacggtgtctccaaaagaaccgagcgaggtggtggaaggcagcggccaattagttacacatcctcttctctccctacccccacactgctactttcctactatataggttccctgccaggctgtaaatcgtggtggtataattacgctcaggagacatccaaaaatgggctgaaacaggagactgcaaggaaaccagctatcgccccccacaccaaagaaatcatcaaggggcatggggggcaagaagtgcattccttcagaccttttcttcctacttcctctccaccatctttctcaacccccagccttttcacacaattgtactcattttagtagagggctggggaatttttccttaaattttctgctaaatataccttactcaaaaattgttggctccatttgggcctactgatctgtgaattcaacagagaaaggaggacacaaaatctctcacctacacaacacacacaaaaggaaatccgaaacattttaacttccaaactccattataccagaaaataaacacgaaacaaagataacctctggcttttaaatctcgaaactgttatcctcctatctcagatctacaattttaaagcgcctctgctttcttttgtcagaaaggaaggaaggtggggaaagaacagaaggccaatgcatctttgcctttcttcatcttctactaaaaataagctatgaaataagccacttagggggagaaaaaaaagacaccctgctgttctttgtctgttttcctctccctctccaccccccacaccccgactcctaaatgcggtaatcattctagatgccacaactactaaatgaacaaaaggcactgtatggaaaaggcatcaggtcaagttaggcccccctctttatcctcaatcttttaaaaatatgtctatgtacataatttgagactctgacaacgatcacaaacagctggaattgtctccccactccatcccaattaaacattaggtagaaattcgcattaggtgtgacagtaactctcaattcaagataaaaataactcagatgctgccactatgtcatttcctagtttctaaacaaaaataaaacccgaaactgctttgtgtaaaatgtacacacagtcatagttacaagttttcctgcagccttatgaaaagccaacattactggtatcattcacacatttacaaaacaatcacagccacaaacagctcataaagagttgatttcacttgcgcctgaacatatattgggtacactatactttattagttgctccgctctaatctcccactcccccaaaaattctaaactccaaaccacaaacttagaagtctatctactgctcctaatttctaaccaagttttccctgagcaaggagaaaaacaccttatttctgaaaagattattttttaaaaatctcttgcccagacaacttccctcccatcccccactgccaaaccatatgcaaaaactacttttttaaaacttcagcaaattccctaactgaattttttgacaataaccactgatctctacaaagaggtaaaacactcaatcaaaaacagcaacaaataaaaggaagaaaaaaggtattcacctgaagaatttagccaaacaacttgagttatataaacaaaaccctgcaacagggggaaacggtggggggatggggaggagggagagaaacaggagacaggacttttaaactgtgttccacactaccaccctctaagcccccacttgcccccctccccaaggactagctgttcagaactctgggctccccctaccctctaaactacccttcaaaaaaaaaaaattctcgatttgtcacaggaaccttcgcgaatttctctagctggtcctgaaataatcagtctggactccaaccaaaaccactgcctgaagggctcttatcagttatagctttcccactgcaacctccagagtgcataaagttggggggagggggcagaaaataaagggtgtcacttggcgacatcagggcaagtattcccccaagaacctgaccctcacagaggaagttttgcccaagtggccagtccagggactatttattttgtccaggagctcctctttccccagctgtcatacccacaatatggagggtggcttgctggagggcccgggggtcttcatcacatacaactatgggtgggacaggctttgtcagtggaaaggaaaacagtagggttctcccggggaccagaaagcttaacaggagggactgactgaaaacacacagagctctttcttagaagagggggccctgagcaggagactctcttcctaatatagaaaggaattagggataaaagaggtcgcttgagtgaccccagttcaagcagcattgtggttggaggaaatgggggcatctcaagaaacggagaaaggcttccctctcgggaatttctgccttgattccctaaatccaaagcgagcaaacaggagagagaaaccctgaaaatgggctcggtggtagagagtgaggcgactggtcgtgcaaaaagaaaaaaggccgtctcgggagtccaaacgtcgcggaggaaagtcacaggctctggggatacaggaagagcgagcagcaacgcgtatttcggggtgctgcggagaaaaggcgagctgaaaaggctctcggcccctgggaggtgccaaggagccgccgtaggcactgggggaggaggggagtctcggacagtggcctggagtgccccagggcccttgcagtggttccgggggtgccctgggcatccccacaccgccccccacacacagcccgaattcccctccacgaaggatacagcttgaccacgtccgtgtccatccgcctcttgcccggactgggagatgacatggtgtcgccgccgcctctctcccttcctcggcccgtctgtcacgggcccggggccccggctctgaggagcccgcggccgcgccggctcctcggtggaggtggcaacacccccgcggtcccggcggtcccgtcagccgccgccgccgccccccgcacgggggaacaccgggcactgtccggccgggtgggggtggggaccctgcggcgcccggctcgggctgcccctctccggctgtggttccgccgcggccctgccccggcgctcctctgcgccgcgcgacgctccctcctgcctgctgtggctcgctcgcctgctccccactcaccctctgaccggctcctagcagcctccactataagcggacgactcctgctcagtcggcctccctaccccagcctcgctctgggcgccgtgacgtcacctctgtgacgtcatcggaggggcgggtctggtcgctgagaggggtggggcgccgccgcggcgtgggctttcccggggagttctgggagttgtagttcctctttctccggctgtctcacaccctctgtcccctcccccaacttccccacctacttcatccctcaactgccactgtcgttatcatcatcctaaacgataagagtaaataatggcaatattattacattcgtggatttaagggtaatgaacctcccttaacactctgtttaacaagctgttaatttctttgatttggaggaggccaaggtagcaattactcaggcaccaaaatctggaaatccccacaccagcaggttccttgcactccgcttcctcgttggctggagagaatttgtttccaaggattgtagaccacagcaaggcttcctcaggcttgcataccagggtatgcagtgtctacggccactatttcaaagattagagttgacgcagcaaggtggtaaggtcagaaataatttagtattaatatccttattctacagagcatgaggcaacttcgcaaagtgtgtgaacctcctacaccaaccttaaatacttcattcatcca

SEQ ID NO: 49638 - DNA, 1371 bp, Homo sapiens
tctctgggcattttgccatttgttccttcataaacccacctcccctcttctgacctcctcctcatccctccactttaatccttcctttttctttccagagctgagcccacccttgaccaggtaggttcaaaaagcagtcccaaagcacagccaaatgacagccctggttttacttattttggcttatgaaactggagccctccttgagcagaagtgagtttgctaagctcaccaatgtattctgccattcagaatgtctgtcatttcctctaagacaacactgaggctgggagtgtctgtttatatgtggtgcacacgcagccaccctgtgccctgtgctggaatgagtgacggtcttccttatcaggtatagccagggggtgcctgtgaggaacagctgtccgaccctgcctgactcaccagtgttgcaatctgggaaatgtattcagggcctgtttatctctgcccagggcagggccaagcttgacccacgaagcctccgatctcaggagcagcttctccagggcaagaaaacaagtttggagagaatctaatgctttcagcaagacactcagacggagtaagatgaaactggttatttggtggaatgagtagcagagcccaggccagaagctgctctgtctctgaagttacctgttaactccaacagctctggaaccaaagtgaattgatccgtgtccccaccaagtgtgaaaatccccccccagaaagccccccaattccatttcactgcttctcactgggaaagtggttcattttgagctggcattcttggcgtttgtgatcacaggtctaggcccttctagaaggtaatcgtgtcagtagtttctttgctgctgtggaaataaaagcttcaagttatctacatgtaactttgtaacagtttgtccccagagaagtagtcagatttcaggagcatgtggcatgattcagttagcccatgggacttagaggaagaagaccccttccagcctaggatttacctgttattgatataacttgggcaagtaactgaacctttatgcctcagtttcctcatctataaaacaggatgatagcacctgtacttcctttgcctaggtcaaataggatcaaataggagatgatgcaacctctgatgtgctagtcatctataaagtattatcctgtcccccgtacacacacacacacacacacacagacacacacacacacacacacatactccccaatgccgagcttcaaggaggaagtgaggctggaaattattcatgcctacattgaaagagctctcacttgggccacctcccctgttcggagcccgcatgttgtcagttgcagcctcctgccttgccttcgctgctttctcgt

SEQ ID NO: 49639 - DNA, 3058 bp, Homo sapiens
tgcagtggcacaatctcggctcactacaacctctgcctcccaggttcaagcgattcttctgcctcagcctcccaagtagctgggattacaggcacacgccaccatgcccagctaatttttgtatttttagtagaaacagggtttcactatgttggccaggctggtctcaaactcttgacctcatgtggcccacccaccctggcctcccagagtgctaggattacagacgtgagccactgctcccggcctgaaaaagtattttctaattttattagtattttaaaacttggtactgtgaaacatagcacctattttgttcctcatttcactttggaaaacccccaggttgagttagtgggagttgagcccagtcactgttgaccggctgcatgggcctgggcagtgctgagacttggcaagagagcccagggccccctgaggaccagtggggcacagagagtggctacgggtgtagcatgggatggaggagagggagaagctgctgcccggtccatctctgattcgtggagctgattttccaaacactctaaggcctcggttcacattctgtttcccacagaggaggctctgcgtctctgaactgttgtcaggccccaccaggctcttcactgtttggagccagatctacggagccaaactgccttgacctgctttctgaggaggggacaggcagcaagtgccggacctagccagattcagcccgcagaaggtgttccagactccaagcagcctgctggcctagctccaggcccaggtggctgcagactccacaatgggtgactcaggtaagctgtgctggacaaacaagccagtgttctcagcccagcagggtgatgcctgtcataagctttcctgtcgtcattgtaccgccatttcctgagggtggccttgccaggcccggagccagggtccatggagactggtaggaatgtggttatcttggtttatgtcttgttgccaaggtgcttcccaatgcttctaaagctgggcttggcgctgatccaccagcacctgtgctgtctgatggtggcatggaggccgctgggctgaaagaggcctactgagaccacagacagtctggtgaggagatactggtatgtgtctttctcatgatcctaacacctatagttttggtgctcccttccttcaggagtcccaaaagaccaggcaagctggagacacttggccagagaggcaactgggcttaaacagccagcttaaacaaacagctactatttcctgagcacttctcatgtgccaggcactgctctaagcacttcacatatgccaatgaattctcaaaacattcctgtgacacagctactagtattatccctaatttacagatgaggaagctgaggctgagtcataggttcagaaacacacagctggtgaccagtgaatccaggatctgtacccaggctatggaacctagagcctgctagatccacctgccaagctacctgacctagagctggtgtttttttttttgtccccctttatttttcttttttataaacaaggtgtcttgctctgccacccagactggagttcagtggtgcaattatagctcactgcagtctcgaactcctgggctcaagcgatcctcccacttcagcctccctagtataatgggactataggcacgtgccaccacttctggctagtgagctggtgctcctaactctcacagggtactgcctctcttctgctctgtcatgatgactgtagtgcaagaaggggactcagcaagaagcctcaggattctaggcgtggctcagccacaacctgctgtgtgatcttggccttcactccccactctggccttcagactcctcagggattagaccaagtagtctacaactctgcttccagttctgtggctctgactcacgtggaaacagcagtggggaaaggccctatcccttagccccaccggaagtgtctactgctgattaccaagaacagcctcacgggcttttgagaagggcagggaggatcaactcctgacctggtgacactgatggagcaaagctgcttccccactccacacctcagtttccccactccttccagtggagataatgacctctgtgtgctcagtgctactgtgagtcagggttaattagcattagtcatagacttgggaatcctcacaagaaaagggtcatctggtgggtctgggctgtgccctggctgtgatgagacaccactcatgcccctgtgagtgtgtcatcatgcttcattagtggcttgcctaactttgcaggtcggccctggggtggcccagccctgagtgcgggtgctgagatcagccaaaggatgacacctggggagggctgcatgtgtcccagggtggctgccaatggctcacagtcccctggatttccctttcggttgacttcccattcaatcgggttcttatcattgctactcgagccactattcctggatgcaaggccccaactctgaccttaaatttagaggtttttttttccttctctgtctcctcaataaatacccattctcatttctgtctctctgctgactgtttcaatgctttcagtttctttctgtttccatcaccgcacttggtagagcttaagtggggttaggggaaagaccctgtaacaaaataaggacaaagtaagaatgatgatgtcttgtgttggcaagtccagctaggtaagccagaagtggaacatgggggacatctagtggccgtagtgggtactgctagcattcttgcctggcaccgaggtcacattcttgaactttttttttttttttttttttttttttttctgagacagggtcttgcgctatctcccaggctggagggcagtggtgtgatcacagctcacggcagccttgacttcccaggcttaagggatcctcgcacctcagcctcctgaggagctgggactacaggtgcacgccaccacacctggcttttttttttttttttttttttggtagagacggggtttccctatgttgtctactctggtcttgaactcctgggctcaaacaatct

SEQ ID NO: 49640 - DNA, 1412 bp, Homo sapiens
tggttctaggccaaaaaaaattcacagcatccataaacttggatgggtaaaaatgacatttatttctctctaaatgacaagatttagcattttcttcaattatgaatgaaggtaaaaacaccatagtagtattagcagtacctgctaatttgtcaccaatggaaataatgttcccacattatggtggttgcatgtcttcaaatacctttgtgctcatcactacttcaaaattatggttgacaacacatactactagatattatggactctttaataaaaagcattgttactgcgtaactttttccttttaccatcttgataactacattccaatctaactggtttcctttataatcctatgtaatttactttaagcatttaaaaatattctgagagttaataagcttctccagagagccaaaggggtccacggcacaaaaaaaggttaagaatccccaattaagagaagtcaagtgaactcattcagttaacggtcctctttacttccaaaaataatgtccgatgacaaaatttcggctgcggttgggaatctggtacaccccgaggggaagatcaaagccgatcaaacatagtaaccagagtttctttcagattctaagaagccatccccactgcccgagtcgccgaccgaggggaacctcccccaacccgccaccccttccccaagccttcttcaatcttccaacgccggacccagggttaactcgtgaactcacgcgtccacgcctccctcttccggggcaatcccctcatctatcagctgccggattttctggggggtcccttctggggagcgaactactgcaccccaattcttttcaacccctacggcaaacgcttgtccctcacagggcgccgccatcttggtccgctgccgagttgcttccccgagagtttgaaggctccggaacttccgtcctgggaggttaatatccgcctcttgaggcagcctggctgggaaagtctaaccgcggggcccacgccttttctcatcattttagaaccttagagcgagcttaaggagggctgtactgtttaggacaatcttgattaatcgtttcctttatcaactagcatatttaggttgataagagatttttagaacgctgtcagtccaaattcagcagggatgaggggctcaacttaattttcaagtaatattaactaatacggccgggcgccgtggctcatgcctgtaatcccagcggtttgggaggccgaggtgggcggatcgcctgaggtcaggagttcgagaccagcctggccaacatggtgaaaccccatctctaccaaaaatacaaaaattagctggacttgctggcgggcgcctgtaatcccagctactagggaggctgaggtaggagaatcgcttgaacccgggaggcggaggt

SEQ ID NO: 49641 - DNA, 1448 bp, Homo sapiens
atttttagtagagacagggttttaccatgttggccaggctagtctcgaactcctgacttcaaatgatccacccgccttggcctcccaaagtgctgagattacaggtgtgagccaccatgcccggtcccttttcttcttcttcttcttcttcttttttttttttttttttgagacactgcactctgtcgccaagcctggagtgcagtggcatgaacacagctcactacagtctcaactgctccagcttaggtgacccttctatctcagcctccagagcagcgtctgggaccacaggcgggcaccaccatgcccagctaatttttgtatttttttttttgcagtgatagggtttcacctgttgtgtaggctggtctcaaactcctggcttcaaacaacacacccacttttgcctcctaaagtgctgggattgcaggcatgggctgccccaacctgtcaaactttctgaacctactgtacaagtatatcctcagattcactcagatcttgacgaattatctttcctgtttagagaaatcccaagcctacccttaattttttttgaaaggaaagatcgttcatatgctgaagacaacttcaactttgcttttatttatttggactctgaatgattttaacatcttttgtttgattttttctgttttttaaaaaactttattgatttttgagacaaggtcttgctctgtcacccaggctggagtgcagccatgagatcatagctcactgcagcctggagctcctgggctcagggatcctcctacctcctcctcccatgtagctgggactataggcatgggctaccatgcctggctaatttgcatttttttttgtagaaacgggggtctcacagctgggcacagtggctcatgcctgtaatcccagcactttgggaggccgaggcgggtggattgcgaggtcaggagttcaaaaccagcctggccaagatggtgaaaccccgtctctgagggcagaggttgcagtgagtgagattgcgccatgcactccagcctggacggagtgaaactccatctcagaaaaaaaaaaaaaaaaaagaaagaaacgggggtctcactatattgcccaggctggtcttgaactgggctcaagtgatcctcctacctcagcctcccaaaggactgggattatagacatgagccactgcacctggccttaaacttacattttaaacttccagtgtgctgatttggggcttagcagtctttttttttttttttttcttgagacggagtctcactgtgttgcccaggctggagtgcagtggcactatctcagctcgctgcaacctctgcccccccggttcaagtgattctcctgcctcagcctcccgagtagctagaattacaggtgtcagccactgcacctggctaatttttctatttttagtagagacggggtttcgccatcttggc

SEQ ID NO: 49642 - DNA, 588 bp, Homo sapiens
agcctggccaacatggtgaaaccttgtctctactaaaagtacaaaaaaggttagccaggtgtggtggtacacacctgtaatcccaggtacttgggaagctgaggcagaagaattacttaaacctgggaggtggaggttgcagtgagccaagatcgtgccactgcaccccagcctgggcaatgcagagagtcaaaaaaaaaaaaaagaaagaaagaaagaaaaaagaaacagtgaaacgccatctctgttaaaaataaacaaaattggccgggcatggtcatgcatgcctgtgaccagctacttgggaggttgaagtgagaggatggcttgagcccaggaggtcaaggctgcagtaagccaagattgcatcacgcactccagcctgggtgacagatgaaaccttgtctcaaaaaacaaataaaaaccaaaccaaaataaaacccacaaaaaataatgtatagagctctctaagacatattttataaaataacaaaaacctatctgcagaatacattctgtacaatccccaatcccatttatgtaataagcaaaaacagagtactgcataggtctacaaatgtgtatgtg

SEQ ID NO: 49643 - DNA, 2413 bp, Homo sapiens
acatatattaattttggtttttatattttagaaccataggcttttttttttttcaagtctcaaacattttcataagcagcgtgctatggtgctagtgactaaaacatttctgcctacagggactggaagtaggaaaacaaggaggcagtgccagtggcgaccagaaatttgcacaccaggtacaaagggtatttgtcctcagctccagcagagtttcttttttttctctgcaaccatgtaaggttcttctaatgcaaaagaaaaaaaaatctgtcacatctaaggaccttgaaaagttttgtttcccttgaggaatttgatatgctttttccttatcattcagaaacatcagtgtatagtatgttttcccagtctgcattgcgcccagtaagtttcaagccaaaatttctgtttaattttggaacaatagaaactcctgatcggcacattaaaaattttctttgatcttgatcttccatacccgttgctgccttttatttaattttacatttcctcttgattatatatcttccaagctgattaaaattttctactagccaaaaggagtttgagcgaacaaaaatatttacagagccatcagccatctatgagaatacctttttcttggcattccacacactgccaggtgttatttgaaaagtctttactgatgtaataaaccagaaatggtttctcattggggttttattttgtatttctaagattacaggtgagagtgaacattttcccatatttgttaaccaggtttaaaactgtttgattgggacgtggcttatacagggacaaatgcagctaagccgactgaaagacaaatgaaacccaggaatatctggttcttacattttagctttgactccgcccctgggtcccctcacctacccggaccccaagcaagccctttgtgtgtgtcaaccatcagtgaatgggatctcaatctgaaaagctggcagaataccgtcttgcccccaaatatgtgtattatgcgtatatccagtgtctgattgcaatgtttatgggaaaaagttcctgaatcctaaccaagactgaggcactggccgtccccgggagtctttccgcaggcgcggcctctgacactcggtcttcgattggcccgcctggccccgcaggagtcggggtgacgccggccagcccagagcggacgatgagagctaggagtggctgcttctgcctttctctccccctacttttttttttttagccatagctatggttaccacgtttctctccgcctcccgccacctaccaagaaaacgactgaccattggctgcctttcaccaaggcggtaagtcattggtctctggtgggaccgggcgctgcccccttcccctgtctcctgggtctctggaggagcccaggaaggaggctccgctggttccgctgggtcaggcgctgacgggaccgggctgcggcaatcgttagcgggtcatgtcggccgcccagggctgggacaggaaccgccggaggggaggaggcgccgccggcgctggtggcggaggtagcggggccggcgggggcagtgggggcagcgggggtcgggggactggccagctcaaccgcttcgtgcaactctccgggcggccgcacctgccaggtgagtcgtgggacagggtcctgaccgcttgcgggcgggaaggtgactgctaccttttctttttctccctggcttgcttttccttgggaggaggaaaggcaggccccacgcatagcagagggactggggatcagagaaaagggaaggtgtctttgaggtcagggagggaacaggagcacagcgaagaaaagtatctgtgctctgttgaaagctctgtgctgagagttgtgttttcttttcaaaggagaggccactgtctcattgacatttccaaatgtttcggttactcgattcccaatctcttccccttccgcagtttgatcttgtaaatgaaagacattggcgcctagctgtgggaaattatttcaaaaagggtgccaagttaaggagagaagaaggaaacgcattccaaggagtgattttgtaaaaactacacggggcgtgtgtgtaagaggcattctgaaacggaagaaaggggtgggggagtgttggctggggagtgtatgggaaagagaacctagaggattagggaaaactagttggattattaatattttggaatgttcagagacaggataatggtgtctaggttttaaggggagaaagtgaagatcaaaaatatacttagtgacacaattatgctgtgtttacaatataaaaacaactgagaattggaaaaatgtacccaatacaattatttgacattttggtctacagtgccctagccttgagttcagatgcttttgaaaacaaaataaaatcaagtggatatgtatgtg

SEQ ID NO: 49644 - DNA, 1535 bp, Homo sapiens
gacgggatttcaacattttggccaggctggtctcgaactcctgaccttgtgatccacccgcctcggcctcccaaagtgttgggattacaggcgtgagccaccgcgcccagccgtggctggttatttaagaacaatttaatacttccaatacataaaaatgtcttattttgtaatttaagggttatgtctagaaatactttgtattttgtctttggggtatgttacacggactaggcaaaaggctaacttcagaaactcaaaatgtcaagttttgggagactatattccatatctgctgtaagtcataaagactgttgtacatcctcatgcagacgccattactatctcaacaactctgcacttggacagctgtactccagggctctcccttttgtgtgtggataaaggacaaggatccaagttttagaagggcacgtacttatgatggggtggtgagcggagtaagagggagagaggggaaaacgtgcattgttttggtccacatttgggatttataattcctcctttcttcagctaggctcaactcttacagaccgtgcaaaacttgttccagcgacaagcagtcgtatcccacagaggacagagcaatagctttcgcgccactcagcccccgcgtcccaatttcccagtccagagcttccctccccggctcctgggcacgaacttcagcaaccctattgcttctttcttcccttcccctagagaggcggaacgcctagccacatcccccttggctgaacccaggacagatcagcaggcgcggaactcccacaacccgcgtagattccaagacaggaagcacaaacacgaccccgaaaacgcaccatgtcctctggccggaaaacgcaggctcgcgccactctctctgggcatgcgcaaagccaagctcaagcgggaggccaccggcaagcggctctaaagttaccggaagaactaggtagtctcttctcgcgagaaagggaggggtcgcaggcccaggcgctcggagcgttaccagggaaacaggtctcggttttgcggctcccactcagctgcgggagaaagctaagcagcaaaattcagaccaggctctgaacccgcagtaaaaagtaataattgtaacaagctgaattttgtatctattaatataattttagcttccctagggcatttatggactcacatgtgtaaactgattaagtagggcggctcaccgtaggatagagtggcgtgataaagtggccagacaccatcagtgacaaagcatttctttcccctgtgttaaagtatctatgtcaagagtcctgaccccatgtaattttttttttggtagagacagggtttcgccatgttggccagtctggtctcgatttcctaacctcaagggatccgcccgcctcagcctcccaaacgcctgctggcctcccaccgccttttgggattacaggcgtggcccaccgcgcccggcctaaattcttaatctgtttaatagggtgcagcaataacaagcacacccaaaatttgttttattgaag

SEQ ID NO: 49645 - DNA, 1176 bp, Homo sapiens
cgttttccaaaggtttggtcagcttactcctgctcttcctgtatccccacaatcagagatgctggctggctttcaacacgtgccattagtgtgcagcgcttcctttgtcttttctgttttgtaactgtcactccgagactgtaagccatttgagggcaagggctgtgtctttgggtacttcgctcctcgcagtcacaagtactggcgtgcgtacgcggggagagatcgctcctcaaaacggggtcctgaacgctgccccgcggcccccaagcccggcccgccccgcccctgcatcccgacccctcctcacgccggccccttcccgccttccgggcggcggaagtcgctggctgctcttccctgcccacatgagccttttccggtgcgcccgccccctccggctctccggccgagacctggccctcacctcagggttcccaatgtgcctccggagggacatattttctccaaccgaccacgttcggggttctagcctcacgggttgcctctaaccctagcttcctacccccacaaccttgttcagccgcctccctataccctcttctccgattggcccgtcttccccggccggccaatgggggccccgtttactctctcatctcagggtcgcagaagggcaagacgccgctcaatggttgccaagggcaacgcgggacgccggctagcgaggccttttgttctctgggctggggctcgccggctccagccttagggcgggaagagaggcgcggggggaggggaaggctggcgcctgcgcaaagccgggggcgggggcagtggcttgagagccgggacaaaacacgagttttagctaatgtggaaccataaatacaacacaagactccccatcccccagctccgttttatggccgtttcaaccaaacatctgggctactgattccacaacagggaatattatatgggccagggttgttcagcagaaatgggagagtatggtttattattttctggttaagttaatatgcgaattatgcaaaatacatgggtaaatacagtaattatcggtgctttaaaagcttttaggctagctatagagcgacatccttaattgcaaagcacacgcgctattctgtggttcatcgttcatttaacaaatacttaataagcaccttatgagaaaagctgcagtaggtc

SEQ ID NO: 49646 - DNA, 1783 bp, Homo sapiens
tgaatgatggaccagaaatgtgtgatggtggagacttggaagccaattaggaggcagtagtccaggtgagaaataatgccccgaacaagggcaaatggcattaggaatggaggggagcaagctgaactcaagagacccttgggaggtaagatgaaaaggatggggaggagggaacttgttgggatctgtatctaagggtacccgaccccttggtctcattccactgttccacaggggttggtgacagtgtgtgggagacaggggtggacagaagtgcgttaaccaagatacagactagagaaggaagcgtcagttcttaggacaggggtcagtttgtagtgtgggaaagaggaggtgagaaagggtagtgaatttcacctggcccttgttgagtatgtgatgcctgtgttcgccatgtgaacagcagaaagcagcaaatataaggatcgagagcacggggtagagagagggctggcgatggacaccatctttagggtaattgcgaaattaggggaagggctgaaatacggaaggctcgccgaagatctctaggtagttaataactatcaaaatgtcacttctttggccttcacttttattatgtaaaagtactcagatcaggccgaatacaattttattctctttatccaatgccggaggctattgtcgaagccacggcctgccatttcataccctttgcaataggtggcgctgacgcctggcagggagaaggcggcagcacatgctgggctcgggggcgatgggcttgtgcgcggacctggcgacgctctagccccgagccgcgtattcgtggccgggtcctccctgggaacagggtgaaggccgagaacctctggcctcaggaagcgcatgcgcaaccggttctccgaaacatggagtcctgtaggcaaggtcttacctgaatcaggtaagaggcgggcggggaaggagtggagcctccccgtgcaccctcgcagcccgctccaggagtgggactagccctccttgggggtgtggctcgtgtgcgtgggccacaccagtcctaggggcaggtaagtgcgcgtggcccaggaggcgtgaggctgtgctggcgaggggagggctcccggggcgcgtgggtgcccatacgaggtgcgccgccgccggtccagaagagggccacgtgggcgagagcctcggtcgtcgcctcccagcacctcggggtcgtagagaacacaaaagtcacacaaccctcgccgaggcttgacccccgcgacagagtttagtcattccgttagctggctccacccgccctcctgggcgtggggactcgatttcttgggaggctgcgccttcctacttgtgggacagccagccttggaggttggaaaggtcgcaggcacacgggtgtgaccgagtggtagagggcgtggctgttccgggtcggagctgcaggtgtcggtccaggtccaggcgctggggtcaccagggcggagagcggcagtggtggcgcggctgggggcctggttcagggagggggacagctgaagaaggtgtgaggtgaggagagcagtcgaggaaaacggaagcacctgctcctggttgactcattctggctggaggcataatctaatgtgggaaggtagtaacaggaaaaaaaaaaaaaagcgagaaagagcgactgtgcctgtgctgaagccctttcctcctcctagctcccaggcagctagaaaattgcctgtctgaaagaaagtagctgttttccttaggggactgtggtgagtgacaaatgagatgatatatg

SEQ ID NO: 49647 - DNA, 1304 bp, Homo sapiens
taaaggtgcaagaggccatggaggttgactaacccaaccccctctcacactgtgggagatgctaccaaacactgagaatttttttctttttgaggatgcttggcatcttccccatttgctctggaccaaagacgggcatcaagacgcaggtcacttctggacacctgagcattcaacgagctgtgtcccacgggacagtcttgcccccggggacctggacagagccggtgaccccaggaaaacgataaggtaccaggcacctgaacgttcctccacacacaccctgtgccgtcgaccccagccccgggaacagggtgctcccactaggggtccgaccctaccagcacccctggacgcggagacgcgcgcacgccctcggcccccgccggaggcccgcgcgcaggggaggaggcggctcggaggggctgcgccgcaagaggggcgggaacggggcgcgcgcgggcgccggggcgggagcgcgcggcccgaagggaggctccggcgcccgggggaggggctacgggcaggccccgggcagccgcgaggggaggggaggggccggctccagctccggccccctggcacggcggcgcccacgcccccagccccgccggcctgaaagcaggtggcggcgggcgggggaaggggcgtcccgcggctgagggtgggcctcggaagccccgcgcgtaccagactcctcgtccttcttgtcgaattttttaatcatcttggacgacttcccagcgcccagacccaccgcaaccgtcccaggcgccgcagccggcgagcggaagaggctgcaggaaggccggccccgcgctctcacgccggttgggccgccgcgccttcactcggggccaaggcccgccctccccggccgccctcggcccccgggacgcagccacgcccccttctcctcttgcggcccgccggagacttcggctcgaccctcccggcttgcgacccgggagcccacgcccgcagcagcaggaatgtggttttatttgggtggcgacttctgcggacccctcagtctcaagagagcgaggcgggaggactgaggggtctgtgttcacccgatgaccgtggcctttttgataatccactgcggggccctcccgttgcggaaggcgctctccccgggcgcggttctggtgggcatgtcttccaagagcgatgcgagtgtcagtggttcccgaatcactttggaaattggcctttcactcgctgacttcttggaagctacgacaaagcacaggcaccctggtgaatgtggcttttcagaagtactcgaaggatactta

SEQ ID NO: 49648 - DNA, 1761 bp, Homo sapiens
ctcaaaaaagaaaaagaaaaatgtactgaggaatcatccagggacaaaataaaactcccttgaggttgacttataagcagaagcctctacttacgtaggtgtaaaagcagtctgttaacagatattttccaggcacagaaatcctcaggaggcatttgttcagaagacctgcacctggaatttaaatgacagtatgagctcctaggaaatctcctggagtaacagcagaagaaaaagtcagttgttttctcgtaaacatgtttctccaccagtgtcaccaacagatgcatttttaaaaacaagaaatagaaagcaccttctctttcctgcttaagacacacaggttgggaaagttcctgtacagtgagcaacacatgccccctcatgctggtgctctgtgcgggagaaaacgtgaggtgtggccgttgctaaggaaaccgctgacacgaggcagagcagcaaggtttgctcagcaaggtgtcttaggaaataaaacacagtctaagcctatagatcccatcacagaagaaaggcaggcaaggatcccgcacaggagacggtagaaggcttctattttcacaactgattctgcagcctcgtgctgtagcagtacaggctgcagaaggtttgtggaggggagcgccggtctgcaaggacggtctgtgacggcttcagaatcaggtggagggcaactgagaagaatggaaaccacctcacattctctcctacctggtctaactttacagacgaaatgcatctttcagctgcatcacaagagaggaagccaaggtcgtagggtcttcatttctgaaaactgattgttcaagtaaatccttcagtcgtccccctgatgcgacctgctagggaagctgggagtgccttcacagtggctccaagggggtgtccttataggggattacatctcaagacacattttacccagcaagaggctgcatgactcagcagtctgatgaagaaagctctgttaagttaccaccaattgcaatttctaagttaatgattacagctccaccgaggaaccagaacacagctgaggccacagagcattccccgtgcttactggccagtggggatgatgttgcccagatgtgtgggtcggagctgaatggtgaagacaatgatttgtgattcgcaggtggactctttaagccaggtgctactgaacatgctcttcagtgactgggaagctctcaagaaagatgatatcacaacaggaacagattatgttgggaagattcttgagagttgagattaaaatccaagaggagctcggccagtaaaataaatggtcagaaaaagccatttgatactgtcctacaacagaaaatacatctaaaaaatcaagctgagaagtacagatgggaaggaagaggcagtggggtaaaacaacaatcaaaccaacgtgaagctaccgaacacacagaattctggaatatttaaacactatcataatagcatgtttccaaaattgtctgattataaaaatgggtatagaaaaccaacgtcagacaggagctctttcatttttttctttttttttttttttttgtgagatagtctcactctgtcacccaggctggagtgcagtggcatgatcttgactcattgtaacctccgcctcctgggttcgagcgattttttctcatgcctcagcctcccaagtagctggagttttaggcgtgtgccactacacccagctaatttttgtatttttagtagagatggggttttgccatgttg

SEQ ID NO: 49649 - DNA, 2715 bp, Homo sapiens
cagccctctttcacttttcaacagtaactgaagtctgtgtcagattgtgaggaacacctgtctgctgctttctggaagctttcagtatttgaaaaagtggctagggaagctgctgggaagtccttcaattaaccttaaaaagcatgtaataaaacctaattatagagcatgcttctttcatcctctctgtcactcctttagagaatgtggtgactttctaagccactgtccctgcaacctcctaggatttagatgtatgaacattatttacagatgggaaaaacagagcactgaaagttttggtcaagaaaaccgtacgggttagtgatggggtttctcaattgtgaagacctgagcttgacaaatgcattttcagcttcccaggatacccctggctcctcagtgagcactggaagtttgtcccttctatagcagcccttggcagttccagtctaggggcagaagccagcctgccactgcagagaagagcagcaagttccagcccagccggcgagcacgctgcactcatgggcttcccaaggctctggcgggaagtcacgggtcaagtgaggtcttcttaggtgctcaacagtcacactctggggcctgaaaggtcttagaagcttatctctgtcaatctctgcttagaatcaaatcgatcaatcaataccttttccttctctttgcttctcctactgagccccagcatatttgagtgaaggtacttacatgtacgtagccttttaaaagccaagtactatcaagtgagctcccatttcaaggcacgtttgaactgggaatagaaagacgggcagcttaagctttgggatcatacagacccggattcaaatttcacttgttacacagccttggcaagctattcaatccttttggggctttagttttttgtttttgttttgtttttttaatttataaagtagaaatgatgttaactctcagagttgttgtgaaaacacagctgactcaaataaaatacaagatacatagattttcaacacattaacccccaccaccccaccactttcccctgtgaggggatggcacatctaacatttttgggtaaaatttccagaagatctatacagtcgagttgttaaaaactggtgtgaaagactaaaataagattaggcatcagtaaatcaaggctgcgggtgggtctgggggcttctctggagggaaaggccagaccaagggatgtcccaacaggaagttaggagtctggggaaagacagatatgatctgaaactgggaccaggaaattccaaccatttctgcctactgattactcatcattgattcaccaagtttacaatttaccaggaggatatgggagcaaacgagaggtaaatcccactgaagtttaaaacataaaaatagacaatgacagagggtgtcaaaggaaaccacagggcatggcgggggcaaacacaggaggcgccggtccccgtgagccagacacaggagggacatgccacttcttccacgagggactaactagcagcaatgctgcagagacacaggtcacttctcaacattcctggtcaagacagacctcttaaaatcatgggtaaatatccaccgactgcctcctagaagcccgcactgtgctgcacgctgctggggaatactgaggaggggatgtgaaatgtctgtatgtgacccaggacctaactgtggaatggagtccaattctcagggacagagaaagtgctccggtgtgtcctgctggtggagagcacaatcgtcattggagactggatgagctcagggcaggctgatggattattcaggagaggcttcataggggccaggggcctgagctgggctctccaggggtgcagcctgggcaggggagaaagggagaactctaggaaggggacggtaaaatcatgccagatgtggcaggggtgaagacagtgggggattgggcagagccatggtagacatcccaccgccagggatcagagatgacagggcagcaggcgtgcgggggtggagcccacatgtagatcccccgcccccgcacacagggtcaaagttagctgggatcagggatgacgggggggtgagaagaagcgtggattttatgaagagtagaagaaacagatgtttgttaagacctaacatgtgggaggcactgctgtggacaggagtgagtgagacgcagggccggtcttcatggagtttacaagctggcgggggatacagccctgtggacagataactgtcattacacgggctaaacactagcatagggggaattctaggagatacagggacccacaggtatggcaccagactatggggtcagaataagatctcaccacagaggtatgagcaaaaagaaacaggatatggtctgttcctttcaagcttcccacaggggccaggagccccttttgcaggatgtcttaataaatgggacataaaggtacccatttgtctagagtgcagtgttggctgcagacagtgaacatatgaaatgatgcccttaaaatgccctttggctcaaaacgagtccccttccctgaccctagctttagaaatcaaaaggaagatgatcatgtcatgggaccccaaattacactcacactgcaggtgaaacactggggtgactttcacacgcacagctaagaaggaagccagtttccgtatgactgcaagtgcacagaaaatctagcatgccgaacagga

SEQ ID NO: 49650 - DNA, 1840 bp, Homo sapiens
aaataaaaataaaataaaaattaatacaggtgttgggaatgaggtctgggaggtggctgtcatttatctctaaaatcatgctagaagctaaatatataatcatttttcctccacgttgtttccatgggcttagaagagggaaaaaatggcacttagtgttactaggaccaaaagacagctcctcctactaaaagatcatcctggagttgcttaactgaatatttatgacatactaacatcctttgggggaaaacacgtttcgaaataatcaattaaaaaaagcaaagtgatcaatgacagctgtttaaacaccacctggaaaaataggatttactccacagcagctccctgggtgcagagatcttggtgcagatcccatttcgctgacttgctttctctccttagacaaatgtgtgtggcggggctgagtacctgctcatgtccttttctggggacgccacacatggctggtttctggcccttggggacagtggctcaggtccagaggagaacccttactggctgtagtgtggtgggcacagcaggggtgggccggttcacctcctggctttgaagaaatgggttctctcctatggcatctgtgattcccaaagtcctcaatcaagcaggaagggggtgagtcgatggctcttcccaaggccttctcctcccatggacagcttctctgtccgagttctctcgccgtttctccccctttactccatcccaagaggcacttgtgagcttcaagggcatcttctaaatattacattcactcagtgccccaaagaggacagcctgttcttagaacattgctcaattctttctcctgtggtaaggattcagtttgttttattaagaactagtgtggcataagttcattctcatccaaaaaaaaaaaaaagaagtatatcaagtctcttcttttggcatatagtagatagaattgttattattcttgtttctgtcccagagctaatacattcacgacacactggcaaaggatattttgaaaaagctgtctatggcaaataactgatttgtttcattttgtaaaaatgaagttctcctttctgacccaagtcgttttctaaacgatctcaaagggcaagctgcctcttccagcgggaggctgaggccacgctggaacctccttccgaggtctggacaagagctgtgtggtgcagaggagggagggctgggcccagaacccagaggtctgcctcgggctggcctctctctccagtcctgtgacctctggctgaccaaagcctccctggttccgtcccttcatgtctgaaataagcaagctatatttaatagttttccttttgctctaaaataagatgattctgaaatacgacattaagtgtgaggctggtttctgctttggacctcacctaaggggttttagtcataagcccatgcgtggaaactggccctgccaaaaaagaaacattctgaatcattcaaaaccattaagaatgttggctctgacttcagaaaggcaagataaacagacccgtgcccagcgggaactcacttactggatgtctctgtgtttttaactcatcggtgcctgagtacttcccaggttccttcgaatggcttcaatgtttaacgctgtcacatttgtactatgaactccactttcataaaggcgggggcaggggggtatttaatttggtgctaagtgctcattaatctttttagtgtggtcaccagaactggcttttttgcagcctctaatccaaaagcaggttaattctcctgccccacacaggttataaagttaagaaaatgtggcacatatacaccatggaatactatgcagccataa

SEQ ID NO: 49651 - DNA, 2787 bp, Homo sapiens
gcccagcctttaaagtccttttcccctaaacaatactccaaaatcaatgaatctagagattctttgcaccggagtggtttccaaatcaattgacctctaagctccaaatgcattttgattctgcttctattgatctgaaataataaaggctatggaattgggatatggttctggtttctagtggagtttacctgaaaaactaggatacctttgaccatccatatttctaggaagccctctgactatccatatttctaggaaaccctttgaccatccatatgtggctacttttttatacatacagtactcatgcaaaataaacagaaaaataaaagagtaaatcccaacttccaggtgacagtttacagcatatctggcaactacgtggtagagtttagtgggcctgccagagtccttgtgtatgccccagacataggcatacacacacagagctcaagaaagctgctcaagaaaatgacagtcttttttttctttttctttttcttttggggggaactttcactggtatagaactaactgggcacataatgggtaaggacaaacactgaaactttttttttttaagttaaaaaattccagctgggcatggggtggctcatgcctgtaatcccagcactttgggaggctgaggtgggtggatcacctgaggccaggggttcaacaccggcttggccaacatggcaaaaccccatctctactaaaaatacagaaattagccaggcgtggtggtgggcacctgtaatcccagctacttgggaggctgaggcaggagaattgtttgaacccgggaggtggaggttgtagtgagctgagatcatgccactgcactccagcctgggcgccagagcgagactctgtctccagaaaaaaaaaaaaaaaaagttaaaaattccatgttcagaaagcaagagacacggtgttattttctccaattctgaaagctcccagtggtgacagcatcgttagccatgtgtaacatgtgcatccaggcaactgactgtcaccagacttctccatggccttactcaaactgagtaagctggtagtatttcctaagagttgtcactcagttgtgaaaacagagagctttttgttttttggaaaatcctgatcagccgaaatgactgggtggtcagccttgcccatcttttggctacttagataaaggcttcttttcccaggcaaggagagagatgatggttaacttgctttttagactgaggtcattgctattcgctggtgtaatgaataagctagacgtttaaaaacaaaacaaaacaaaacaaaaaacctcctttcaaaagcaaccacatttttctcttctctggaaatgaacagaacgcgtcatgaacagaacacgtcataattttttaaacatccatcagtgcccatgaaaaaaatttttaaaaataatctgaatctcacttgtttattgcctacaatatcaatcaatggcttaggtatctctccgtgttctattacttctcaccgctcttaattcatgaggtcaaacagaatcttaaaacatcattaaaaaatttcctccctttccatgtctcaaggtatctgtaaatggacaatttgggtgtgctgaaatcaaatgactgaccaaggcccataactgtgatcacaggtaaaatgtttttctgctttgccaaaaatccgagtttcctttgctctctctgtcaagctgaaagagccctcccagaccgaggggccaggtggagaggccactcacacccgccctgtgccggtctaccttggatggcctcaccagggcacggttcccggggtggtgactcagctctggaggaccacctgctgcgtgggggttgctgcctagcaggtcactgccagtcacgagggcagagagacccaaaggatcagagaacagctctgagcaggtcaagggcagtgccagaaggaaagcctttgtttacagagggaaagatcctgcaccttgaagtgaggcattaaagagtagaggggctttgcacctgcatcctaagcctcttggttcaccactaagccgcaaagccacagggaggaaaccactgggaataccatcacagaaaatgaaggtagggccacagggcacctcccactctcaaagggaaaagacggccctggatcatctttctaaaacaccactttgatgaagtcgccatggttttctaaagtaataaatggcagccactacctgcaagataacagagtgcatttgaaacctttccaccacctaagtccaacccaccttcagggcattcgctctacttccttagataaagcctctgctggggttaagatgttctgtctccgctgcccccactctgcaggctttctcctcccgctggctggtgcagagaatgggggagccattaggagccacagacactgagctattctacatggaattctttttattgtttgatctatttcacatgtacaaagctttgaccttccagttctaagaattcctacttagaactggtaggttctaagaactcctacttagaactggtaggttctaagaacctccctggaccgattctggcacatgtctcttctgaactcacagagcttgtgccttaacaatttagagtcaactgactttgctgtcctctctaatgtgttaagtttcagtccgtgacaaacattgacaagacgtgtacctcatcaagcactgtaaagggaaaggacatgacccctgcggcagaggtccacagtcacacagatgacagaaatgtgcccgatgccttccaatgt

SEQ ID NO: 49652 - DNA, 8391 bp, Homo sapiens
agtgctgggactacaggcatgagccacgcgcccggcctccctgatgtttttaactaacattgctagtggtttaagttgggcaccgacaagtattagaacgtaattgcagaggtcacgttgtttgaacaccggaacttcaaggcgtgcttgaaccacctgatcaaaggagaagggactgaggaccaacaggagtggggctaaaggcatccttctgctccagtttcctgtgaacccgctcctctgaggaaaggagtagtccccacggaagacacaggatccttctgggggtcctccttggccacgtcacacttccagactgtgtggcgggacactgaccatcaagccgacagacgtgggttttaaagctacgccttaaaatcagcaactccctttcctcatgaatattttagtgtgtaatatagaagatgtttttacactgaattaaagtgcctgccactgaatcttcctgctggaattatggggggtgggaggagatggaaaaaaaatcaatgtttcaaagcagtcctgatgtgctaaaaatatctctcacttctcctttcatctgtctggtcattgtcccagacgcaagctcagcacagcctcgcccatacaacatgtcgaatcgctgtctacctccacttcttaatcggacaaagagagaatattctttttttttttttccttcctcagacattagtccaagattacagactaggatatagcaacctattattcaagaacagcttttaaaggtagctgcttcagactggcacttcgggaaaactttgaaagtagactcctttttttttttaatgcttattttaactatagattggtgataacgattcaaccccagagatccagctaactgttggcacagaaatccttaacgctactctcaagcaaataagatcttgtaaggggaaactcctgcaaaatataccttgtgaacaagctgctcgcacctcctcttgcagctgcaaagatattctactctattgcttaactcgtgaccttgaaaaaactccacctttcctgccagcagctccactgcatccacctgtccctacaggtagtaaaagattagacaaaacagaaccacgtttacacaacacacttccgagcctctcttccttctagcccctgtcccacccccactccaaggtcgaagttcatttcttgcaggcttcacttttcaggattaaccaacactgtgctttttcattctgctcaacaccagtcctttggcctcacagtgctcgcctgtgtggaacacgctgcagccaccaggtcatctgctttagacccagctccatgtcaagtcctgttacggtccctcgggcatattgtcatgctcctgggcacctgaaaactgacaactggtttcaaatttcttacaatttgcttttctggtctatccttatttattcccctcacagtgacattcataggaagaggaagtagcaggcagtctcttggggacgggtctctcctgaatacctggggggatgccctgggctggggaacctcacaggggctcatcaagaggttccaggagacagagttcgagaccagcctggccaacatggtaaaaccccgtctctactaaaaatgtaataatcagcgaggcgtggtggcttgcacctataatctcagctacttgggaaactgtggcaggagaattgcttgaacccgggaggcagaggttgcagtgagtcgagatcatgctactgcactccagaagtggaagtagccaccacacagctgcacctgccacctccttccccactccagggcctttgaaatgtgctgctctctctatgccgagagctctcacccctaccccctgcacccacacattcctgctcatcccttagctgagaccttggaaatcacctcctcaggggaccactgggaagaaggtccttttcatctgagtgccttcccctcagggcatgatttttcttgggccattttttttggtatgtgtttacttaggttccatgatgacagagaccatgcctttgttttcatcactatcgtcttcacctcactgccaaccagtgcctggcacacagtaggtgttcaagaaagttttgctgaataaatggatgaacaatgacatcagcctactttgacctcttgagttcctctgatctctgaatgttctggagcaaggacctttaacagcatctccatctcttcctggccttgccgccccacccagtaaaaccataatacttgctggtatagcctcttcctgcaaataaaagtatacaaggagttcagaacggacactccaaacaaagggatttatgaccttggtctcatgttctcttgtggtggtaaaattcacttttctatgaaattaaaaattcctcccttgaacaacattgccagaggtccccagaacaaggcaaaactgggtattcaaaactttttaagtttaggaaacgctgcctggaatctctatttctccctcctctggttgcattctattcctcaggttatgtgcttctgaaattcgtatctagctctgtgcccgaagatgcttccagctcgcttgcttcccctgctccctgctccccgcaggcctgcggagagcaccgccccagtctgctattaagatctgctcaactgtttaattgcacagcccgtcccagcagcaacctctccacagcctctcacttgccaaccaactggccgcccactcacattctcttgccggcttgctcactgcccaaacacacacccctccccccagttcatctcttacccactcacacaacgaagatccgacttatccaatttgctgacgtactttacctgaagccccacccacccccctccacttttccagagttctacccacaagaaaaggaaagcagccggcccggtctaaatacaaaagatttactgtcaacaccttgaaacttggaaagggtccattacatgccagcatcagacttttggtggagaagcgcggtggtggggagggtaggaagatgctgagaagaaaagacgaaggggaagagggagatgaaaatccatcagtcctccctctgagtctagttggccaggacaaggacgacacaggacttttgtgaaagattctggaaatatttcagagagttgccttgagaatatccacatggcggtacatagggcataaaatctgggttcgaagacctgagcctgagtcctggctttccacctgctaaccacatccctgccatcagggcaggctgatgtttcctggtcagtacaacagggctgcagaaatctattttgcagagttgccgggaggatcaaatgaagttatgtgtgtgaaagcatcttgtaaactgtaaacactagacatggtatacattagtttttggtgttacccagtaggtcatttctctctctcaaacatttattctctatcatgtgtccgggtgtttatccaaaagtaaacactgatcatggcatcatgattttgttttgttttattttgagacggagtctcgctctgttgcccaggttggagtgcagtggcgcaatctctgctcactgcaacctccgcctcccgggttcaagcaattctcctgccccagcctcccgaggagctgggactacaggcgtgtgccaccacacccagctaattttagtatttttagtagatggggtttcaccacgttagccaggatggtctcgatctgaccttgtgatccacttgcctcggcctcccaaagtgctgagattacaggcgtgagccacggcgcccggccctaatcatggcttttaaggggtcaatgcaagccagggaagatggacaaaaagaggaattacagaacacagtatgacacatgtacaactgggtaagcagaaagggctgtggaagcacccaaggggcacctagcccagcccttaggagtcagcagaggctgcctggtggaggtttcatctgaacaggtgctctgaagggacagtagccattggccaggaagagggaaggaagagcttccaggcagaggacaagcatgatgggcttcatttggctgcaccagagatcaacaaacaatggtaaggatggggggagtcctgagaggtaagaccagatcatgaagggtgtcttgagccctgtcaagacatgatgaggtcaaccaagcaacaataacatcacaagacaacaggtttctttctgggtcctgacagtgtatgtaagttatgcggcttgaacttactggacggcattaatgagcttctattcatgtctaataaggaaaaaagagggttctatcatgggttatgccacatttgtttttcttggtagttgggacagttgctttgttaattgccttttttgaacatactctcctatacccacagcacatttgctggagtcatgggggtggggtgtgataatctgcactattcatgagctgtggccaggtgatccagcacaaagatgcccagctgtggggaatacattcattcttccctaacacattaaaaccacaaccaaggaaagctggctgaataaaactgagtggccccaaggatacaaacacctccaacacgagtcatttatttatgaaaagtgaataggatacaaattaaaagcttgggcgcaggagccagactgctgtgacttgaatcctggctcctccatttccaacttcccccagcctcagttgtctatctgtaaaatgggtctcatagtaggatctgccacacaggattgtgtattaaaagagataatcaatatcgagtatttggcacagtgcctggcacatggggctcccaacacatggtgttggtggtgttcctatttgttgtttttctcttgtagcaatgctgaatccagtctgctcccacttacagtttacatgatggaagaattagagacttgaacacagaaatgaattatccctgttaaccctaaccccagaacattgaggccacaggaaatacaaccgcagtgacctggacttctgcgttagtcatgatcagtacgtattaggtcacagctagtctacgctttatcacatggtggtgacattccagtttcatatgagagggctctcagttaagtaagtgcactaaaaatgcatactggaaaacacccgtgatctatctaaaacattgttccagtgccctcgtttttttgttttgctttgtttttttaaatcccagagagcaataccataaaatatttcattagacctttttattcaagatccatcttaaaaagttgaggctgtacctcaaatatcttttattttccttgctgacttgttacatgacccccactggcctgtgaatatatccaaagatttttctgtgttttaatctgaactcactttgaagctatttatatgtttggcatggtaacacaatggaggtaataaacaccatgcaggtctgactcagctttgaaagcagctttctgagtgacaccttcctcaggattccctgagctaactttatgggatctggtaagtaacttcatattcactccatagcacttacgatctcccaatcatttcctgcagatctagcctggaagctaaattttaaaactagctgtgaatttagaagatgattcataagctctgtgcataccatggttatgactggtggaaggcagagattcttacatcagtcttctttacattttaacagcaaggaaaataacaggttagaggagtactttgtatctaccctcccttgcttccggcaaattaatgaaagccaaataaattgcaacactttgatatctgtgtctctgtaacgttaaagacagccctgggctgcgagagatgaacgtggtagagcacctccgggccagcttcccagtggagcaatggtattggagaggtggacaacgtggggaggctgagggagctagatcttcgaaggcagagaacaacacggtgtgtcaggcaagccacaagctctttttgcagcataaaagcaagaggggagagtggcaggggaaaaactcaggttatttattttttttttttttctgaaaaccacttgctgaaatagaatgcctcttctgaatactgatgtcattagactatcaatttaggttatattaaattttttcaggatagctatccttaaatttcaaagcatttattggccaggtttctaaagtgtgatagcatcattcaccaggaagcagggaatttagaatcgaggtgacaccggaccacagagtgagtctctggtgtagaggcaggaatatgctcagtaaggtagctcgtcagccgtaaggctgcccaggagtgaggcttcctctgcagggtctcacgggtgccttctcatgccttttactggagccatatctaatgactttaaaaggttaaccctggatctgttctggtgaacttcatccatgtttgtaacatcctagaaagtatttattctgagaagctgaaaaacaaaaaaagatcttcccagatttctgaaaatggggtggatactgacctacattcagtgttctagattaaaatcacagattttggatagagaaagtattctctgtaatctaataaaaccaacttttttttttttttgagaaagagtctcgctcatggcccagtctagagttgcagtggcacgatctcggctcactgcaacctctgcctgtcgggttcaagcgattgtcctgcctcctgccccagcctcccaagtagcggggattacaggcatgtgccatgacgcccagctagttttttgtatttttagtagagggggggggtcttgccatgttgcccaggctggtcttgaacttctgacctcaggcgatcaggccatcttggcctcccaaagtgttgggattacaggcgtgagccaccacgcctggccaaaaccaacatattttatggataggaaattgaggcttagatgggggggaagaaaaacattacacagattaaaccacagctaatgtcaggtggtgaccaaagcaagtcttttattgcaggctgggtttttccatgtggctggttgtatgctgcaccaagaggcagacacagtaggccagtttcctgtgcagacccagctgcaatcccatctctaagccaggatgctattaggtctcaacaacccatgggaatttagggtgctcatgatttaggctggaaagaggtgactaagctccttgatctaaggtctatgcaactggccactcactgcggaccagggacattcaatgccagacagcggtagggctggtctggggcggcaagccagatcctgggcaaagcagcctttctgctaagggttccctggcagaccacgacgatggcctcttgcaaatgtgacctgacggtggcaaaagtcttctttcaaagcccattcctagggcctgctctttccccagcactgtcccccaggaagcccccttgctagccatattcataaagttaaacgactaaaacatgttttggaaagtagtttctcttggtattttagtgtgttgtttactctcttactgtactaacaatataaattgctaaaggcttcctggaaatcaaaactgcaaattagagaaaaatagggttagagaaaatgtctttgatagtccactttgaaattcaaataatgatttgagaagtttaagaattattacgtgaatagatggtaaagtgacagaatattaattatagaatctagccagtgtatttttcataataaaatattggaaaaaagtattaccgcatcttctgtgcataccaatatccaacaagttcatgggctcctaccgctggatataatagcaaaaagtcttgaaatataaaataaaggaagcaccacaaattaaatagggaaagatacatgactcaaaacatgatgggggatttactttgtgaaacaaagtccatttggatctttgtttcacactttttttttttttttttttaaagacacagggttcttgctctgttgcctaggctggaatgcaatagcatgataatagctaactacagcctcaagcttctgggctgaagtgatcctcccacctcagcctcccaagcagctaggactacagacacatgctaccatgcctgcctaatttttaaattttttggtagaggtggggtctcactgtgttacccaggcttgtcttgaactcctagcctcaagtgatttttccaccttagcccccgcaaagcactgagattacaggtgtgagccactgtgcctggccacatcttacttctaatttggtgagtttaatgttaaaaatgaaactttaaaaaaaaatagatgaatattttctaacttctgggtaggaaggaattcctaagcctgaggtaacagaagttacacaggaaaaaaaaaaagataaaataacttactccactacataaaatataaaggttctcatgagaa

SEQ ID NO: 49653 - DNA, 11317 bp, Homo sapiens
ctccagcttgggcaacaagagcgaaactccatctcaaaataaataaataaataaagtacctatacagaattatgctgattctgcaaattgtgtgtatgtaggaaaatgctggaaggaaatacacaaaaccctaatagagctttgaggattagaggtaatatgtggaatctaaaatagtcaaatacagtccatagaaacagagagaggtggttggggggatggggagatgtgggtcaaagggtataaagctggaatgatgtcagacgaatacatctagagatctgcagtacagcatgaccacagtgaagatactgaatatttctaagtgcattttaggtgggcttaacacacatgcacaaaaaggtaactgtgagatggtacactcacagctggagtgtaagttattattttgctttgtacatgttatatcaaaccagcatgttgacacctgaaatatatatgataaaaaacaaaggaggttttattacaaatgagtcagaatagaatgaaaaacaccatataaaaaattagaagagtgatcccctgctttggagacaggtctcactcaagtccttatccacatggtgcaactgcccactggctctgtctctgccattgactctgtgtactgacatgtctgaatgccacctatcccccctcacacctgggccccacctgtccccccctcacagctgggcttcctcttggactgcattttgtggtgaatgatgccacttgataaccctggccactctgcctgcgtcaccctcccccatttctcccccgaatccatcaccacctgtgtcctgaccaaagctttccatttggcctccttgcctcgatggcctgtcccacacccgcaccccctcgagtcattctcttcactgcagcccgcctggcctttctgaagtgcacatctgacttttgtcaggatcctgggtggaaatcttcaggcaagcaaggcgcggcattcacacctctgttaacaagcactgccgagtctgcatctcccatcaccccttccccacacacacaggtctgcgcctctggacaggctgccccacctgcctcccatccaactaactctgtcaagcctgtctattggggtcaattgtgactttgcctccattggaagctgcgcggggtggcggttgagtgtcacaagccctgcgcatgctgtttttatgctcccatggcactcattacacactgtgactctgtttttgtatctttgtctcctctaccagaccgtgagcacctagccaagtaggccctcagggtttgtagaatgaatgaatgaatgtttccaccaccccagcagacttatctgctttcatcctgaaagaggtatcaaaccaagattttgtagcttcccccagttagctgctgaagtattatatcatcctcacaagtgagacagtcatccttatgtattaatcacccagcaaattcatgtattatataccgtctgtcatgacactatcgctggttttatttgaacctacttactcctgctaagtctctcacaggaaccttactcattatcactaaacacaacgatcatctcaagtactgtgcaccaggcagagcggaaggccctaggaatataaggataaaccagactgttactacttaaaggccattagcaaaaaatcctccagccttgtgtggaataaaatcctcagttgccttatcttttcctggaagggcgtgtaatttctgttgcttgtgtatcagcttttcacaattgtccaaattctttttttaagtgtgactcaaacaggacacaatgatgagtctgacaaacacactacgtcttgttttcttacccttctatgtcatactccttttaatacacccaagaatcatgactatttttttcccgcaacagcctcacagcattgactttaagtttagctgatgagtgataaaggctgccattttttaaaaaacgatgtttcttttgtactcaaccatgctattttaaatctattcctactacatttcttctgctaatgtagaatcatttttctgctttgttataattgttatgaattatacttctggagttgagatgattttgattcctacctaatgtggtagcgtgcacaatagaaaaatgaaaagagatttcatagttttatattgtgcaaaaggcagagacaaatatatgtatgaaaactctgcccaactgcttaatattgagtcttcggccctctacctgaattcacaacgtactttacaaatactcgtggctacatgttgagggattctgggctatcagtttggagactctggtattaaccatgctctttatttattattagtcatgtattttccccaccctttgtctttggctttgcacccccacctagcaaccacaatgacttctttttgacctggatggctcgtctttttacataacagtgtttcctgggaagcttaagaacagcagagtcacagtgagggcttagtccagggcagccttcttaacgtggggtacatggatgtccttctttgggtctgtaaatgggcaggcacatgtttgcatacaggtgtgggaaaaggattcatggcttccatcataatctcaaagggatctagcaccctggaaaggttaacaacgcaaactcccaggcattcagacacagcacagcacagcacagcacagcacagcacagcacagcacagcacagcacactgaataaacagccccagcttgcctgactcaaccttctactaagccacctcccaagagagcaagaaattctatagtaattatacaccaaccatcttctggaaggcaactacgctcaccactgtaccaccaacacgccaaacatcttttgaataatgaagatcataatttgagggtgtgattttggggggggatctggcatatatgacattatatagaggccataatctaacactttaaatatcaaagctatcttttctcggtttctgcttttatccatgttttacgtactttctttgtcctcttctgatacttttagcttatttgataaccctggttgagaaccaaagcatcatgaatcacaagattctctacatattaacattttgttagaagctcaaagcacaagtctttcattaactgttgatcattatattatttttgccagaatatactggtgccttgtacacttgagttttaatagcattacagatatcattttagtgtacatatgtcaaaaccaaaactgcctttatgtcaatatgctgcaaaaatctatcagaatatatcttaattcttaactttcattgttgtctgtgggttgtcttttataattattatcacatccacagtattttctggaggtaaatatgaaatgtattataaacgtactgggggaaaatgctctttaaagcgtttccctagacaaagcaccatttaggtgttagaagcaagaactagtgaaatcagaaattgctgtcatacatactcaccagtgaacgggcgtacagaggatccccaagcgcaggacttgtcctggaagcagaggattggattccatcaggaaaagaggcaagtagaaacaccaaatgctggtgctccctttccccagctcatcttatttgcaggcacacagattttggaatcctccaggactaacaataaaaaccacactaggttgttttcctaattcctatgaaatgagtcagtaggtcaaacaacttatccactccagagagagaacaattccttgagctacactccctgtttccagtaaccctattccctgtctgtgcccctggataaaagtgctgccaataatgcatggagagcccaccgggttctgaattagacacatcatagagattgccagaaagttagttgccttcatgggatagtttcccttatgaatatttaggaggaaaaaagtccagttaagagtaacatgaggatcaagtttcttcatttaaagagtcagcataactttttctctatcgagaccatttctttctttcatataggaggactgaatgatgctgaaaataaatatagaaaagcgataactgtacctttaaaagcccccacaaaccacttccttctgtaaaacaccctttcctcctccaaaggtctagtatattcacaagattcactgattattcaatgaatccatattcttaaaaacccttcacagttgtctgtgcgtcctgcagttccatactctgtatcatataaagcagaaggtgtttaagagcttgctagccgtcatttaaatccatgactcaagacgaccaacactgggttaccaataatcttcagaaagtaccacctactcaccgagtgtaacatttcttgtagttagcgacctctgcttaggaaatcaccagctcctggcaatgaatccatacttccaagaactcacacattcaggcaaatatatggacatacagctctaaatatagatacagagaggtctgccgtgacagttcagtaggagactggaaatacttttgctttctgtatcgatagtactttctttcctttttaaagagaaggtttcgttttgatcttgagaaattctgataaaaccaccaactgaaaacctgccattataaaggagggatttcacaacgttcattccaaaaaactgtggctattcatttctggaagtgattcactgcagaagaatcgctgtttgggggtggagggagcgttgatttttagaagccagcctgccctctgagaagtgagcagcaacctctgagatggcagccacgtgccttctgacccccagccctgctccctgaatcaccacccctcgagatgacacgcagtgaccaatttcctcttaaaactcccttctgttcaaaaaccctatgatccatgcaccctctgtctaatcctctgcgatggggccagtctgcagatccgtctgggcgggctgcggtagcattctccacctgccaacactcagttgctggtgagtaaccagcatacggactctcacttcctgtgagtatttctgaaagagcttatgatatttccttcaaaaaaaaaaaattgtggggaggaaagccactcggggaggagaagcaacttcaacaagcaaagctaaaagcatgcaacgtgatcactgttgaccagacacgcctaattttaatttggtttctcaacccctgtgtaattaagacagcccaaagagaacagcatcaagaggaaagaaaaaaaaaaaagacatttcacaaatgcttagaccttcggtgcgcgtgaccagaaaagtaattttaagattcaagcgaaccaatctgaggctggttggagcattaacccttcaaggaaagagaaagaattatttttgtttgtccccaaatttcaaatacggaattcgtcttccctaccaggaactgagataccaaaaatcagcctctaaataccatcctctgggcttgtaagatgaaaaaactttttcagatttgtccatcacaggggtagaaaaatacctatttatgagacccagtcacattaacagagcagccgacatggtgttcacactcaggcaccctttgaaaaccggccactaaggctaaaatgtgacattttgtatttctctaggctgtagccaaacctgttaatttatgttagagagaagggcagcatttcttgacaactgggcaaaatgagtaagaaaacttgctttcatcccaccttacagagtatcaatggtgacaaagctcactttctgagattagtagacgttttgctgaaagaaagatttttcagagcctgtccttcagcttcaggctgtgaatgtgcttccaacttggggcctccatgtgcctgcatggtggggaggggggctcttgaagggggaaggaggaaaatacaagcttctacttaatgggcactgaagaataaaacaaatcacccacattcacacctgtatttatcacacaatccatggaagcccttaacttgaaacacggcagcactttgccacttagaccccaactcttttatttcacatttttggatgtgaaattctgaaagggaattttcactttttttttttgtttgtttgagacggggtctcactcttgtcgcccaggctggagtgcagtggtgcgatcctggctcacggaagcctcgacttcctgggatgtgataagcttttaccatctttaccaaactgatattttaacaagaagagtatggaaatcatttgcctgatatacataattgatttatttatttattttagaggcagggtctcacttcatctcagcctccagagtagctgaaactacaggtaagtaccaccatgcccagataatttttttttttttggtagagatgacgccttgctgtgttgcccagggtggtctctaattcctggcctttagcaattctcccgccttggcctcctaaagcactggggttacaggcatgaaccactgtgcccagcctgcatgatgtaatctccaaattgagggtaagtaaaaagtagcacctataactagaggtaaatttttaatttaaaacaactacactacgcaatagtcatctcctcagcccttgcccacgagatcttatgaacctcctcaatagaaaaaaaggaagtctgtgataggatcaaaggaacaggaaccctttacatggagagtaattttaaatagctacaatttttgagcttgtccgttgataccgagctcagcaaaagaaaaagcagtgattacaggcctgaccactactcaatgattagaatattcactcttctctattacttagaaggaagcccccctctcccactatgtcaggtatacacacaagttcacagctctcagtgtttctgtgtaatttgttcctgtttcagacagctttccagaaaagctcctcttaaatcctgggtggccaatgcagaggttttaaaaagaggaaaagtagagcaaaacaacaaaaagatcatgaaatagaagcttggggagaagggagcaaagagaacatgaatctaacagatgcagcagttgcaaaaaagctgctatcctttagaaactcctgttaatttggtgacctaaagggagctatttctaaggctggatgttgagaatgtgatgaaaccatggaggctgtccaggtccttgctatgctgtggacaccattcaagagttatagagtccaccctctccaaacaaagtaaaaccccgtgacaaatgaccttcatgtttaacatttactcagttctcttttaaacaatgaaatggagcgcactctttcgtggcacttttataggcaggagagagagtggtctcacaacggaagggcaccagccactgagaagtcctaaggccgtgtttgagttctggctcatcttttttgctaatttgctcttatgcatatcacccaacctcgctaagccagtttcatcatcagcgagaacagcacactgacatgcagggccagctcaggcgctaccacaagctacacatccgtccattcgtttaatcttcacagcagccctggaggtaagttctatttttaatcctcatcctacagataaggaaactgaggccctgggtgcttaaggacatgcccagggttacacaatcagtaggtggttgagccaggattcagagccagggagcctgaccttgactccacatccagagcctgccctcagcatgtctgccagtaacacccaggttggctgcacagcaaggaaaacagcatataagaaactaccttaaaacctacaaagaccataaaaacacaaggtagatttttaatcatgtcacatgcaaatatattgtctgtaaaaatgtaatgaagattcaggacaacgaagcagtggtaactctgctgatcctgtgaaaacagtttcacataacttgcaagttacttagttgcacaatgtgtggtaccgagttgtagaggtagaagggattcagagatcctgttttccgtcagggtggttgggtgaggctcccagacacagggctgaagtctgaaccttcatcctttcactcccagcccaatgatgtgccactgtgtcatagccacatggtggttatgaatgcatctggaactccacattttaatctgccaggcatccacccattcgttcacataattcacgtgtgtgtaatagtaaccttcagaaaggaatgtcacaatatttttctcattacaacatctttaggctttaagatgaaaagggtgaagaaagaaatcttctctaaatcttgtattcccgctattcatttttttattcaaggaaaaacaaagcctctgttaaagctctgcttacaatgaaatgtaactgaagttctatccaattctttcctcttctctgtaaacttgttcacatgcaacagcctctctgatgttaacaggctgttcctcccaagtgcctgcagatcatggctataggagtcactggaaggaacttgactcggtggcagtttggaggcttcccgggctttaatgatgaaaaatgatttggtcatttaagacagagccccccgctctgttgcctaggctggcgtacagtggcgtgatcatagctcactgcagcctcaaactcctgggctcaagtgatcctcctgccccagtttcttgagtagttgggactacaggcgtgtgccacatctggctattttttttttttaatagagaaggggtcttgctatgttgcccaggctcgtcttgaacttctgggctcaagcaatcctttcacctcagccccccaaagcaatggttcacaggttcagaggtatgaactaccatgcctagcctagctatttactcttaaaggaaaaaataattttttatttagttttcaagcctttcatgctatttacactaaagtttggccttattatttttgcttagaatcttttaatggttttaggtcacgttgggtcacatcaaaacacttgaaaatgcctctttctaaaacaaagacattcgttgacaaaaaaaagttaaaagaaaaaagaccagccaggtatttagttccatttaagagagcacaggcgactgtatgcaagattctggaaaatttatgtacgttaaatttataagccagcacttttttcccaaagatttatttggtgtgaaaagttacttcctgtactgtaatcataaaatcaactgttatttactcctgtcataaccattcacatacttcctgccataaaaacttaaacctggctagaatattaaataaaacatgcaaaaaactacaagttcaggaagtgactgtatgtattatatacattaagttcatattccaatctaagagaaagctgaatcacccctacttaggaaaaccagtattatgttttatcatctggggtgactaatcccacaatggcccgtgcagtgaactttaagggtaagaagggctttctcttttgcactaagctcagtccatagttttgtgggggctgtcaggacgtctcgcaggtctgccgtgtgtagtgggctgaaatacactgtacatggcccagagttaaaactgtaaagatccaaagacttacttagggtagatgtgcacactttaaatgcatatgcaggtttttctttggtgcctgcctacttctaaaagaaaacaagcttctaaatgcttaggctttggcgtgtcgggtgggaaaatcagagccagtgtacacatccaatgatagaagaaagcgtgcgtgaacagatttgtttacaaaacagggcccagcaaagtctgtctctcagtgcctcggcaggatccatccaacaaaacaaacacacaaacacactgatctagggaactcgctcttccttctgatgaaggtgtaacagtttgtgattataactgggcagtaagttacaacataatcacctgacccaggtttgaattggagatacgccaacaaatccagtttaacacaagtgcgtgtgcgcacatgtgcaacacacacacacacggttatatgtagtacagtggtttcagctctccttctgtggcattaatctcaaatctgtatctttaatggtagctacctctcctacctatatctttaacatatttctatctggataaggcagtccctttaaattcatcatgaagcaaaaaaaccaacaccattctactgattttactttacttaactgtatagccatcccaccagggttgaaagtttggcctctggactcccttcttcactgagccgagctgagccattctgtcaccaagtctagtcaatacttactttcaatgtctgctgcctccatcctctccctcccactcccatttccagtcacccaggatgcacctttctctctgtccttggacaagtaagacagcctttgtaattggttcacttgccaaggagcaactgggtggtgaagaaacacagcaggcagtaggaaggttgggttctaggcctggctgtgccagaaccaaaccatgtgatgccaagaaagtacatcatatccttgggccttagtgttctcacctatgccatgaaaaaaatggctatcaaatggtattagctgatgcggggcatacagagtccccagctgtggtcttctaaaatgtagtaaaattcatgtcgctgcattcctcaaaacttttctgtgactttacaatgtctagaggatgcaaggttggttttgttactctacataaaagatcaagaatcttaggttctgtgaatagcacactcaaggttatagaactcagtgaagtgtcaggggtggcttccaaatctacatgtggttgattataaagcccactaaaccatactgagtactttaaacacaacataatatttggcagggggtggggattcattactcgagtaatcattatctgaatccctgtagttaccaagttgcataaggaagcaaaggtcatcatcatataaaaatattgacaaacacagtgatcacttattattagtcctcattaacatcagcatctattcttgctcactttcttggttgaataatgtcatagaataaaatgaaaatccaatgtagctcacttgtaaggtggaattgcagattttcacacagttgataaaaatgataccagcaaactgcatgaatcacatagggtcactgacaagatgaaagacagtttcaacagttaacaattgaagagaaagtcaacagaggtgattacatgagaggtagactcttcaagagaatggtttgtatatcaaaagattaagagaggcctttggggaaattcgaatgcttgtacaaaaatcatcttctttatatgattctgctttagaagtcaacattcaatctttcttctaagaaataacatgctgttgcatcatatcccaaatttctattatataaaac

SEQ ID NO: 49654 - DNA, 4402 bp, Homo sapiens
ctaggagaaaaacatccttttagggattttataatttaagtttaagcaattaaacatgtgcatcagtacccaactgcaggtgtttgaacaaatgaggggaaaacgctcagaggctgccaggcttaactcaccattatctaaaatgaattgtctgtgtaagtcatcacagcagtttgaaaagcatgatctttcatgtttcaacctcacatcaaaattctaaattatatttagctatgtgagtgtcagatcatttgtttccattatcaatgcgatgttgggcaatttgcagacaggatctgaaagcatcatccatgactttcatggaacagaaaagagctttctgttgccacagatttgccctaagttcagtcctctgcctttggagcactgacagctgtcaccaaacccaaaccccagtctgaacccatagtgctcaaggtactttgggaaagctaattcaggaaaaccacaggctggaggggttgtctttgaggtgtgtatgtgtgtgtgtgtgtatgcacatttgttggcagtgtgtggactgagcacaacatatagagaggcagtgttctcaggacttctgtgctcctatttggaaaaattcggcagaagaaacaacagctctgagacactcagcccctttcatcagctctttctttgcttaattaaatacacagttccccccaaagcactctttccctgaggtcatagtgtcagtcttgtttcatgagaataatctgctatgaatatttactcactttcaaaaacaaaagagggttaaaaatctgatccaaaatgtcacttacgacacctacaacagaatctacccctctgcctccaggctgtcctgacaacccatgtcctcaacaggaatctgcagtctgttctggaatctggtctttggactcaaatgatcttacctgggtagctaacaaagtcttctgtcttgttcctgctgttaaaaaatccaagtatgttcaggcattaaacaatggagaagataaagcaaaaataattttttaactacatctttctttttcaagtggtggttatgctcaagaggtgaaatttattgtggccctacccctgtttttataagagctttttatagtataagaactataattaagtttcctctgaactgttttattaaacttaagttttcaagaagagaatgataaaatttcttaaactactatgttttcaaggggaggacaatttatttttattgttctagcataaggaaagagagaatgagagggaaagtgttttttaacctgtatcctgattagaattttttaatgttcaaattcctgattataaactgcagtaaacaatcagtcattcattaacaagcaactattgaaaaggcgatatttaaaagagaaaaaataaaacatgtgattaaaactctacacacgtcttcacttcaaggcaaacgcagtggccatctgggtatttagaaggtgccaaatatcattgggatctagatttaattcatgttataaagaaagcactatatttaatttgttcacaaaagacctagaacctcgtagaaatgatggtgttgaagtgaacttttaacattaaaataaggtctttattttacaattttttaaatatgtgatcaatcacaaacatgaacaaactttcaatgctccagtgttctactctgaatgagaaaagttggaaagatcattttcagctttcaaaaatttttgctttaattttctctatttggaaatctttaaaaattagtcagtttaaaagtcctggctgcttttagtcagaagggcctaagaagagacaagacttttcccagggtatccaaagacagatccagagaatttaaagcctggacatattacctggactgaaggcattcgttgcttgctttactggtgaggactgggaagacctgacttccacagtcctctttccaagtggcaggaaacaggacatgcactatgccaagcagcttccagcacccatgcagcacccttccagcacctatgcagcagtatccatgctctgaagtgaagcctgaactcgccacctcgccactgagggctccccagcagggcagggatgggacccttcctggtatcacatgctcgctcgcctcctgagtcctgcatgaacaacagactggatccctgtttttagtctgaggacactcatgagatttttccaaaaattttcttcaggagcagacactattgtgaataccacataaacaagctctcccttttccaattcctcttttgaaaatggtagagaatcagcatatctggctctaacttaacttgtaaaaaaaataatagattttttaaaaagtttcagtttatcacactcaaccacagttatcttccaatgctacaatgtacacataaaaaattagttttcaaagactgccacttgtgcttgttaggaaaaacttgtatctatccatcctttctatgaaaaaactctataatgctaaacttccagagtgactctgtactagatagcttcacaaaactacaatctttgtgcttacaaagctacttctactaggtaacaacagaagcaccgtcatgaaccctagtttctgaataggtacataggattgacacatgccaggctttagttagactctcacggtgtttgtccctttacgtcacggcacatcataccctgcagctgcctttgtgtgcttatttgctgccagattcctctgctagtgtgtaagtgccatgaaggcaggattcatgcctacgctgttcttgtgtaagaactgctaatgccagggccgggtgtgggggctcacacctgtaatcccagcactttgggaggccgaggtgggcggatcacctgaggtcaggagtttgagaccagcctggccaacatcgtgaaaccccatctctactaaaaatacaaaaattagctaggtgtggtggcgggcgtctgtaatcccagctactcgggaggctgaggcaggagaatggcttgaacccgggaggtggaggttgcagtgagccgagattgggctactgtactccagcctgggcaacagagcgagattcggtctcaaaataaacaaaaacaaacaaacaaacaaactgctaatgccagaaagagaggaaggagaaggaaaggaagaaaaaaataaggtagaagggagaggaaagtgacagaaacaacagagaagaaaagggaagggaggagggaaagaaaagaggcagaaacagccactacactggttttagtaaataggagtgactttgcagtttcattagatttttcattcatacagttaaaggttccttgtagccatgatctcatcaaatctcacaataaccctgagtgaccttttaacattaaactaaaatgtttacttatggcagagattaggaatgactagtttctagatcttccacattttatctgtacatcactcatgacagcaggtagttctgagacggacctctaaagtgatctgtgtgttcatacaggtctgtgtttctgtaagtcaacagtttaagaattgtgaaaggccaggcgcagcagctcatgcctgtaagcctagcactttgggaggccaaggcggatggatcacttgaggccaggagttcgaccagcctgaccaacatggcgaaagcttgtctctacaaaaaatacaaaaattagccgggtgcggtgacccacgcctgtgatcctggctactcggaaggctgaggcatgagaatcacttgaacctgggaggtggagactgcagtgagccgagatcgtgccactgtactccagcctgggtgacagagtaagaccctgtctcaaaaaaaaaaaaaaaaaaaaattgtgataaatgcccagcatttccttcatttttattcactcaacatgtcttataaccacaaagcccagatttgaaccttgtatatactcatggaaaggagaaccagttctcaagcaactcttctcatttttaccaaccacataaacatgtagcttccggtaaaacaatacttctcattttacaagttcattaatcaataatgagcaggctcagtgggggcacaggacaacctgagcctgacagcgaggaaggcggattttgtcacggagggagggttctcatgaaactctggatctcccagctagttggggggcactaacaagggctgcccagagagcacgcaaggtctctccaatcatgccacaaaccccgcaatgtcaggacaaaggcaccggtgttgacagagaccttggagttcatcagagaggtgacatcacctgcctaggtctctacttccctgctcttttccccagcaaaaccaaccacactttgcattccccatcattattaatcctccaaacaagcaacccgtccacataggaacaaggaacctgaggtgaagtgagc

SEQ ID NO: 49655 - DNA, 664 bp, Homo sapiens
tttacagatcagaacaaatgtatttatgaagaatctttttttttttttttctattttgcagactttcttttttaaaagcaaaataaattgacatgacttgttcagggttaactgtttggcaggtggatgatctgtggccatccatgatgagatcacctccctgccccgctggcccccagcctctagaagtcagggcttctgaggcccagaagctcagcgccacacctgttgaaggccagtgatgtcagagttactcttccttcctccagcagcactgacagcagtttattgtacgcaatttctagaactcagatgttctagaaggaagcaaacatattctgagatcacagactatgactatgctctcagaatatgttctagaacacctaagttgcaattcttaaaatcaacacagcgtaagactgctttaggaggaagtgatcaagctcaaagcaacctaggcatgatgtgccttgtttgtttatctgtttgaacaggaataaaacgaaaagaggcctgtgtatttctcgtatttttatataagagctggagctatttgaacggctaaggagaagaagatagtttgatttagatttggcatgggtttaggggaagaaacgtctctgtagctggtcctaaatattatggtaacttggactgaatc

SEQ ID NO: 49656 - DNA, 5775 bp, Homo sapiens
tattgttatgggtttaagaaataccacacttctgtgtcacaaagagagttctaaaaaccagtatgttctgagaagtccatacctgctacttgggaactaaacaaggcttgtaacaactgaatctctttagaagactgttaacaccttgcttaagtgtgtaaaaattgaaaataaacataactgaagatttgagaatttttcagttataacacagttcttatgaaagatggaaaatatttcatattctcttatatatttataaaaacagcagatatttcttctatttacagaggtggaaacgaaggcaagcaaatgcagtcattttgttggaggactattctacatttccaaagcaatgaagacatgaccccaaactaaactctcctgcaacgtattcttacaagaaaaaggctaaaagccttattgcttaacaaaagctaaacaatgtgaattatttcaataactggtccaaaaagctgcagcaggccactgagtaacttggacatctgttgccatgcttgttcatgctttcccctgagatgacatatatgtatcatcattaataggtgtccttgattttgataagaacaatattcctgtacatccccacatctcctgtacatagccatgtgctgccatcttctgattatgcccagtggagtgtaaacattttttcatgaaaaagcaaaatcaataaaagtaaaactccccacttttcctgccagtagtgcccttggtaacaaacagggcagagacaccaatacagagattacaatactctcagacataattcaagcagaactttaaatggatcagtgcatgttataaactttcttttttttgcaagtgccaagcgtgcttatgctactattcattctgagatagacagatcatcaatgaccttctgggtcactgactagggagaaagctgactataaaaaagagtgggagaaaaataaagtgggggttgcttccttccaccctagaccccctactgccttgaatgaaagaagacagatggcagccacctttccctttaattaggaggggcagcttagaagggacagtcctgctcacttggcactatctttaacaagactgtttagatggcaatgctctgctcattcgcccttctttcaaactgttcttaatttttcacttacaaactgaatttccgtaaatttaatggtgaaacaattacagctctgactacaacgctatacataaatgacacacttaaagatgtttgctgaattaaaaattcacagatattcctataaagaggctggaatgtttcaaatgaaatacagctacctccagtcctatcagcaccactttgagataaaatatgaattcccaggacacagaagctctaacttaaattcacaacattccatactagacatagaagtaacacccctggtttctgctttccagttccacactccagtcgtgctcccaccttttaccttcaaggtattgctgttcaagttgacaaaaaaaaaaaaaaaaaaaaaaaaaaaaaattctacagtaaaaatcagtcctaaatgtagaagggaagatcatttaataacaaatcacaaaccactcttcatctctatttgctctgcattttcagaaaccatagaactttatattacaagttaatcaatccacatcacatctctggagagaggatcagcataaaaaaacaaacaaaatggaaaacaggagccatgtgtcagaattaggctagtgtcacaggatcttctatggaggtgacgaagcctcttcattattttctagaggcaattaagcacattttccataaatctacatggcacaaaactttctaacatgaaagtaaagtttagttgctgttgacagggttaggtctctatacattgtatctcatttttatattaaatttgtttttatcaacatcattaaataattgatattctcgcagctcttttccatttcctgatgcgtttttaaattgcagcctcttgtctgtgacaccttcccacctagtttctgcacaattcctgcacaaggaccctctgcgttaacatcggtcctggggaaacccactgtgcctgcttccaaatggaaatcagggcggcgaactggggctgttttgctagaggtgctcctggtcataccatgcaaaacgccttgtctgtgtcatagtcatttacctaatggcaaagttcttggaccatttagaaacaaaacaaaacactttttgttttctccttgataataaatttcaatctcttcctatctctaaacagcaagccggcacactagatatgggaagagggaaaagataaaagaagcaatcagctattgaataaactatatcctacttcccaatgaaggggaaaaaacttggcatttgccggatattgagtgtctaataacattagcaagaaaaaacacgcaggagagactaacaaagaaacaaacagaacttactttgtttcccagcacagtaagcaggtcggcaatgagatgacggcgattccttcctcaaggtccctgctttcactttaaaagctgtgtgagtgcttacatccaggtttgccgtggaactccaaatgtctgtgcttctaaagatgccccaagttcccagttcatgtcagacactgaagacacacttgtgaggatcgggaagccccgcggtagccccagtcgacctctgggtgccacgtggcacctccactgttgtgactacacacacaagcccgggacacccacttgttagctcaggaaccaggcggccagcagatatctgctcagatgaacgtccagagactcaatcctctggcattctcaggttcaaggttggaaaacgcattaagacgagagccacacagtcagcagaatctgcgccattagctttctcgtacttaaacgtctgtctaaataagagtcaaaggcacaaaatgagaaggaatatcttactagggattgtgacttgcacttgccatattttgaaagtactggttcctatcttgctctctcaaactgcatttaagaaaccctacatcagaagttattttcatttcttctgtgaaaaacagaaaatcaataaaagactggaaaaacatatgaaatataattctgcttaaaaacataaccattatttaatctcaacgggccaatttattttaatccaaagagaagaagaaaaaaaacacatgtataaatttaaagtttgttttgaaaaattacttcatccatgtactgtccagctcataaaaacaaaacttcttccagcgaaacgggacactttgaccttgtttactgcagtgtttggaaaccgctgtctcgtaactcctgacatcaccggtggtgcattagcacctggactgctgttggctgcacatgctgataccccaactctcttgaatcacccgtggctgaacaaatactcacagaacagtaaggatagtggcattagcattaaacccacaaaactcacaagaccttttagaagtgtcacatctctctgttcacttatacaagaaaacaaaagcattgtatatctgatactttttaagtcccggcatccagactgagtacagacaattctttcttctgaccctctccctgcccaagaaacgggattcctttctcaccaaccgccatattggcaagaatttctgccacagagttttactattaatactagaagttccaacctactttccaccaataaaaagttcccacaaatcttcctaggggagaatttatttaagtatattttagagtttcaaagagcactgcattcttaagtttcacaaaatcaaatttatttgttttcttttatggaacatgcttttggtggtgtgcctgcctgttgcatttctaaagaaacaattttctcctgtaagcctgacacatttccctttctgcattccccagttctttttctaaatacaccaaaatcaaagcaacggatagttgcaaccactggaagcaagccacaattcaatttgtgcaaatatctccccagattcacttcttaaataaaactaaatcctggtcctacaatgatagtggaattttacagagaaattaaaaacccaagtttaatgtgtctgaaatcaactgataaccttttactgaaaccacttaaaaacatcacgtccttaaactatagtcaccaaaaaatatagaacacaaaatacatatttgagcaattatagcccttgtttgtcaaagaggagtaaaaagaaaaacatccagagttaatacaattaattaactctagctaaagaactactaaaaagaccctccaaatgccatgctgttactacgacaacttcaaaattgcttgagaaaatgtgctggattgtcagattcgtgataaaacaagtgtcatcctgcctgctaggaattactttcatttatatcaggcagcagaaaggctaaatggccacttgcaattctgaaatattaggttgttaccttttgatagatgctgtactcttcattcagatcatgagaagagttaaaaaataaatgaatctctctcaatcatcggaacccttttggtttcattcctgcaacgataccactcccaccgtctatctagttggtacattattttgtataaggaaagcagcaaagtctgattcaatctgaaagggaagggccaagaaaaacccctaacagtatctcgtttccaaatacaaataggtgagcagacactcactctgatatttaagggttaataatgacacagaaaaagaaaacggcattttctcccttaaaattcctgctcctaggtattcaggctgatttacattttacgtaatctgatggctcaatcaggaagtgagaattttaagtgcgtgagttatggacgggaggaagcatgtgacccatacatagcaaagaaaattatgcagcagatgagcacgctaagaaaaataaactaagcagtttaaaaatagtgttttgaggatatatcgacccatgaatatactatggcttttgagaactaataattcatttggacgccttaaaaataaatccccaggactgttttaaaaaatattacaagatccaaggaatccacggtgagaaattaaagtttaattatccaagaaactgtttccctcaagtgcatatccattcatggtttatgttaaaggctatttttcatcattatttaaagatcaggcaatacgtaatataatcaaacaaaacacagattgcagtgatgtttacttaagctttatttatatatatagtgcgtaggttcctggagcacaaagaagaaagttgctcagatttatccagacctcacataagtttatagatttcaagtagccactgtattttattacagaaaatacattcttcaagaggaaaatgttaaggccatagaagctttcaccttagctatctaagcttgtattaggtcatcattaaatagtatctgtatcattcttatgtgttccgtaagttatgccacaaataccagaccaagtacactcagtctagaaacaaaaaagtgggaaataaaggttaaaacattctaataggtgtaatgggctgatagatgactttatattacaaagctacttaagacaattctacttttctagaatacaacgcattaatataaacatttgaaattcagaagatttggcctgtggatgctttgtttctcaatgcaattcttgttaatatgttagtaagtaataatttattaataccaataataaaaaattaacatggttgagagcaggtgtatctcatagcctttatcaattt

SEQ ID NO: 49657 - DNA, 709 bp, Homo sapiens
agtgccattgtgtgtaatacttttctacaccttacaaattttctgtgattgtcatatattgttttcataataagaaacagataacagtttcacaattagaggactaatacatcaagaagctactattatcaacagttaaatttcaaaatacagagtatcgatagctacaaaaatttgccctatgaccaagagattttttttaatttaggaaccactggtataccttcagaaaacagtaggaattggtgtgtgtgtaggaggtgataatgaatcatatttttttttttagctgtcaaactgttttctccaggcagcagttctgtgaggtccaactgaagtatgagaaccttgatagtagggacattaccagaaaaatggcccaaaggtcgatggggggaggaacagtaaatgatcaaaagagtaaggcaagagtccatgaaaacagaagcgtcaatagagaaggatcaataacttatttgatccaaaggaactgaaagcaggaactaaaacaggtatttgtacacccacgtccctaacagcattattcacaacagccaaaacatgagagcaacctgtgtccatcaacccgtgtccatcacatggatatataaaatgtggcatatctacatggcggaatattattcagccttaaaaagcaaagaaatcatgtcaatgctacaatgttgttgtaatcctacaacattagacg

SEQ ID NO: 49658 - DNA, 744 bp, Homo sapiens
acttaactaggacaacaggattcaatgtttaccaggctaacaagaaaaatgccgaacaagccaggaaccaataactaagtgtcaaacagacctgcaaggcccaatgtggcttgcttcacaggaagaggcacacaagcacctcttagaacccctgcattgaaacactcccacaaattcccccaggatgcagacgggagatgccctgcagtcactcctggcctccagaactgggaggggctcaagctctggcccagtgcgaaggcaagaggcctctattcctggctacgagaatcaatagaaactcatggacttctagagagccttgccaaagatctcgaaactcaggaaccacgtagggagccctactgttcaccactgtatgttgccctctgggcttggcagaaatgtacctaagtgcaataccaaggggcaaataagaagccaaactgtggaaaatgaacaggggagcagcggcagttcttggagttggggaaaagagagaaaacgtgttttttaacatgaaaatgtttgtctagaattgagaatgcaaagaaatgcccagaaagcactggcgagctgcaggagaagggtgacaacacagtctgtagcgagaacagagagttcgcagagcctgggcgtgtgcctgcttccattcccgcccacccacagtttctggggcaaacaaattcttggctgagcaggtatgtgtgggaggcctgatttattttccaaccattagagctt

SEQ ID NO: 49659 - DNA, 1140 bp, Homo sapiens
cctcaggcatgtttaagttgtatatgtagagaatggtctttttaaagattatattttaaaatgcatatgcagcagagctaatatacctaatgaagaaggtaataaatggcttaagaaggaagtgatgtctatgtaatttccccctaaaattatactctcccaataggtaacgtgccctaggacatcaccttttctcccaacagtctcctatccaagtcctctgtgtactcaaagtcctccccaaatgccttcttttccaggaaatgttccctggctttctggccagaagaggtcactccccagtttgtactcaaaggtactttgttctttcttcttgtacacaattcattttctgaactgtagttatttttctcatgtgcactaccaacttgtccctaacttcttccctgtattccacagggaaccacacattcttcccaatgtaaaccaagcatctagtaaaaatcaggctgttttttaaaagactcctgtggaagtgctccaaggataccacaaacatctgtttctgatgttcaaatatgttttggatattttttaagctttaatttaagaaaacaacctgaaatggtttatatgcaaacttttcacgcactgcagatctctgcccatgaatgagatgtgtgccaataaacccggccaggccgggcaacctcgcagccctcacaggaggctgctctgcccgctctgtgcttgctcacatgtgaacttctcctaagtgtgacattggtgagggaagctgtagccccagctcggccctgtgagaaatacctgcctgcagcgtctgctctcctaaagttgttcaagcaagcacatgaatacaaaaccacaccctagcgtgggcttcgattaaatgccaggcaaggctcagggccatctgtacggccttgctttcatggcaccataaagtcctttgtgataatatcccacttgagagagagtaaatatttattctaagaattagatgtttcctgtatgactagatttatgataaggaatgtgagcaactgtttcctaagttcagttacagggtttctcttacagctttgaaacaaatactccctaccttccacgagctgaactaaaatgtatcctgggatcctaaggcaaggtatttaaacc

SEQ ID NO: 49660 - DNA, 1037 bp, Homo sapiens
gaaacaaaaaaaaagcttttctgataagtattattgactgaaatacagttaacatgtttgtcactttcaaaaagccacaaatgaatttctctgaaaaacccaacgtctttataaaaaaaaaaaaaaaaaattccacaaaattggggctctgccaaaacgtgaatgttgcaaaaccatgtgtcacatgccctccttcagtttcatgttaatcactacagcaaggattaaacttttggagactggaattcagaaaggtcagacagggattcaaatgctgtcctagctggctgggaagtactgaggcaagttacttaatttttctttaatcccagtcccgtaagccattaaaggaaaacagaaatacccagctcacaggatggttaagttttaagtaacatcaagctgaacttgcctagcagattggaacctacattaattagaattaggtttggctcagggtggcaggagacccaaaatatcagtggcttaaacaagagaagtttccttctcagggaagtgcccaggaaggttagcatggcagtccacccatgtgtgacctcaacctcacggttcaagatggtggcttccacattccagacagaacgggaaagggacggagaagaaacggcaaagcaggaagacacactgtcccttaaggaaggttcctggaagggcccacgtggtaactcacctcccactgaccagaatttagtcacatgaccatatagctgccacggccccagctatgaagtaggtctcaggttgctatataaagcaggagtatggacactgggggccaaccagcaggctctgccacaaaacccagtaatggctcatctcctatctccagtggcttcagcttccaggaggagtaacattcagcctgtaggcactggtacagcatgccagttatttgagctggcatccgccctgaatgactggattcccatgctgtcctagtagttaaatattttgcaaattacccttgcctttgggaagctctgccttaaatttccacaacaaacaagatttcctta

SEQ ID NO: 49661 - DNA, 820 bp, Homo sapiens
gggaccaaaggtatgagccactgcaccaggcctcaactcctttctttactacagtccccaaaaaccagaggcctggattcagtgcctctaaaactcctttctgctagtttggctccagcgctcagcacatgcacttcccaagtcgttgttttctttgatctccttagactctctgcctcctagagaatctaatccacatgaactgcgctcctggatcttttacataactgtggtttttcacaaggttctttaaacaaaggtccacgtgatagatttctgctcaagcttagttccaggaaacgtttggtttctgcagatgtttacatgcttccggctgtcagcacatgaaaacaatataattctgtttcttttcctcactttagcaactggagagcataaaatcaaatatattgttcaaatctgttcaacactggtatatggaaatacttaatccttaaacttttttttaggtgaggttggttttattttttattattttgccttttggcctaaatgtggtaagtggtttcagaaacatgaaaagctataaaatgtaaaatatacaagacaagaacaaaatagaaaaaaggctgggtacactggctcagtgcttgtaatcccagcactttgagaggctgaggcaggaggactgcttgagcccaggagttcaagaccagcctgggcaacagagtgagaccctgtttctttaaaaaaaaaaaaaaaaaaaaaaaaaattagctaggtgtggtaatgtgtgcctatagtcctagctaaccgggaggctgaggctggaggtactgtgagctgtgattacatcact

SEQ ID NO: 49662 - DNA, 390 bp, Homo sapiens
aaataaaacaaaataatataaaataaaatcacaagggtggtgcacagacatgctggcttagaaactttgtgccccaagcagaaaccaaatatcatataacggtgctagtcacggcgtccaaggttcccacaaaggacatacccatttctgaaaagtcagtacttctggggaagctacagcttctaatcaggaatttagagttcacttacagttcctcccagtccagatatgtttaccaaacagaggtcactttcaccacaacaatgttgcctggtaacatggtgaacatttcccttttaccaggggttcaggagaactgagtagagagttaatctaaggtcagatttgtccttaaaaaaatgaaaaatggtttgttaactcttttttttt

SEQ ID NO: 49663 - DNA, 1480 bp, Homo sapiens
ttatttctatgctcaccaacaaaattctgatccaagttttatcctttcaataagtctacagctggctacagcacatcttccactgccaactaatacactggagaattgaatctcatgtaagcttgcttggcttggatagctttactcagtctcacaatctccatccaccctaaatgaattgataaaatcaaatttcttcacctgcaaagtcacacctgggaatcctgatcaaacggtgcggagttcctctcttcctgaagtcctgcctgacaggaatgtaaccgtcactgctggaatgttaactttccagaagcatctatcaagggaagaccatctgtctccattaaccacaagatgcctactaaacccggggagcaattcaacactcactaattaacaaacactggccttcaagagaagaggctctaagtaccaatcgataatttcgtgttaatcattaacaaaatagaaaataaactgtggctgagttaactccaaaattaattttaacctttcatgtaacatctcaaaacactgagaaaaagtaattttaaagggtagctatcacagaagttcatcatataattatataaaaattatcacacaaaataatcaaactgctatcaaatagacataacttactaataacagatttctagcatttactcaataaggctttactttaaccttcacataatcttcagtaaaatctaagaacctgtcttttaaaaaataattattaggcattagaaacattatgattttttaattgaacaaataggcagacattatttctaaatgttcattttctctcagcagcttttttaacacaccatcttttgtcctcaaaaatagtatgaataggccaagcatgttggctcactcctataatcccagcactttgggaggccaaggcaggcagataacatttgaggtcaagagtttgagaccagcctggccaaccttgcaaagccctgtctctactattacaaaaataaaaaaaattagctgggcgaggtggtgcacgcctgtaatcccagctactctggaggctgaggcacgagaatcacttgaatctggaaggcggaggctgcagtgagccaagattgcgccactgcactccagcctgggcaacagagcaagaccctgtctcaaaaaaaaaaaaaaaaaatagtattaatacatcaacaaggcaaagtccaaatcccagtcatacttctgggatttggacataatgtacagaagtacattctgtacttctactacaccttcctttgtgctctcccttgtgaaattcccatacttcctggatatcagattcccatcaagccccccctactctccccactagcagctcctgaaaaactaccttcttacaccatgagtatctcagtccattaagtggcacaaatagcaaatttccctttgtcacggactgaaggcttgtgtctccccagaattcatatgctgaaaccctact

SEQ ID NO: 49664 - DNA, 6490 bp, Homo sapiens
tactattttgtccctaaatagatgtgatttcacaagtagctattccatcaagctggttacttctataaattctcactgcaccaaaatcacttatggggaagagggggttaaaaatacactgtccaggccctatgtggatgtgggtccaattggtctgggattgggctggcgttagaatccttcttaaagcactccagttggttattacacgcagccggccttcaggagcacacagaagtgtctacccgtccaccgggatgtacacaccacctgtaaggtccgagttctgagccgagcagcgcaggcaggtcctctctcctggactaggctccccgaagcgctgcgacgacaaacctagcactgctcgccgagaagcgccaagcccctcagccagcgccggggcacccgcgcggcagggctccatcgggggccacacgccccctcgcgcgccctccgcgggcgcaggcccctccggcccgtgtcaccgcgccctcgcctcccgcgccccggccccctcccgcccacggcacgtgactcgacacgcgccagctgcacgcgggctccatcaaaacaaaaacagaggaggccggccgggcggcggcgggcgcgcgcgggggcggcagagagcgggcgcgcccccgctgcccggcgccgcgaccgcgcctccaccgccccgggcaccgccggccgcgcgccccggcaggccgggggcgggagggcagagggcaccaccctgtttaccgccacggccccgccccgccagcgcccgctcccggaaacggtctcccgggagagggccggcgagtgcgcacccacccgcggcggggaacgccggccctgcgtgggaggcgcccggctccggcggcccgccgcccccggctgctgcgtgtcacccccgtcacgactctgctacgcacttcgcccccagctttcagctccggcgcttccgcagacccctcacgtggctgccgcctccctgccatggcactccccggcgaccggggctgcggcccctagcgctgcgagggatcccgagcctgtgcccaccccaccttggacgtcaccctcctcggaccacccaacccacaccttccgcctagggcggggcgaggggaggacggctacgagctgtcaggagcctccagctttccccgtgacgaagctcaccctcgccctgatgtcgccactcacccagcagcgggctgcgagctggagcagacgttaacaccgagggaggactgaagggaacgtcttgatttttctccttaatttgccacagacacagggaaaaaaaaaaaaaaacaaaaacagcagacgcagctctacctttgcgctggctttaaagcttttaagctccccacgtcatcctaccccatgcaacagacttaccgaatagcaatgcccaccccacacacctgctaggtaactcgccttctggaaatcgggggccccacccaccccgccttctggaaacctgcgcctggggtggggttgaagagacactgtctggtatcctaaagtcagagggcgtgaggagaccggcgcccttcgccccacccaggcgcgctgcaccctccggtccccgtctctagagtgcaccaaggcatcctgcgtccctgccggagaaaagagggacggggccagaggcccgagttccagggagttgctgattccagtggagaaccgagacaccgcgtcctttctaattaataagcacgccaccccctacctccaacccccccccccgccccgcctttatttcttgttgacagcaaaggtgggggacgtgggagaaaggcaagagttgtctctaggttcgggatgttgggctgcgcggagggaagaggtgggatctcgaaatggaaacagtccccccttcctcccccctcccctcctcctcctcctcctcctcttcttctgtttacctcaagtttgaattttatctgcgcaacattagctggaatgcggacattgaaaaaaaaaaaaaaacactctctcagcccggcagcagctccggaggagccatgtggcatcaagccacagcaaaggggaaaaagtgctcttagcaacacaaacatggcgaaatcgctctcacaagccgggttcccgcgacagccctaccttcccccgctcgccttccgaacgtcctggccaggaaccgcagaccccttccgggggacggcgagggggccccgggctgagcgagggtgggcgcacggggcgtgctaaggggaaattgactagccagccgatcagctccgccggcagcggaggggacgccttcttcacgccctgagatcgcaaaggagagcaaaattcccatcccaaagtcctgcgggaccggcttccccacccgacgaacttaccccagggctgaacgcacgctgctttagctccttgcctcgttccttcctcccgggcgcgacgcgaggtgaaaatgatgcgcacgtagatttgtagagcgtattcttgagaatttccctgggatgaatcgggaggagcggtggagactccggagacaggtgccgcgctggtctgggctgccggctaaaagttgtcctccgcgcggtgggcggtggggtccccggccagggccaaggaccccggctccctgccccccggcgtcgcccacttgtcacgccaggctgctgcgtgcactcggctgcaggggaggtggcgtagtttctcttcctcccacctcttctcactcacttgtttttgtagccgtgggctcccctaatgctttcctctccacaatgttgtttcattatatcatgtccatcatgtgacaccagagaggcctctctatggaaacttaaaggggctcccacgtgactgcagcagcaacaacagcagcaggactggcggcggcggccgcagcggcgtccgtacctccacccaccgggagcccctcgaagcatcccggaggggcttctggcgctgcaggagccccgatcggggagccacagcatccgggagccgtggtgtctgtgcgtgcgtggagcctgtgctcatgacataggaagccgaacagaaggagcgtcctcaaatcctttcctacagtcaccaaacccacgctctgttaaaatgacatttcgtggctcctactttgtttccccggagagcaatgagttttctatcaggcctgatttagtttgacaaaagtcaaaaagaaaaactggatttgtccctctgcgagttcagtcagatcgctgggaaaacagaaatgacaaaacaataataacagaaatagaaccaggcatttgatacataattaccatcaccacggctttcaagctttctggaattacgttcctccagtaactgttgatgatgcttgcaggaggcaaaatgcaatgcagtttttctcttccgcagctatattagggctttgttgctgacaacagtgaaaacttgtttgtgtcaggaagtgaggtacggagatatgacctggaaggtacagacaaaaccaaagtggcagtttttgcattacttttctgaccacattctttcaaatggtgacaagaaggcggtctgctgtaaaattcgtggggtgtttgatgggaaacaaaataatcagaaaaacataattatccctagccataccatacttgctagacgctagaaagtatacatatatgtaatctctgtatacatagagaaagcaaaaagcatgtgcactttaatatttttgaaccactaattttgtcatcatttgtaccattaacaaacacttggaaagactcactcaagtccagggatgtgtggaaactcacaatgttgagtgctgtgggtattactgactcacagtcccttaaagggtttgtaccataaatcccaaatttctgccttaaagtttttacagacatggagattttatcctgtaaatctaagccagatagctatttctgggttttttagttcatgcttttccattttataaaggaaactgtgtggattggcggaatcaagaaaaacttcgcaagaaactgaagagtgggatggaagatcttttcgtttggccttgccttgactctgtctctctccacctcatcagtttacttcatcagccatgatgaatgagctccattccaacccttctaattctataatatctctcccaagttttaccttcctatctcatgcctaattcttttcatccctttcctcctacctcccttgcctcccaactcagccccttttctgcctgggggctcagctcgggcctccccaaagactgtaccccccaccctcccctgcagctacccccacccccacgcccttcccagctcggcctctcttctttgcaactctacctccttacctcttttgacctctaatcaccttcacagtctggcccttgacttctgggcctcttcttacctctctttacctgaaatgtcctggccctcactggggtctcctccacacccttctctctggtcccatcccttctgctgccaagccccagcgttcctccggctcggcctggtcagcttgagcctcattttgttcgcgtgcccctgggctgggaaaggagtgtgtggtgcacagtggggccaaggatcccctggggccgcggcctctgcctcgccccctccacccctcccgagtcccggttgcggcgcttcctgggcggatggcttgaaattgctgcagcagctgcggttctgctgtgtcatgcaagaaggaggcggcggcggcggcggcggcggccggagctggagggggaggaggggaggaacctgatcctccggtagcgaagggctagaggcaaacaccgagctcctccagagccgcccgggagcagggagggctccgctagcccggggggccctccccgcggggcagatggtaagtggggcggtgcaggtggtcgccttgggaagggagcgcgcaggggggtaaggtggggcggcgggaagtgctagaagtcaccccagccaaactgaaggagcccagtttccagctgagagggacccaggccgtaataaggatgtccagccaaacgcagcaataattactattggagtgacgccccgaagttgaccccaagctacacagagggtggagtggtgcatcctgaacccaggacagagctggaggcaatgattcagggtttgagaagtatcagcccatcggcctggcgctttaaggtgcagctgagtaggaaaagccaacccacatcatattcccagagccttgctgcgctttctgggttgtcttgttcaaaactagtgaaagggatgggaaacctgcccaacctcactttagccacgaaaataatgctcttggccagtggccttggacaaacagcctctggtgcaacaaaacaatcaataggaagaagaacttcattcccctcaccatcctccttccccaagttcctttgaccagcatacctcattcggcttaaaggagaaagaaaactatgtgtgacattccctcccagcctacctgcagccagcctcctcaccacacaaactgcccatcccgcttctctcctcatcttcagagccatgattccaagagacattgcaatactactcactttaggtgagaagactgcctgaaactctgaacaatttcacctcccttgccctttgccacaggggattcagaaacctacaactgagagcagggaaatatacggacaggcttggcacgtaggaacattacttccttcactggagtgtagttctccagacaactttttaattatgattattcccttccattgcactcctggaaatttcaaagcactttctaaaacatcattttttttatgtcagtcatacatttagaggtaaggggttgatgggattaactgaaaggctaatgactgtctcaaaagcacatgctgttgctagggaacccaagctcctgctgctctctaatcaccagcgtgttccgtggaaatcaaactgctcagggtgttattaaaatgaatggcatcgggttaaaggcattcttgcttatgttgtagcatcctggattattatcgattgcctcacacccacatatcttgttttcctaatttgatttctgtatttgcgtcactgccagggacactcagactagaccagtcagttcacttcctgtttctcagaactggtttatatttggtctcgtagcactagctggtaaaacattatcaaactgatcctcttggaaagaaatctttgcttcccattgaaaacaaaatattccaattaaattgtaattcctgtggaaaacgtcatcatttgaggagtagactgccagttgccatttgagaaacaatccttgaaatgtaaagcctagaaaaaaaaaacatcatcttgatttcttttacccagaatcttcattcctcagcactagaactaagacaaactcgagtaaagagtagatttaagtatacttctaaaatgaaacgcataaataaataaataaataaataaataaatacatgtcgaagctggggaaatcatttagactaaacaaggcataa

SEQ ID NO: 49665 - DNA, 1033 bp, Homo sapiens
aattttatttgcattttacatatattatacttgtatataacatgtatcacgggtataatttactttttaaacttcaaataccgaagaggatgcccagtttagaacagtagctccttgggctatttttccaagttgggaaggcagggggaggattggaataattgcaaattaagctttgccacagggcctcgttcccaaatgtttaaaccctctcatattattaggggctaaaaatgttgctaagagcttttaaacagaaaaatagacttacttgctttgtttttgtttttgttttttcttgagacagggtctcactctgtcactgaggctggagtgcagtggcaagatctaagctcactgcaacctctgctccttgggctcaagcaaccctcccaactcagcttcctgagtagctgggactacaggcacacaccaccatgcctagctaatttttgtatcttttttggtagagatgtggtctcactatgttagccaggctggtctcaaaaccttgatctcaagcaatctgcctgccttggcctcccaaagtactaggattacaggtgtgtgctgccacacccggccacttatttgttttttatttcttcccccagactacaactttatagcttaccaagaaacatggcaactggactcctataagattaatgcaagccaaaaatcaagccctaagaagctaaaacgtttctagacatatatgtgccattttttttgttgtttgtttctattttattttttattcaggatcagatttttagtgccccttcattaggttcactttggcttaaatagctacatggaaaatacattccagcatttgttttttgtttagtcactcttccataaaattccttagcggtttcaaatgtcattcagatgagatgacaatgaatcatagaaggaagacagagagagaatggtattgggaaagggatagggagctgggaatcagatgacctgaattctagttctgttgcaagaacaaattggcaacaaggccctggagaattca

SEQ ID NO: 49666 - DNA, 1707 bp, Homo sapiens
gactgtagtgtaggtgaagatgtttttgcatagtaacgtattgctctagagcagaggtcagcaaactatggcctgagggccaaatctgatccaccgcctgtttctgtaattaagttttactggaatacagccatgctcatttgtatacaggttgtctatggctgctttagtgctataacagcagagttaggtagttatgacagagactatacagcctgcaaagcttaaaatatttactggctggccctttacagaaagtgtttgccaatcctaggccaggtgcggtgactcatgcctgtaacctcagcactttgggacgctgagatggaaggatcacttgagtccaggatttcgagaccagagtccaggagtttgaggccactctgactgacatggcgaaaccccgtctctactaaaggtacacacaaaaaaactagccaggcatggtggcgcatgcctgtagtcccagctacttgggaggctgaggcaggaaaattgcttgaacccaggaggtggaggttgcagtgagctgagattgtgccactgtaccccagcctgggtgacagagtgagactctgtctcaaaaaaaagaaaaagaaagtgagtgtttgccagtcctcactctagattcttctcttctaatctgataaataacaaccacctaaatatttaaaacaaggtattgggttggttcagagtcaatgtggtaaacaataggttatcgaattttaaaaattcaccattaaggagagagaagattgcacatacgttacccataaagtgtgtgataaacatgaataaataaataaacatagtttctacgattggcttttgaatttggctctgagcttcctagccatggggggcgttggggggaagaagataattgatcacctgtattagttacctgttacttcataacaaaccatcttaaaattgcatggcatataacagctaccatttactatttctcgagtctgtgaattggctgagaggttctgctgatctgggctgggcccagctgaccacagtgggcttgctcacacatttgtgatcagctggtatgttcgcttggagctggctggtctaaaatggcttcagctggagtggctcatcttgactccacaggatgtctcatcctccagccggctagcctggacttgttcgcatagccctggcaggtttcagaggagagccgaagcacacacttgaggcttaggcttggaactggaacaccattatttcaattacattctagtggccaaagccagccaaaaggcaggcccagactcaaggaatgtagaaacagactccagctcttgatgggaggagctgcaaagtcacattgcaaggggcagggaaacaggagggacagaattgaggccatgtttgaaatcacaaacaatcaatcatcatctaaaacagcgtgtattccaaccacaaaattttaaaagtcatctctgtggtctaaagcggaaagaacgagtcatcatacatcagtctattcagccccacccacagatatgaatcatcagtgtcttcagctaagaggaccactatcttctagctaatgacaaatacagaggaggggtggaaagaagtctgttggaaatgtgtacatatcacatgagacccagacccatattcaaataccacttgatgaatttcaccagggaatcagactcagttttaatgggttaaagggat

SEQ ID NO: 49667 - DNA, 1119 bp, Homo sapiens
ttgatggtccaacaatgtgaacacacttaacacaaatgcacagtagacttaaaagtggttaagatggcaaattttatattttgggtattttttaccacaattttaaaaatgttaaaaaaaaaaatagtgttagcatccagagggcagaggcatttctaacatcttgcagaatgcctgatataatagtaggcacttgataaatattttgcctccccttggtttctgtgccccatcctgtgtcctacacaacaggacaaaggccaagtcgttctgtgagccaattcagcaaacaaaggcacttctctctccaaggcacagagaagaatttcgaatatttgtgatttgaaatttgtcctggtcacaccaactattctttacttctcagatatgcttatctgagttcttttggcatttaacttgtctaaagatagatactgtttctacttcccaaaacagaattgtgatggactttgtaaggaaaaaaaaaaagtgggaggaagtctgtgaaatgaaatcattattaggccatggtacaaatggctgtcgggccctgggttcagcccagcacaggaggaagggtgaggtaattagcatggatttgcaattctgcagctcgcttttgttccctccctccactggctgtgtctgattctagtcactgggtttattctcttgtgtttgtttttttcacttggccaaaaatagagagacaaaaaaagtttcctcatacttacttcagctttttacttttttccttgtgtgtttggtttcctcttacgtgatccttccttcttcctgccacctgctagtttctctatggtggggctcagaaaccaacatcccacaatatggcgcactgacatgccgcactgaggaatcctcaaggtctctctgaccttccgaccttcccccctcacctccaatctctaccaaagaaattgaagttcctttatctgcctgagatcagtcttaccaaggagaacaattgttttctttccctctttggaagaccaagaatgtaaccacacatgaacagaccctttcacaagatagtgcctgtctttccactcatttattattccaatgaaaactatttacaagttaatttctagtccccat

SEQ ID NO: 49668 - DNA, 1654 bp, Homo sapiens
acaaacactcagtccatagcagctggagtcccagccacctcatatttttatatgcatctaaaaccggccctaatgtcagtgtcaggtccatgggcctcctcaaatccaagataaaaacattcactttggagcaacagatctctctctttctgagtttgtccttaggattcagcaaattctaagacccagatcagggcatgctaaccagttccatttattggcaactggagtaggatcctttgtcgagttgggtatttcctctgacgtcactgggctactctcaaggctccccggtgggtctttgccaggaaaacctgcatggaaaaggaggcttggccttcgaggaagacggcctgtgtcctggcagactgggtgtgtctgctccaggctggcctctcctcatggctgctggttttctggactaatgcacttttgacccaagaagggaaaaaaggtataaacagaggagctagagcagtcagctgttactgggtgggacttgtgaactggtgggctggtggcagccccagcccttcctactccctcagagcctgctgtccttcctggcctctctaccccgcctgccttcccccctccctccctccctactttctccccagccacttctcataaagaccagctgcctaggtgacaccttttgcttctaaaaccttccttgttgttcttccttggcccctttctcaaaatacacctctctctttcctccttcaatgccagactgttggcatctgtctccctgtcttgtgcaggctgccatctctggctcaccatggttttataattgcctctggttaaagtttaaatagatgggtttcagcccaagagaaaaatgtaaacaagccctttctgcagtctttcagaactgctgacttctagtgcttttgagttctgtgctaggaaattcattttgctcctccctaaccaaggaactgagaaacgccattagggctttcagagccgtgacagcctctctgaaaccattgagaggcttttagatgatccgcacttttccttttaactcaattaagccatcaggatccagttcccatcctagcatgtttatctagtgtattcaggtgagagaatagttcagcaaatcttcatggcctggcttctgaacaggaaggaaatgaaaggaattgtcatttcactattggagttttttctatgtgggagcaggggattgtatttgttgtcccagggtttttggttgatgaagttgtcttgtgagtcatgagaatgggactattcctggccagtacagaaggaaaagggcaggctggatttgagctcatgcattctggtatatatcctctcatttgctgtgtgtttttgtttgttggggttttttttgttttgttgtgttttgtttttggaagtaagtgggccatttatttttgagtcttgatgaagaatattgattttctatatttttctgctttgtataccttgtgtacttgtgatctgatgtcagaatggattcagcaataatttgagatgttttggtcaaggatttgattggatctttgcctttcccactcaaaaatcttccagaattccccatttcatgctcagacttttcttcacaaccttctatggtcgacctcaaatctaccatcacttttcactattc

SEQ ID NO: 49669 - DNA, 1114 bp, Homo sapiens
gggcgacagagtgagaccctgtctcaaaaaaaacaagcaaaaagctaaagggctatcttgaagaaggctcagactcatcttgtgtgcctgcaaagggcagtcctaaattggtactagataaaggatgatggatattagcttcatataagtaatgttctaataattcaagctgattgaagtatattacagtgactgatatagtagtgaattaattctttgcctcaggaggtgttcatgtcttcattcaccccgaaacatttattgagctgttgcattataccagtcttgctagacactaaagacacaatgatgactaacatggccacttcctgcaaagagttcagaagtccattggaggtcatgagatcacttatttgcagagacaggatgaccagtaatgtagaatgccaaggaagagaagcaggcactggaaagaaagaagtctggactacagggactctgaggttgctgtctgtgttaatgaagggaacactagctgctgtaataatcaaacctaaaaaatgtcttatggctgaagcctgaaagaaagtttatttcacacttatctgacattcaccatgggtgtggtaatagtggctgatagtggtggttctcttccaagtggtaattcaaggaactaggccacttctatcttgtgattctcccaccttcacgtcttcaacatgtggcactgacaggcaatgacatcctgctaacagacagggagagaacatggaggattgtgtggggaggtttttatgggctggaccttagaacagagaagtggtgcacataaactctgttcacattctatccactagaatttagttgcatggccaccatctagctgcaagggaggcttagaatttagttgagctgttttcctagcaaaaagaagaaccaggttttgacgtatcactagcaaatcttctaccacactctccaactctgagattctatgattatggtggcagaaccaagacaggaatttttaaggggtgctggggagggtggcagggtactccatttatttatttttaaaactttttatttcatttatttatattcataattgactaataaaaatcatatatatttgtggtgtacaatatga

SEQ ID NO: 49670 - DNA, 860 bp, Homo sapiens
cccagataatctattatattctctgggaacaagaatccatatacattcaagtcttcctttgatttacttacttatctatgaacactggtcacttaccactttcctcaccttctcccaccccaagaaaccctctcctggagaaacataactggtcttttccattcctgagattacctgccattttctcctcttacaatgattccaaatcttggactccactaaggaaaacatagcctgagtgaagttacacaaccagtgagaaaggaatcttccctgggcaatgagatgagggctgactcacgatctcagctcttaggaatggctctccagctgctgacagaggccacatgggttcagccatgaggtcattaaggatctccctggtgactaacaaaattggggcagccagggatagccagagctgagctggggcaactgacccatttgttgaagtgccctccaggatggaggccagcagtccaagttgcaatgccttggcaatgtagcactcacagctggtgcaatctggaggatgattggcacccaacaaaagaagtctctggtaaaggatgtacttataatcactgtgtggagacatgtttattccagatgcccattcttcattctttcacttatacaacagacatttgaccttgctaggcactgagctggaggctggtatattccttgttctcaaggaactgacagtttagcagagaggcacaatggggacaagcacaggaagcattaggagaattcagaagagcacttacctcaaattggagagtcaggagcgctctcccaagaatgcatggaaggcttatacagaaagggaggagaaagggccctccaggtagagt

SEQ ID NO: 49671 - DNA, 2831 bp, Homo sapiens
ctctttgcttgaatttttccactcttcaggtgaagatgatgacactgtccaggctttcaggagtccaacctcttagacaataagcgacatactctttggtaactgcagtggctaagccaaggaataaatatgcataactacaacaaacaggtacttgatgagaacgttatctagagctgccagataatttagaccaagtgcaccttttgttgtaagaagctggtatgatgtccacatagttttcagggctgctgttccctctaagaagaaggaatagtctttttcctgaactactctctctctgaacttttaggctacaattatgtcagttcaaagtgggcagatttgccaactgaaaaaatgatgacacgcagcttcccaactctgtaaggacttttcaggtctgtgggtgaacgtcattcccgagcaaaccaatgccacaagattagtaggatgcggctcacaagaaatgtttacaatgaagggcatcacagactgcaaaccaaacagggtaggaggacacgggaccatttccttttcctgtctccatctgactctggaaggcggggacaagacatttaaaaccaggaccactccaggaggacagcacattagctactgccctccagctcccttcagtgttgtttccgtaaaggacttataaactggcgagggcggtggcttccaaaagcgcacaggcgtcccttttccaacttggtcttcttattttcccttcctgctccataactacaacgtgtttctgttcgtaatcatctcggcttttccttacctctgcttgtaagaaaagtcctttgcgccattcccctccaagccccagggaagggcctggaaagcgcttacacctcagacccagtgtcggtcagccgtcaaggagcgagcgacgtgggaaaccctgagataggacattggcccggcgctgggctcgggtaacgatgcggggcggggagcgcgggcggccggggagggcggcggcccctttaagagcaggccacgccccctcccctcctcccgttcgctgccagcggtcggtggcggccgctacggtgctgacaagatggcggctggcggagctgtcgctgcggcgcccgagtgccggcttctcccctacgcgctacacaagtggagctccttttcctccacctaccttcccgagtaagtgccgggccttgagctcgtgctgccccacccttccgcgtcagcacggttgggccaggggtgcaatggagggcagccgagccgagaggcccaggcggggcctgctgagggggacgtgcggcctccggagtcttagttcagctgctgagagcgttgctcggcctcgctcgggaaggggttagggtccggagagcgagcccagggagaaggggcgaggtgtgtggcggatccggggcgcgcacaggagaaccggaagcccagcggttctgcgcttgggatttgggggttgaggttgaggagggcttggggggcggacggctctggggcaggaatcggagttggcggggccctgcccgcgggcaaactaccccgaatgtctgaggtcgtccgaggtggtcggcgtcgggggacagttcagtcgattgctgccgggacaaagtgtaaagccgaggagtgtctattccagagtggggtcattaaaagtgattagctctagagtagtgttaaaagtcacggaaggctgaaaagttgtggaatccatctgaatcctagcaggcggggagaacttgtaggattggcagacgttgtctttaatgcctggaagttctgaaaaagatagggagtgggaaggagggacgttaccgaagaatttcagtattacggctcattagaagatgggtttgtatggacacagacacgtttcccagtccggaaactcaaacatagaaacatctggctttaatgaatttgattttcaacaccggctttgtcttgatccctgatttaggtgttaaaaaaattcagttgcattgttaggtttttgttggtggtgtttttttctctagcaaattccttctgaaatgctgaaaatactcttacatagtatcttatttatctttggcttatctttgaaaggaggagcagatctaactccaattttacatgctagtggaggaactggcttagtaaagggttaagatctgtgcagatcctgaagaaaagtgctagttgtccctctaaccatctcacaggaccgaaacgattttatgaacgaaacaaattaatgaataatatattttactgagtattttactaaacaaaaaagtgactagatctgtgaagcatactcaagtaagttttccatctgtatttgagaaattcttcacatttatccaaatttgatttcactggttatatcaatgaagaatctcaaaatggagctgcaactggaagaatctgtcatgactgccagcctcccattttattcaccaggtcaagggttggcattcagtaggatctggcccaatgaagggtgccaagtgacctgtggtttgatctggcctgcgtagcctattcatggccatatccctgattgatgctgaaacccaactttgaatttgagagtgagccagataaacagtccagccatgtagttggagttgaaatgtggccctatgtacttgacctctgatattctgggctatcttgttcttggatctgaagttattcagcttttttctatacccaggctaggattatggacagttgggaattggtgtggcattgtttgatctaactgtagagacatttttctggtcttgaattagcgtatttccaggacgtcactccttaaatttttgatgtaggcctgaggc

SEQ ID NO: 49672 - DNA, 1029 bp, Homo sapiens
aaaaaaaaatatatatatatatatatatatgccatttctaggagtgaattctgtgggttttttttaacctcataagatgagggaggcataggtaattttagggcttttttgtttgtttcagatatttatcagtaaggcatttgataccattttgtgaagggaaagcaaaacaacagccacaggcaactctacagttaataagctaaaaacagttatattttaaaggtctctttagtgacgtactcagttggttaagattagctgataaaaatcttgtgcagttttgatatctacagagacttaacttatcctttggctctagaaaggaaccaagtttagagaaattagtagttgctcaattcttgaaacttacagccacatcatagtttttgtactgtgaatactatgggctttctaaactggcctggaacactgttagttaataaacattcctttcagggttgttctctttgcttctgatctcattgatgatgatttgttggacaaataaggaagtaaacagtgcagagttttttggcttctgctctattaaaaacatagcagagaaggacaagaagttcctgcctgctaaataggaagatctagggaatcaaaagagtctctgtcaagcttcttgtaatggaggatacaaaagctacttttagtatttttagtatattacttagtatgatctttaagtattttctgtattttaagaaagtgtaaggctctatttatttctgtaataggctttttgtttgtctagaaacatcactgtatttacatttcattttattagaggtgattttggaaccaataattgctactacctctttgcccatgcaggatccagtgatgataggcaaaagtaatcacctagggacaggaatgttttactcagacatgtagagattgtactgaaatccaccctttgctgagcttatcttatttgctatagaaagaaaaattttcttttgtgagataagggaaggataaagtttaataaggtagtcataaagtttcaacctg

SEQ ID NO: 49673 - DNA, 581 bp, Homo sapiens
tttacaaatttgtcttgggccacattgaaagccatcctgggcctcatgcagcccatgggccacaggttggacaagcttgagataagtggtagtagagccagcaggatggcagaatgccacatttcatgacatgactctgtctttactcaccaaattcttagaagttttctctagtaaaattgatttgggagttgatttttatttacttattttttggtagatactggtgagacaattaggtttggggttcaaactgaggtaggacagtagtgaggcaacttctgtggattccaatgtctggaagcagaaatatgaggaaacatgccctggaactcaataggaaaagctctgaactttcacaagactgaaattatggttcaggttaaattaaacaggtctctagttgtgactgggtaatccaggactctgatcaagagaaaacaaaagaaatcagaaaatactattcagaagtctaacaactttcatgccttggcattcccaatcttttatttcagctagctattgctgtcgattttttgttctgttctcagtcctttggctatttcatgtttgtttacatg

SEQ ID NO: 49674 - DNA, 549 bp, Homo sapiens
ttgttgatgtcctaagtgagggaagaagagaatctaaggtgattcctagttttctgtctggagcagaagggagtggtgggaagggggctgatggctgcatcccgtactctgtgccagccagcacccataccatttctctatatttgggagttccgcaccccgtgagacttgatggcagcagaatctgcctcctatgttgatgctcctatgaaaatgccagctctttgccttgccagcctcccctgggatgagcataagcaggtggcagtgccaccatgaacgtgcagtctcattccagccgtgacgggctctgcaggcaggagtggtgacatcatgcatggaggtgaggccaagcactcatcctgggccgcagcgccacctagtgcttggcatgggtaagcagcgctggcctccctgaatctacagcctggcttgagtgaggttcaaagtagccctgcatgtggcctccagcaatcccagctactccatacactggacagtatccccatatcttttacacacacattttgctactgaaaagcagaaatg

SEQ ID NO: 49675 - DNA, 571 bp, Homo sapiens
atgtcacaagcttgctgttatgtggcattgttaaaacggaaactgaaactgaaaccaagatgcctcattccaggtccatgaccctttctgtacagtgcagaggggggatgcaggcagcagccaggtatgtgatggcctcactttacaaaaaacaagaatgatttgttcaaggtcacatatcatgtgagctacattgatccagacaccaggaaattatagaaggattcatctgtgctcagtcttttgcaattttagtagttggcagaatgttctcggggaaaaggagagagaaggcaaatgatctggggacactgacaaagcagcttgccctaacagtcctgagccacaatgcccagagcatggcgctgagaccagggaccagaaatgccaccctcagccctctggccaggccttgttcctgactgtccagccaaagctggctcagctgcctggaaatcttatggctctgagaaatggccatgagtcaacctggtctctcccctgcctttgcctctggagcttgtttcagatggtggcactgcccagcactatctggcaagctgcagggctc

SEQ ID NO: 49676 - DNA, 1691 bp, Homo sapiens
ggagagtgtgttaatgaagttagtgctggtatactgacaccctagagaaaaaccaggttttcagtttatgtatcaggtgcatgcaaagggcattaaaaaaaaagtgctctacaacgttggtcagaaatgactacattacttctactggtatgaaaaactgcaaacccatctcagcccctatcagactggcagacactagtcctgaagcaactgggcctaatccaaaacttcggcgcagcaggtcacagaggaggcgcctgggaaagaggagatatcaagtgaaagtgaagcagggagaagccagaagccgccccaggcaggtcagaaaagactgtggggctgggagggaggatgacagggtgtggggagtgggtgggaggagggggtgttatcagagggagagcactaaatgacacaaagcaaaggcaatccttaaaatgccaattcaccctgggagacagggtgtgcacagtggaaaagcagggtttgggtcctgaacccaggaaaaccatttcacagacaagtacaccgaggtatgggtttcaaatacggtcctgcaacaagggagcagtacagttacgagtagactgtgagcccttgcagggtataattcaacctggcattccccgcccgccccagcagtgcctagcacttggcacaaccaggaactatctctgaatgaatgtcccacgtcttgaaactctaggcttcttcccagacacctgggcttctggccttaatacgctagggtccaggacgggagaaacccaggctgagcgggtccggagaagatggggccttggggtccgagtccaaccactggccctccgcccgtccacgggcactcacccggatgcccttcaccacggtgatgttctcattctcgtccgcctcgaaggtgacccggcgggtgctggtggtcccacccatgattccggttcctgccccagcggagacctagcggggaaccacgagcacttcggggcccccgcacccacacgcgcgtggaagggcctggattcttttcccgcacagcgggagcaaggccacgacccccagaagcaaggagaaggcgccggtcctgagctcccgcctcctccggtcacgcgccacaacaaaaacgcctcaggttggtcggcgatgcgaactgcccgcctctgttcggcgagggcgcccggattggttcacccgacccggatgctatggcaacaggtggtgtttgatagctttccgcggagtccctgggtgtagtgggaactgtggtctcgatctggcgcggtgggtgatgggacattctctccccgcgcctgagcgcgctaagggagcacggcattctgggagttgtggttttgactccccagagacgcctaactgggcaactttttgaagacataattctagaaatttaggccactaagttcagagacacaatctttctctcaaagggactcacagtttaatgaaaaagatgcatgatactaatgaagccattcctagtgttctatacacaaattcctggctcaaaacttagcgtttcattacagtcgtagggtagcttaatgaagactacttctgagaaatgcctcgttaggtgaccctgtgatatctgtggttgtgcaaacatcatagagtgtacttacacaaacccagatggtgtagcctactacacacctgggctacttggtgtaacc

SEQ ID NO: 49677 - DNA, 1167 bp, Homo sapiens
gaagacactcattacaagacttaggaagttgcagctggtttagctttcctgcgcgcccaggagacggagaaggaaaactacgactcccagagtgcttagagagaacacgcgcgtcgtggcctcaaaacttgctcccttagtcccgcctcctcacttcagtgattggattttccacttccgcgcctctggaattctcttcacccattggtggagactcctgcggggtcaaatacagaatttacgcacccttggcttccttggagcctagcggctctccccgcgtccaagatggcggcagaagcagctggtgggaaatacagaagcacagtcagcaaaagcaaagacccctcggggctgctcatctctgtgatcaggtgagggaggcaggaggcagggtctggggactgggggcagcggctcgacctccgctttggaagggagaagggttagctgggtcccaccctgctctcccctttcctccttgcctcccgcagcccctccccagggctctaacccctccccagggccccagcaattccccctccaccttttttttctggggttagctatagagagaggagccccgcctcagtcttttctttaggggcagcaccttctattacagtctcgggaccccaaagcacgctatttgggtttggtagagaaaaccaggtgtaaaggtgtgtttattgattcctaaaatgcttgtttattgtttgcctgtagcagcactcactgagaaaggcgtcttgtttcctggactttggggtgtaaggccttggagtccggagattcctgtcacgagttgcagatttgtgttttcacactctggatactttcaaccacctgtgcgtggccacagccacaaatacaagaatctgcagtgagctggtaggaggactgggtttgaaggcacacatcggttttcaattttttgccctgcctccgcattctggtccattccttaaaaaacagaaccaaaccaatttcaaattatcctccatgcactgcccctctgcacctcccagaagattagggtgggggtggagtgggagcggtggatcttttaggagcttttttttaaaaaagcgaaatatattgaggatgggggaaccctttcaagaatcttggatatgatgcaggtactgactaaaaccaatctaaata

SEQ ID NO: 49678 - DNA, 1231 bp, Homo sapiens
atgacagttgttgctgtaaaccataatttgatgtcttatgataacacttaactagcttattggtggttttgtttgtaaacattgaaagtaagctttagccaatgcacacttaatcagatttgtattcagcaagtgtgcttttgctaatagtaagccagacattgtatcaggcatcagggtaaacatacatatacatatgtatatgtcccgaccttgaggaggtcatatctagctggggaaacttacaaattgtacataatccattatccacaattccaaattccaaaatgctctgagaaatgaaatttttaaaatatgtagactcatttagcctaattcctgaattcatatgaggccacattatatatagcctttgtttgtacctcttaatataatttttcatacatgtgtttgattatgaggtgctaccctaagctctcctggcattgttgcataatacatagtaaatgccctgaaaacctttctaaaatctgaactttttgaattctgaaatatatctggtcctaagagtttagcagaagggattgtggccatacatgaatggacatgttgtagcccagcaaaaggaatgatttacttcccatgattgagttaaagattcacagaagaggctgcaggcagtgaaactggaatttaccaaagttgttttggcagcctaggcagaactgaagttacagccaaagatatagacttatagagaatctggggagggtatacatggaagacaggactggaaaggcaagttggcaccagattatggaaggcctcccatgtcacaggagaatgcattctttttctatcaactgacaggctcttttctgatttccttcagcctcatttgctgttgtaccttgctttgttgcagtgtgtcatggatccatttggagaagctgatgagtcatcttgtgaaagaaaaaatgaattgaaggacattgcttactttctgtgttgattcaggcctcatttcatcttaaccccctagttagaggacatcagtaatgattcagtctctgcaactcattcctaaataaaattaattggaaagtagatagctctctaataaccatgcttgtttttgcataatagaaggagaaaaggattaaattctttgttctaattaataggaatgaaaatagaattgcaatccgtggtatggcaaaatgagagaaaataaggcttgtaagtaattttcatggttgtttaggaataa

SEQ ID NO: 49679 - DNA, 490 bp, Homo sapiens
taaaagaatatcaggaatgtgaatagagtttgtctatcttccttctttctaaggaagggtttagtagtacctaaagtgacaattttttttttaagacataagatcttctctcatgactaacaagctgtcacatgactgtcagcgaaggaaagcctgaaactgaatatcatttagttgctctgctggtcatttgtgactcatcccctgtggtaaaggttacaggaaggaggtaataagattgcagaacaatgttctctgacattagacaatgcaagacaccagaggtggagacagaatgtggttcctattctataacaggggaaagaaaatctaagattagctacctaatttacctggatatagccatgaaattgatgtatatgtgaaataattatagaacagaataatacatttcccaggagttcttcacacctctgggactgaaggatcagggagtgtttcaagtccttctctttctctccattgacag

SEQ ID NO: 49680 - DNA, 1934 bp, Homo sapiens
gagtttgtgtttagatttgggtaccatccgtaaaatatctcattatgtatatgcaaatactcccaaatccaaaaaaaaaacaaaaaacaaaaaacaccaaataacacccgttcccaagcatttcaaatgaaggatactcaacttgtaatgtatagattcagaaacacgagctagagaacactataggtattgttttactgccaggaaaaggagcccaagagaggctaagtgacttgaagggctacacagccagtggacgacggagccaagagtgaaattcacaacccagctttttagtcctggaggcttttccacaccacctgttgtctcttctgttatagcttctatccactgaactttgcacattcaaagtgacctcaaagagccctctcaggtcacttggaccaatcttctacttgcttttttttttgtctttttgcaagccacctcaaagagcactctcgggtcacgtggactgatcttctacataaaaatctgttctaccgcatcatttatgtatgtttgggcaaagtactcataaccatttccaaggccaataaagcaaatgctttgcaggatgccgtaataaaaataaaactttctttgcagtatgtacaaagtcagactgctttacaagtcaaaaacctttgctcaagtccagcctgtgccatttaacaggatcgaaaaaagagctagagttggatgggaaggaagagagagtggtttggtgaaggaaccttggttctgacactagctctctgccgaccttggactggtcatgtgaaaaactcttcagacttcaataccccccgagtgtggaaaaggggtgacgacagcaacaccctgagtcttcccctcgcaggaatgctttgaaactgttaggcgggactgccgccggtgcgcagttttgggaagcagcggactcagcggggtcccaggctgcccagacaggacggattgctggggggctcaggccgtcctgccccgggctccgtgggcggcggggtggggacagggcgtgggcgcgtcccggggggacctctcctctggcttcctccgccccgccccgggagaccgggtgcggcccgagcgggtcactcaccgggccaggagctctaggaagatcacgttactgcagcagcctgcgaacaccaggcccaccgccaaggccgggcgcatggccggtgcagggttggggaagcaagcgcacagagtaagcgcccgcctgtaccgctaccccaggaagccggcctcctgcctcttcgctgcgcagcacatcgcaccgtcctggaaagccgctctcactgggggccgccgcggtctccccttctcccgcggccaacaccgacgctgccaagaagctgtagttcgcagtcagcttcggtcccattcatccgagggggcgtccgagccccggccagactacatgtcccaggatgccgtgcacctttacctcaggatgcgacgttcccgcttccgccaggcagctccgccagagaggacagggggacgaggtgcccggcatgactcgcgcgataggcggccgcgggtcttgctgggaaatgaagtcccaaagcgtcagtgtttcttgcgagaccgcccagagcgctgaaagtaactcggccgccagggtcacaacaaacttgctggcagcggcggcactagaactacagagctgtgactgctcgttggaggtgttctagcatctgaaacaactctgcttcctgaactgatatatatatatgtatctttggtgactctattatgctgccaggattaagaaccactgagaattcaagtaaagcaatggctctcaaccacgtctgtacattggaatcacttggagagctttaaagatgactgatagccaagtcccacccccagcgattctgatttaattaggctgaggtgcagccttaaaggtgatctattga

SEQ ID NO: 49681 - DNA, 860 bp, Homo sapiens
tgcccggaccacagaccgttccaggtgtcccagagccacttgggaccatgtgaactcaatgaacaagtgagcaggttcttcttgtgggtttcaaatgaatgtatggcaggaccatcttcagacctgttgagacctgttgaaaatctcaacatcctgctaagttatactgccaggaaagagactggcccaactggatggctgtggccccttcggtagaactttctgtcactcgtttcaggcttggcatgaagcacagctgcaatgttttgccacttttccttgaactttgttaccttttcgtttaatgattgccaacctcatgggcactccactgtgcatggagtcgggtatggaggagtgaggtgggtgcaaaaataagtcaaaatatctctatcctcaagggctttatggtctagcagaggaggtgaatatataagcaacaaattatgagtcaagacaagatgaaaaaaatgctaaatgggctctgaatctgaaatgacacagagcaggatctttgatctcaatctcctgactaaatccagaaatacaccagtccctccataacgactcaatacttatgtcagtagtttgagaaaggagtttaaaatatcagctgatgaagagactcttcatgtttaactccctgcaaatatttttctgaacagatatgactattttctagtatatgtaatcaatactgttttcaaatagcttctgtgaaatttgctagaaagattcacctagaatggtcctagccccttcctatcagagcttggggagctcctctccctgccctccacaggatagccctggaggggatcttaggttgagcttcttgaaaatcggtcatttttatgtaa

SEQ ID NO: 49682 - DNA, 1003 bp, Homo sapiens
ttcctttctttcatcaatatgaatctctgctgatcaccttcaaactccctcccgcatgcttaaatggaggctgttcattcaaggacaatacatcagtaagattttgtttatatccaaactctaacatcacaagaaacattctcagggtgcccaccccatggggggattgtataatcaactcacattcattaatgtagtatgtgctgacttaaaacccaacgggaatttaatgtaacttatattatgcacctgttgtgtattgggtaaggtacagtgttcagttccctggaatgtagaatgcatgtaattaccctcttccaagttaacaaacaaccccaggtaaagttaaataatcaacagagtgaaccaaggattatgcattaaaataattttggtgttttgctgatcatatgcccagtggggtttggaaggttgcacaatggcatattgctaaacattccaatgccacattaccacaaaaacacaaaacacaaaaacgtcacaaggtccagaaagactcctcgtgtggactttgcttctttatttgccaggaagcagtttggcccgagcagttcttttttgactgtaggaagttgagggcaaagtaaatctggcagacaatgagccctgggccaagctgcactcttaggataagacaggctgtgaagagggccctgtggccaacttcccgatgaagctgttggcacagaagagaaggggagcaggaatcctggctggcagcttttacgggagtgactgagcagctttttttttttttttttagatggagtcttactatgtcccccaggctggagtgcagtggcacaatctcacctcactgcaacctccgcctcccgggttcaagtgattctcctgcctcagcctcccaggtagctggtattacaggtgtgcaccaccacgctgtgctaatttttgtatgttttatagagatggggtttcgccatgttggccagactggtctagagctcctggcctcaagtga

SEQ ID NO: 49683 - DNA, 6498 bp, Homo sapiens
acgtgtctccagacattgccaaatgccataccagcccccagctgaggaccactgttctaagtcctgactagctagagtcagctcagcatatcaagaggaaggggctgtcccagatcccgggagctaagctttatgtgctccagttccaatttcctcagcatctcagtttagtttagtgtcttccctccatcatctaaaagttgagttcaaatagagctaatttgttgccagggcacagaagactggagtaaatgtttgtgcagtaccagtaggggggcactgttgatcaagaaaggctcaagatggaaggggtgtgtatgtgtacatgtatgtgtgtgtgtgtgtgtgtgtgtgtttgcgggcttgagaggggaagctttaaatgagcagttggtgctcaaaacactcaggttcttataccttaaaactactgataatccaacaccagcctcaccccatccatgctccccatactggcatcaaccacactcttttcatggtacaggctgtctttctgtgacatctgcctcccttcaaggctgatcttgaagcccacagtgaaatttcaccaatggaatagaaatgctcaatctaaaatacctcaggagcattttccctcaaccctaccaagtctacagacctcctagatatacagccccgaccacactgtctgatttcgaaggacggtagcaccagatgttccacatctgtctgcagccatgtgctttactgacaatcaggatccatttccacctcctgctgatctcccctcaacattgcaagagaggagaagccccaaactgccctcccatatttcttagagtcgggatcctggtacagttgagatggtgccattgagctgaatttgctggagcaatagagaagcaggcagaggccatctgcctacactgtggctgttggaagcaaggtcagtcagtgacgaatgtttgtggtggctcaactccatgtctaggtgtctggtcctcacttcagtggtgtgaggcaattgcgtggtgcctcacacgattgtgtgatgtaataacagttccctgagttatggatcacagctagggtaatttgatctagaaaccaatcatccaaaggtgaccgctttgcttctgcttgcccagtgattataggggtgcctgattccctatcttcaatcactttcagctagagtccttctatttcttgcatcagcccctggctgacgcaatactgtttgctcacacacacatacacacatcctaacatggcccaatctcccttctcatgctgcttattcaaatttgggaattagttattgatctgaggggtagaataggctaagtgctgccgggagttgacatccaaaagactctgtattgatcttgtctcaggaaaatagactctgacattcagggacaacacccacagaacaatacaaagtcaataagtgaataaatagttgctaagttgtgctgtgttgaataccaccaatggctctaggcagtcaaaaggtatgggatcgatggagttacttcattcatacaggtttgacctagtcttgaaggacaggtcaaccctgggtaggtgaggagaaaggaagtggtaggcaggtatgagaaggggcagaggcagagagtgctgtctgtaagggtcaaaatcctggattgatgtcctcactctgccacctcttctagtggggtcaatgatttgacctctgagaaccccatttactgcatttgaaaaacatgaaaatcctgcggggtcattgtgatgatcaaatgagatttaaaaaaatctatctgaacctatacacctgcatctatctctacctatagagataaatatctattctctggatatcataatatgctgcacagatagagactagatcttctctgtttgcccctggagacccagtgcctcacttctgggccctgctctgaccctgggaagctggtgtgagtgaacagcctccaggggttctctcatcctctcacttctgggtgggttcagccagtgggaggtttccacaggagaatggagggtgagaggaaagaggtcaggcttatttccctggttcatcccttcctgccataccatgttcctctacccaagaccacagcttctggccagacctgtctgtcccctggagctagagctagatctccatctaggttttaggaaccgcttcaggtctcaggcaataatggctcccaccgttgctagttctgaggtcctgctccatcccttgctggctccctatactctgcccacaccactgtacatagtccctgtaatgaattgtctttgaacatccctttggaatgtgtctgtttcttgccatgattctggttgatagaaaatagaagctgctgtgttcaaattgtcctctctcctaggaatctgtaatggtcccttgttgtttaataaggccaagactaaattcattttaatagcataaaaatacaattaagaaagtaaatccatattatgtgatttacagattatcctattactgctccaggcagccatgtgcataatggagatgttaagcctgagattgggcatgggggtcagtgggcgtggcacacagacatacctccattggcttgatttcagctgtctccttctgaaccaggtaggcacttccagaacacctctccttccctttcttttccttttatcctttctttcatttctgtgctccactttttcttttcccttctgaaatccaaaggtaaacacaagaggagaaggcatgatcttatgtgaaaggcaaacatggtgaaccactggaaaatttcttagccattaaagcccaatagttcattgggcagctaaccttccagaggatggcagcagctggtgactcatgtggacaacaggaagccaagacagggagaagggtgggggatgcacaagttccagggagactgtaggtctaattctgactcagtgcccaactggcttgactgcactctctctcttatccccaaggtgaagggtcagagattaagactccattttcatgaactaatggcaacaccttttgcaaatataggtgtgccacactaatggtgacttgaagtgattttaataaatattattcatagtgacatagcacaaaaatgctaatagactttgaataaggaatgacagccaagtctggcagtaaaaggtagattgaacatccagtccagtaagatgggttagcccaatgagatgggatatccagtcccattttatttcatgtcacaagcttggctgagccctcacccctcttagggagcctctaggactctggtggaggtgtcagctttactacacaaagtctgtactttggctatggcttgttgcaggcactatttcttgccaggggcttttgctagatcttttacttcaaagaccagctgaagtctcaattctcctgtgaagtttttcccttatctctgactggatggggtagtaacttttacatagcatttagacataggaagaaagagagagtcactctaggttgtcttttcttccccacaaatttgcctttggactgaaatcatgttttatgtttaaagaattcccaacaatgccaagcttaggatgttgtaattctacatatgagtagaattagaaaaatgtgagagttggaagggatttcatcagtggcctggccccaaacacctcagtttccgggtgagaatgctgatccagaaagaaatagacacaaccaagttaattatgaaagttgcactagaacccaggtcgtttgatgtccaattttgtattattccacggcactataaagccttctgatggcttggaagctggctgaccctgagatatttgtccccacacataaactcaaagggtaagtagagagatggttgggtcatggagggatgagtcaccatgagctagactcctcggaagactccagaacgttctcggatctgatagctcaaccttaggaaagatgacaaggcaaggtacagaactgattcatatgtgctagataaacatctgaagacatttcccttttgtatctggaaagcagggatggcaggtctgagatgtcagctccctgaacttggttccttttgctccccaggctatgatgggattctggtctctatattgtggctgggcccttaaaagcagaaagaattcacttcttcttgcaatgctgatccctggcaatgggaattccctacctgaagttagtgtttagatctactgtttgaacttaactgctttatgagggatgcatttccttcctctctccatgttttcctgctgctaaccagagccttaagcatttggctttggctttcttgccatttttgctgaggtctattgctttctaatcaggaaaattttttcaagaaaatgacagctcctcagagacccacaatacctcagctcttctgtggttcatgcagacctgagcagcagaaacatactgtaaacatagattgtgttctgttcactcaacagacatgcattccttgtgtaccatatgccagacctgcaaaaggcatggaggatatagttagggtgacacagttcctgccctcaaggagcttagtacctgggggaaagactgccaattacactacagtgtgatgaatgttaaggtgggcattccagaatgctatgggggcattaggaggggaaggtggcccactcttaggatgggtgcagtgcagtggtcatacttgccaaaagaaatcagtccaggcaggggaaactgcatgtacaaagtcctggagaccatcctgaatactcattacgcaatgccaacaaagttgtgtgatgttgctaggccatgaagttcaagggcagaatagcaaactatgaggcagagtcagtaagatgaggcaagctcacacatagccttgcaaaccacatgaaggagatttaactttatctcaatgacagtgggggaaatcagtggaggtgttggcatgggtgtgatgtgatgtcaccaaggtcccaggtgagatgtcacatgaaggtaataaccataatgatgattatgataattattagtattggtggtaactgtaatgtgtggaaggaaaatgtccctgattgaggaggtgaactgagacaaaaaaggccagcttctaggtttataacagtattggagtctgtgatcattttcactagtaaccattctgggaattgtcctaaagagaaaaggcaaacagaacttcaggcacaaagatattaatgaaaacattatttatataaacaaaaatgtgggaatattcaaaatttgcaataagaaaaggaagagtaaatcaatgatattacatgcctaaaatgaaatactaagtagccattgacatagagtcatcagacttttttaaagacaaggcaagatgtttattatataaatgaaaaagtcacgatcttacctatgggggaagtgtgtgtgtgtgtgtgtatgtgtgtgtttgaattacattctagcttttattttacattttaaaatattttgtaattttataccatgaagataaatttcttttatcataaaaaaaactagatgggtgtgatggcacatgtcccggctacttgggaggctgaggtgggagtatcactcgagcccaggagttcaaggctgcagtgagctatgattgtgccactgtactccaacctgggtgaaagagcaagacctcatctctaaaataaaataaaaatatatattcattggagtaaaaaatattttgataacaatgaccatcatgaacttctttacaatcactcagttctaaatcacattgatgggctgaagaggaggagcagatagatattcagtagaaaagggctggtatagttgtccatactgtttacttctgcttcccttctgattggtcaataccctgtcatactgtggctaaatattttgaatatcacccctggagaggaatttgtattacgagaagcttcatttccaaagcagcatcttcctaagaatgtgtatgtagtttcggcaggaaaggcatgggttctaatgccagtcctgcttcttacctgctgggtgaccttgggcagatggttttaatccttctgagacttatttatggaacgacaataaccccagaactagtgtagggtggttgtgagaataaatgcatgtaggtaaaagctctggccctaatgagcactcgatgacctcatctttcttcacagtgtatcagaggtaccacatacttcattggtggttagtcttgtagtcatgggatctccaaaaaaccctttcccaacactgaattcaccaagtatctgttatgtctgcctagtctttcaggctaccaaaaagctgttgagtatttctctaagaattgctggtttcatcattgctttcaatggttctcctgggctgggccattgttgacatggagcatttatttgttgactcaactcaggtgcagaaactttccatcaatactcaccaccagcacacctactgtgtgaacttctcaggtggtttctgactgggcg

SEQ ID NO: 49684 - DNA, 1357 bp, Homo sapiens
cttgtattaccaacaagattggttgttcagttagacagagctcttttgtgtgtgtgcaatgggaagtttcctgtattaacctatataattaatttgcagacaagaaaaacactgcaaacattgttaaaaatgcattttatgttcattttttttttaattttttaaatcgggatttgatcttcaatgctaccaaatcacctctagtaagacacaggtctgcagttagtttttgaagtggatccaggatggtggtctgaggttgcctgtaaagaatgaggtttttctggcctttggccaaagcaaagttaactaacggaagggataaaaattgtcttgtgtgggccaagctgatgttgctcaataggtatttttttgaattgtgaggaaaagagttgccttattttttccacttctggaatcatgagaaccagggctgggagtgaagttgcatgagtcacagcagtgcatacaattttcatattgactttcagatgtcaacaattcctttatctgcattatttaacattaaccaggcactgcccagacctgcccaaaccctgtgtatgtaagatgttgcccttctgcacctgacagcttccaactcagagagctgagggaaaggggtctctgagtcctggatatgtccatcaccaagctgctgaacaaaaggcagacactaggtgcctttgcacttggagccaaatcactactgggatgtgggattcctagcctgtggcagattctaatctgggaactggaaagggtcttgtagtaaggaaagggcaggcattcgatgcaggtgtcatgggagcagaagagctggctagcagcctgacaactgaggaggaaggcagaaaatctaaactcagcacaatctgtaatcctgcatggtgcaatcactgacatccagtcctgctggtttctctctggaagaaagcagagaattttataatgtgtttcagaaaggtgtcaacattctcatcaatatcaaggaaaaattatttttctatttttagatgactggcaattatcagatcctgggagaaggacaaggcaagatgcctgcctggggaagctgggcttttgtaggaagaaaaaggaattaaaaatgcaagttggcttctgataagtgccaaataaatgatttagggggtaattgccttggaattgaaagaaatgaaaataattagggctcccctaaccacccgctcccaacattgtatgaccaacttcctagggagggaaaatatatttattggaaacatgatagaactgtcagaaacccaagaaatcaattacataaattgtgaagcataagtcacaatgctatttgttctacaagagtgtagaatttgca

SEQ ID NO: 49685 - DNA, 1082 bp, Homo sapiens
tatgagggaaactttgagcctagtgccgctgatgagagaggctctgtcacatggaaaactttacttaagaacccagctgccccatgaatggttggtttccagtttcatggacaggattttcccagaaattccagagaggggtgtggtggtgccaatgagctggaatagacctttaggaccgaagccttggcatacccggggaacatgtcagggaaacttccagccccagccccctttctctctgtctcatgggaaatgccaccaggacaggaagtcacaggaaatagtgactacactaaatatcactgaattgtgcactttaaaatgatgaatttcatatttagtgaattgggcgaattatattttaatttttaaaaacatttaaatacttatcaaaagggaaaaaaagaagtcaccagaggcttagggatagaaagaggtggaaaaatgtttatcttatcacttgatttaatatattggataattaggattcagatgaaaccaaagtgttgagttctagaagagcaagtcagagagtgaaaactccacccgtatccatgccaaggaggggcagtggggtccaaggggaagcaccacccggctgacctcagctcctgccctcctgggtgacctcagctcctgccctcccgggtgacctcagctccagcctgcctgggactccctttctgtctagcccagctccttgttccttcagacaagtggctgccgggggctctaaatcccacaccaacccagagcaccctgtggaaaaatccttcctcccttttagtcagctggggctgggtgggaattttccaaaaggaacttttcctcagaaaccctggggcagggttggaatctaagtacaaaggtcttaggaaaaaaaaaatctattccaccagagtgtacatttccatggtgatgacagcagagaccgaggttggggggaagagttggtgggaccctttctcttatctcagatctgagtagcgtccccacccccagagacccttcctccgtggtcctcttgcccctcctgggatgcagatgaaatccagccccagaccttccatgagatcaag

SEQ ID NO: 49686 - DNA, 828 bp, Homo sapiens
agtagggttcatgctcctatgagacgctaatgccgctgctgacccgacaggaagcggagctcaggcggtaatgcgagaggggagtggctgtaaaaacagatgaagctctgctcgctcgcccatcgcacgcctcctgctgtgcggccccgttcctaacaggccatggactggtaccggtctgtggccccgggagttggggacccctggctttgaggattaaatgagacagtgtatgtaaagggctttttactgcacctattggattgtaccacttccatcaatagctctggcaacagtatcattgtcgtcgctgttactaggaaggtccacttcccagcagtaagcagggcctcccaccagggattaccaaaaatcattgttgaccatttgtggccagaagggggaagcatacaccacactataagctcaggaggctaaggacggggagtggcgagtgtggatggggacttccttttgctcacacaggctgaactcgatgaccgaggcttccttcgccccctttgcttggccatggtgctcggaagcctaccggtccttgctgtaggaccaagcgcacccagactgcctaggcactgtcagggatgttctggtgaggaaggcaggccagggacccggcagagaccagctggtgtatatcccattctagccaagcagcatttgaatcacatacatcgagagggcaggtgctggggtcagggaagaattctaccacacagtagttggagctacgtacttccttcaactcttcatgttatctaacttttcacctgctttctttttggtaggaatatcatctgccctccacac

SEQ ID NO: 49687 - DNA, 951 bp, Homo sapiens
catcttacaatcctcttgtaagatagaaaatttctccgagtccccacccaacccagaagtccagctggctacacctctcaccaccacacctacctaatttctgtatttttagtagagagggagtatcaccatgttggccaggcttctttcttaatcttttcttttctttctttccttccttcctttcttccttccttcctttctctttctttctttctttctttctttctttctttctttctttctttctttctttctttccttctttcttccttccttctttccttccttccttgctcccttccttcctttactctctttctgtctttttctgtctgttttctctattccttactcttccctcattccttccctccctcccccaactcttctttccttcctttctctctccctccctactttccaactttgggctgtgttgaatttgttgactcatcgtgaacaaacagaaactccaatgatactgttacccaagagaactttgcaaaaggttgtcatgtttaataattcattcacagaatcctcaatctcacaaaagcctggaatggattttctgtttggacagggcagggaagctactgtggccaggctccagctcttcccactgcagctagcacaagccttctaaagcaggatgtggccaggcacagctcatgcctgtaatcccagcactttggcaggccgaggtgggtggatcacctgaggtcaggagtttgaaaccagtctgtctctactaaaaatacaaaagttagatgggagtgatggtgggtgcctgtaatcgcagctattcaggatgctgaggcaggagaattgcttgaacctgggagacagaggttgcagtgagccaagatcacaccactgcactccagcctgggcatcagagcaagactccgtctcaaaaacaaacaaacaaaaagcagtgagaggtga

SEQ ID NO: 49688 - DNA, 1641 bp, Homo sapiens
tgctggcaattcttggggttccttggcttgtagctgcctccctctgatttctgcctctgccttcacatgaccttcttatgaggacacaagtcattggatttatgatccaccttaattcagaatgccctcatcttaatttaactaactccatcttcaaagactctatattcaaataaggtcacaatctgaggttctgagtggacatggactttggggggacatgattccacccaatatagggtctgacacattgtcctgcttgtagttgaatgctcaatatttatgagtatatacttagggacttttgtctatttgtttgtttgttgagacaaaatctcattctattgcccaggctggagtgcagtggcatgatctcggctcactgcaacctcagccttctgagtttaagccattctcctgcctcagcctcctgagtagctgtgattacaggtgtgtgccaccatgcccggctaatttttgtatttttagtagagattgggttttgtcatgttggccaggctggtgcttgtgccccagggcttgtggcacttgtgccccactcccgacctccagtgatctgcccaccttagcctaccaaaatgctgggcttataggcgtgagccactgtactcagccaacattttttatcagaacttactttctcattcattcattacctaagtagctaaaacagcatctcttgatataatctgattcatatttagccactgctcttctcagtagcctgtttgtttctgtacatattcattctccagtctccctggattctcattgttttatccaaagcaaagcattctcagttgtgtctgagagtgttggcagcttccccagcaccatgactttgcatttgtgctctctgacatggaaatttggactcaagcagtttagtcccacaattgacatttactgaccttgtggaagaaacaaattgcctgatctgactggagggattaactgggcctttatctatctggcctaagggcattttgctcgttaaagccaggctgagtggaggccgtgatagtgatagccagccattctctatcacaaagaaaatgtaggcagagttctaagacaacctccaatgacccttgcgtaatcttgctctatgtaacctccttccttgaagaataggtggaacctgtgatgaacatgatcacactggtgtgattattacgttgtatggtaaaataaatttttttaaatgtaattaatgtttcagatcaattgatgttaagacggggagatcattggggtgggcctgacttaatcacatgagcccttcattatgttacctctgtttattggacaccccatattctgaaaatgacatcaaagaaatgaaaagataggagaaaccatagtttattttcctttcagtacatccttaccaaccagtaagccaaaaataaagtatattagtagactgtgtgcacatcaggaaatgaaataaaaacatttgggccagacacaatggctcatgcctgtaatcccagcactttgggaggccaaggtgggtggataacctgaggtcaggagttcaagaccagcctgaccaacatagagaaaccccgtctctactaaaaatacaaaatgagccgggtgcggtggcacatgcct

SEQ ID NO: 49689 - DNA, 1350 bp, Homo sapiens
agctctgtaatatcagaacatagagaaaaaaattcctggccactttatcagtctccatgaagaaagggtggagccagtaggcattgccattggttcagtagacattcccggagcaccgtcatttagagaaagcagcagcccatttaaatcaatgaatctttttaggaaactgaaacaagttcaatgcccaagagtagagaattggttggacagttctctactcttgtacataccacctggatgcacattcacgtaatgggattatatacggaagaaaaatattaaatgacattgggacatgttaataacaaattaagtagaaaagattgccacaaaacagtatatatactaagagtccaggtttttttttaagtaattgatttatgggaaaaataggatatacaaaatgttaaaaataaattctggagggtgggattataggtattttaagttttttcttttctaaaccttatacaataaacattttaaaacataaatttataattaataaatataagctttaaaaaaaactccatagggcagagtttgtgtttaccagcatataaacaacaagcatttaaagaaacatgggtttttccttagtggagtagagaatttgtaaaagaggaaagcacctctcttgattcctcatgtttctacctttttcccctatccttgtcccagatctgaaagtagtggggaaaaaaaatcaacctggctcttttcctatgccaaggtgcttagtcaatgtttagttttactgtaggggaatttcacatagatcaggcttcccaataccagaggttcctggctctgccactgggtctgtaccctctttggcattcacttcctgcccattacctccctgggtagctgcaagatagctggggaaatcccagtctcatgccctctgcaagagtccaggtctccacttgagtggagagcaggaaaaagaggcaagcgcaatgccaagactttactgagtaatttgaataagaatacttgtaaataggtaaaatgctttacatttatcattaccataattgttaagaataacaactaccatttatgagatgctttccatgtggcaggcacacatcacattatcccacttaattttcacattagcgatttgggtattatctctgtttaacagataaagacactgaggctgaggtcaagcaatttgcctaggctattctgcattttgctagcctagcaaaaccattggctccttccttccagcaaactctagagttagctatgattgtgaggcttccccagccacatggaactgtaagtccaattaagcccctgagttcccagtgctggaaagtgacagacacaagg

SEQ ID NO: 49690 - DNA, 1893 bp, Homo sapiens
ctggctacgattaggtcttaatgagttcaataaagagtgtgtcacagaatttcaaatgtggaaagattatcttttcaactgtatgtataatttattctgaggacttgcttgcgtgtcacaaacctaatgcatttgttaggaggatgaaacaggaaaaactcacaggaggacacgaaacactacttaggatagcttctaagaagggaatctcccataacattccttatctttcccgcccacccaagagttctgacacatatgcttcaaaacctcgtgtggtagttcaagcctgcttagaagcttttaaggcctcgtgccaggtttccggtgttttcatagatttctcttgttcagttattgtcgcctccaaatttgtcattctctcattccactctagcctcccttcctctgtgcaataagcttttagggcattccattaatcacttttcttccccacctaaaatactgtcagcaaactgcctaggggaatccctataaaagcggtaagagaaagtaaggttgcgttactgcctataaattgggcactttaaaggcatttgttttaatcacgacttaagactttcaaccacgagtaatttgtgcgaaaggagcttcttctgggaggatacctcggcttcgtcttcaggtttcaatccctaaatttcccataagtaaaagaaacatcacctcctctcttccaagagtccgctgacacctgtcttcacccgcaggtgtttcttttaagacgttaaacgctttctagaacctcaaacagctaagatgctccccgcacccgaggttttgcaccagcgacgctctagggtgtgtttttctacttccctaggcccaagcctgcccgctggcgtcgaagccaactccttactggttcaggtatgtgctcgtctctagagtaaaccaatcagagccccacttcttactcctgggatttggtaaacggaagagacctctcctgttccgggagtaggccgggaccgtggatgagtgacagttcgactttccaataggcagagccctaggacctgcccacgtctggttcaggggctagaaaagagcgtcgatgccggcggcagtgatgagtcctaggaggcgctggctctttggcggctcggaggagcggctgctgctgctgctgctgctgctggtggcccctttgcaggtgagtggctttgttttagaaaatgttgcgaacgtttacattttttagtgatgtgatgttttatttttgggtgcggggaaggccagtttctttacttcccccggtttagtcgttggtgggagtctggtgcccactccagccctcaagctgggaccctcacttatcgccccggtccctttcccttgtccctatctcagaatgagcctcgcaggcagtcaccgttctgtcaactgagaggaggagcccgctttggtagtgctgtccttatggcaagaatatatagaagttggagggaagataaactctcttctggatgtctgaggtactgtgtagcagagcccttccaatagtaagatcccctggaaggaagcagggcgatgccgctgtatttagggttctggcagacctggccctatctatcattttgtgtagtagacagaaaaactcgaatgcggtgaaaagagaaggaggtgaatatatgcagtgttttcatgtaggaatctggagccaaatcacaagttcttagaaccactagaaataaaaacgtaagtgtattttcctcttttctaagggacgagctggtattacactagagaaggtcaatgaaatgcataattgcagttaagttcacagttaagctttaaagaatagttggttgttagctaacttataactctcatccccctactgcctcccttgcaaattacggaagatct

SEQ ID NO: 49691 - DNA, 1790 bp, Homo sapiens
cctgaacagtaaggaaggggatcagatcctctcaaaggtgctgctcagccctgacatgattgtgcttttatttatttaaaaaacataaaaatgatgactgtgcctattacaggaaggaatggaacagaaggagcaggcagtggtgagagaaagatggatcaaagagcctttcccttcagctataaaccagcttctcttgtttctctttgccttgcttttaaggtatctctgactacagaggaagaagaacacgggaactttgagttgttattattgaggaagacaggatgatcaggaatttgaccaggaagcccaggtcacatctaacatcagtgaggcagtgactggttaaaggcttgatgagaactggctgtctggccccaggctgccaggaatagcgggggtcaatgacctataaaaccttaggctgtatcagcttgggtggactaagtgattaccatgtctccctagaagctagtctggaagccatccgcaggggaatttgaactaatgaaccagggccactggggatgggacccaggaatctggattttaaccagcatctcagctgactcttaggcttcaggtttagaaccactgatgtggtccattcttctcaccgacaaaacaaggaccagctctttcttttttctctgcttcttttcagacagaaggtgttcggggtagagaagcagagtttgatctcagtgctgcttcttcttctaagccaccgtgttcagagagctaagcataaggcagaatggaggtgagaaatcgctcagaaattctcaaagcccaggcaaagggagatttgatttccttttgcatgcttccccgaagtatgttaattctggcgtaaacatggtctgaggcattactagggtgaggagaaaggcgtgctgagaaaggaggcccttactctcataggcctttcgttgcaggtcacaggatgtcactgatgggttgttctgaaagcatttgccccctgccacccccaccaagcagagtcctacccgcttacgaaagcagtttctttgaggtcaaaggctgagaacaaactgcaaataaaagcatcagtctcctttgcagctgactcacttaggtcaccccagggagcagccaaaccactgtataagggagggacagctcaatttgaggcatgtataaattaggaaatgtgtagtactaatggataattaataggttgttttatttgcagagccgatagacaaatttggcattccgtgtgttcagacctttaaatatttataaccaagagcctacaggagtactgtttctgtagagacttttctgatagagtattgtgaatttcaaagtgcccttggctaagcctttctgcgatttcattccacttttttttttttctgcatataatggctaaagaaattttcctgggtcaccttagtaaacactgtgtggtagtactttgaatgttgtagggacctgggatacacccactacgcagggctaactaccaagcaaagaagtccctttgctcattagaacagatggaagggccaaacctatcacaatttaactttgagaaaccacaggacctcattgccaatagactttttctgaggtgggccctggagacccctctgaaaagtatttcaggaaatgtgagaagttcgtgtcctcttagaaaaacttcagctactcctagggagtcataagcaaaccccaaattccagaaaggggcttcttggggattttgagactttggggagtttgagaacttgaccttcccagagtaccctagagagggg

SEQ ID NO: 49692 - DNA, 1925 bp, Homo sapiens
cactgtgagaaaccagtttttctgctgtggccctcctactttacttgccagttaattaatcagttagaatctatcaagttttgaaggatctatcaagtcttttatcctgttttgtaatctgattttttttttttgctttatttttaaatgtttcctgcaatgtaatatctttcacaaaacagtcctggatcaatcatgaagtcttcacttcctgtgaaaaatgctagtgacttgaatcaataaagacaacatgagtcagccttccaaggtgaataagctcacctttgtgcaaacactggtgatctcaggagtgctaagtacccctcactttcaacaaatctctctcacctgggaggaaaacttctaccagaacaaggaccacctagggaggtgaaagaggggatttccactttagaggatggagaaaccaaagggcatttcactcattcacagttttgctgagcttggctccagtaggtagaaaagttcttcaggagttcagcacaccactcaggcaattgttgtttcaaaattctatctgttgcccccatgcaagttttctcaggctaccatagtgaaaatccacagactgggtggcttaaacaacagagatttcttttctcaccattctggagggtagaagtctgagatcaaagtgttggcatggtggatttctcgaggccctccttgcagatggccaccttctccctgtgtcttcacgtggtcctctctccgggcacacacctgtctggtgtctttctctctgtgcccaaatttcctcttcttgtaaaaacaccagtcatattggattaggcccaccctaaagacctcattttaacttaatcactctttgaagaactcatctccaaatgcggttacattctgagatcctgaaagttaggatttcaacgtatgaatttgggggaaataccattcagcccataatgctgccaccatcattttccctctctaatatgctgactttttgtttattgcacgtgggcttccctctgtttctcccctcctgaactcttttagcgattacattactctcagagcatctgcagttcttagagtgtattataatcatttgggtacagctctcatttccctatgacattctataaattctgaaatcagagagtgtgccttttacatctctcatagcactagaggaggttttgtatacagtagacattttgtaatatttattaaatgaatgaatgaatgaatggaaagaggattagatgcagcctctgaacctgcaatttatttgctttaagactgtctccaaatgatgagtattaaagatgctttctcctcacttcctgccccccaagacaggtagaaataagttaaggctgaggagaaaaattgaaagaaaggtgtgattgactaatagcaggagagttacctttctcccagaggtaggaaatagtaaatagcacaagcatgccccagttaaggtggcctttccacaagaaaactgttcggggatccaagagggacttactgagtttgaagcctgtgggacatgcaagggcatgtgtctagaaaacaatgcatatgcaggtctgaaggtcaggtgagaaccagagatgttcacagtcaccacctacaggcaggaagcagcagtgtgtcaatgaatgaggccaccaaggaagactgtgtagagggagaggagcagtggcttaaagattccatcagaaattgtgtatggaaatttttcctgctagataacaggagaaggacccgtccaagaggaagaacactgcacgatacttctaatgaagctgtgtgagaacatgtagatgagctaatgtgtgtgtctattttttctcccctagtgtttttggacctattttgttccttctctgtcctgtcttttgggggctatgccccaaaccattcctgtgagccttctc

SEQ ID NO: 49693 - DNA, 1992 bp, Homo sapiens
cctgagtccttataataatttccttcacaacctgtacctatgaacaacaaatctacattctaaaatatatcactatggcctagattcagtttcttatgggtagaaatcacattcttcatgtacacacttctttcctagaattatataaagcaggtattattattatcgttttcaccgagaccagaaccagaattttgtagatgtgcaccagccaccattcattcaagaaattgttagagccctgctatttccaagcaccgtttattgttttaaagatatgtttcaagttggagggcagaaaggagttagaggcatgatccttttcagatagaaacttttcaggaaaagaaaatagtccagttgtttaaaaaaccctggattttaaaaagagcttagagagtcggcctaagtaattggtgcaagacagtttaaacagaaacagggagtctcacagcaagttggctggaggagctgactcatacattgcaacataattatttcccaaataacatgcaaacaagagtgggctcaagctttctggtctctctctccctaacaagataaattagaaagaaataaagtcaaatccaggaagacttcatagaggtaaggcctggaactggttcttaaagaaccactagaattcagagaagcaaaaggagtaagagtgggcataggacttacaaagcaattcatttggagaagaaaaaagaaaaagcaaaaaccctggatatagcacaaaactgaatgaatgatctctctaagagatgctattatcaatgtgaaaatgatgttaggatgtgttaacaggaacgtggcaggaagcactgggacttcagccaggccttggtcagcttttattatgtccaattttggtttcccgtttgaagagttgttatagtcaggctgatattaaaaggatggaaaataggcattggcgtctagcctagaaaagacgagactaaaggatgacttaatacctgtggccctcctagagataagtaggtttctatttcagcaacaggaaatctagttcgataacaggataaattgagcgtgagagtgattaaacactgggaccttgatcacaggatgtcacctactgaagtatagttctttagctctactgctttcagagtactgttcactttctgtcttataatagaatttttgtatacatgtcttatctccctttaggactgcccttcttatctttgcatcccccacagcacttagtgcaatgacttgcttgtagtaaacattccaatagtgctacgcgaagcaaagcaaaaaggaatgtgctgggacaaaataaaactacatgctcaccattataagggcaataagacagtgtcacaacccaagcccctattacaggcctagagacagatgaggcaaagaataattaagaaacgtgtatcagcacaggccatgaagacgctggtgaagaaccactggaagactaggatgaggagtaaactgtgatttttccacagcagctcctgcattcaagatcacaggacatgacagagcaatatagtttaagtgaacacgttcaacgccatggcaggggcaggggatgggagatgccgtcgtctatgaggggaaaactatgagaggccaacagaaaggaggaaagagatgctgcctttgaatatgtaaactcctttacctacattcctgttcaccttggggtgggggaacagctgtctaggcaagattttttgcctagttctaagagtacagagcctatgaatttcttcataagaaaatttatctccaacagccttttcaaacgtcccctttgtactactcgaactgttgcctccctagtggtagatttcccttaggtttatgtgtttccatagtaagtgaatggctctgtgcatgttatgtgtgtgcatgtgtgcgtatgcatgcatgcgtgtatatgtgtgtgcctgtgtgtacatgcatgtctgtatgtgtgtgcatgtgtgcgtatgcatgcat

SEQ ID NO: 49694 - DNA, 3967 bp, Homo sapiens
atgacattgggtgagttgtctaaatgctctgtgctttggtgtccttgtctgcgtgtgacatgaagccgcagatctcaaagatctctttcattccgtgaaagcgctctcaatgtgtgaagttgactgcttctcctgctgtttaccaagagaataatcttaactctacattgtggagatcggatttgttctcacttgacagaaagccagtcccacgagcagcttggtacccaaataccagtctgtttagtgctcattagagatgaagaaccatattcataagtcaagctgagacggagtgtcatctccagacagaatcaacaccaccccctcctcaggaactgggatttggctgctttccaagccgctgctgaccaggttccattgcccagcttggctgatgagatcactggcagagtaccatgggtgcagacggggcctgctgtttcaacatgttctcaggagggctcttgcccacatttcttggagaggtgtgagcaccaaacatgctgaaccatccagcccatcactgagcagggccatctctcttcatcccttttcatttggtttgcatttttatgtcatgctccttccctggataaaagggataagaggagtttctcagatttgatttctcagtgggaactgtttgctttggaagccacctacaccaatgctaattgagaacagagctcagaatgggagcctgagaactgcacccggatgaactttttggtgggctgatttctgttgatcttgtcagaattaggttgtatatgcatgtaataccatgatcaactattttccaaaaggctgagcaaatgcatcagtgtctttttcctttgaccagttacttaccttggaaaaattatttgtagttaagcatataaagtcttcatcaggaaaactactggagatcctggccctgactacccagcaataacatttctggaactcccgaagcaatcagtgctctctgatcgctaaacatgatgggcttctattagagagattacagtaaaaaataacaatcagctctctgatgatcctgtgaggagggaacgggttgggaggagtagatttggctgaggacaagcccagactttcgtcacagggacagaccaacgtgttaacacaaagggagaacacgggagcatcctgcaccgtgcatttcagccacagatcacatggcccctccgcgggcccagcccacgccctgaccgcccggcctggccaggtctccgtatctctctgccccgccgccccttcccaactgcggacatgctgggtggatccggatcgcatggaagacgcagcctggccgcgctctcccagtgagtcctcatttcgtctctttggttttttcctttcttttttttttttataaaaaacaaacgaattgttgtaaaaaaaaaaaaaaaaaaaaaaatgtgggagtgggaggggagaggaggagacaccaggcaggaaaggaatgcagtgagtgtgtgagtttcagacctgtctgaaactttctggtttccacttcatggttgctctgattcgctggcttttctcgtttccattttaatggtggtttgtggaccatttgccaggagtttatacctaggcacgggtttctccgtttcaaataccaatccataaagcattgtgtttctaaaggtctgctgttaatttagaccttagccctccgttcagaatgatccatttgcagggctcagagattttggctaaagcacacattgcccaatccttagagtaaacagccaaagccctcaatatactgaccatctgactaagacagaacaagacccagagcatatgctattgatcagggaattgttcagataacggactccaagggtttaggatcatgaaatcctggaatgttaaagccagaagggaggcctttagactctttggtgcaatgctgtctttcaataggcagggaaacagaaaccagaggggcaactcaacttaccccaaagcagacaacagtcggtagcaaagccatgtctttgtactctcatgcaaagggccgttttcacactggtgtttatgaggtttgaaaaacttactgggtcttgggaaaaggtaccgcacaagaattagaacaccaaatggcctttcagtaaatcttttccatttttgagagttttggcaccgattcagcatgacaattgttgttccagttgttccagcgtttgtgcaacagttaatcaaataaacagagaaactcatcagggtcctaaaaacaagacccatgtccattacattagcagatctcttggagagctagtttccgtaagtgtggttggttattcacgtgggagagctcaaagggactttagacgttatctgtatagtccagtgcttatcaaactttttaaaaaatcaaatttaatcttaaggggaacgctattgtataaaggagatgttctggttaaagaaaaggtttgggatctagagctcctcatcctcgctctactctgcagtcatagcccactgcacaattctacccctctcctcatccctcttctaccccacctccccaccctcttcatcaaaacttccttggaatcctaggtctccatggaatagttcagaaaccactgatctcattgaaagccttcatttcagatgaggaaactgaggcacaggaagggcttgcccagggtcacacagctgatcagcaatagagcgtgggatgctaggaaaagagcccagtctggctggctgtctctctctcaactcatggtcctgaggcttgtttccactccttcatgcctatgattctatcagtctcctttctctgtgtctctcttctctgtttactctgccatttcctggatttcaacagctattacctctcaccgggatggttgtcattgcctgccatctggtcctcggcctctgtctctctcccctttctgatccagccccctacagcccccacctatgaagataaagtccattctccttactacagcattcaaatttctccacaacatgccttcactatttcttcccattctgacttccgccagggagaatgttaaaaacattgtggggaaataaataaatgatgggcataattttaccagattctgcagaaatgacaaaagaaatgcacacagggatgtcgagatttgtaaaaactataggagtacctgatccggtgaaataagatcactcacagctccccaaactcagcatatacaagccaccactgtttcttgactcattctattccctacacagggaataccctcaccctcctgtttctgacctcctttctgttctgcaaggccctgatcaaatgctcccttcctctgtaaaccttcctcattcctcacttctctcactctaataacctttgcccatccttctattactagctttgtaccgtcaatcgaggaaaatgacgaggcaagtctcaatcattttaggaggtttacttgccaaagttaaggatgtgcctgggagataggtctatgcctttatctgaagatgattttgagggctccagatttaaaggggaaagggtggggatattgagaagtacacaattttcatctaagtgaatctgtgttttgtacataagatcacataaacaaagggggcagaggaaaaatgcggggaatctgcattttacgtatgataacagacaaaatggggtagggcgacactcagatatgcatttgtgtctggtgggccagggtgactgcacctataaagataagctgtccatttgcattgccatggtgaagttttaacagctctctaggaatgtccttgtggacaaaatatgggggaggcttgtgtagcttttcaccttgtagccatcttatttaggaactaaaaggggaaggctttgagtgacccagttcccggcttgacttttccgtttgtctaaatgcgttcggggtaccaaaatttaatttcctttcaataaagttattgttgaaca

SEQ ID NO: 49695 - DNA, 4804 bp, Homo sapiens
taaaacaataaacttttagatcaaatatagtactttcctcatttatctttcacttttccttttgtaactatcctagacctcatttcacacatctcacacagacattggttagaacaaatgcttctttctttttcttttttttttttttttgagatagagtttcactcttgttgaggctggagtgcaatggcacgatctcggctcactacaacctctgcctctcaggttcaagcgattctcctgcctcagcctcctgagtagctgggattacaggcgcccaccaccacacctggctaattttccatttttagtagagacggggtttcaccatgttggccacgctggtgttgaactcctgacctcaggtgatccgcccgcctggccctcacagagtgctgggatttcaggtatgagtcaccgcgcccagccagaatgcttcattcaaggcctgctgaattcctattcggagcctaacccaccctagagctgtgccttacaggctagctctgcctgctgcattagctccctgtgtctttccatgtctgtttattgatctttcttttttgtttttgtttttgtttttgttttgagacagggtcttgctctgtctcccaggctagagtgcagtggcactatctcagctcactgcagcctcaacctcctgggctcaagcaatcttcccacctcagcttcctgagtagctaggactacagatgcttgccaccactcctagttaatttaaaaatttttttttgtagagacgaggtctcactatgctgcccaggctgctctcaaactcctggactcaagagatcctcctgcctcgggatcccaaagtgtagagattacagacatgagtcaccacacccagtctgtttgctgatctgttttaaaggaatgtctacattcaccttttctaggagtcagttctccaaatcactctacctttcactttgtaagtaacggtggggaagaataaaataacaataaaataaaataaaaacaaaactatattcactccaaagagaagaaaataattcccttttgtcctttaaagagtgaaaatattcattacacaaatcagcaatgtccaccaaaggccactgctcatcagcacttagtgtagtttccagagaaaacatctaaaatgcataaaagttaagcagtttttgtatacctagcttttagctgatttcatgactgctgtatagcttctttgtagatagtttctgcagctgtttcatgaatgttatggtatgcctgcgaattgaattgaaaaagactgagttcacacggcttttgaatcagtaagctgaagcccagaggggttaggtacattggactggaagcagaagggatggttttaaagagcagctggttgttcatcttcactaactggcaggcagcctttctggggtgtagctgcgctgcaggttgcacaaaagagtctcaacgcccctcctgctacccaggcctagccctcgcagcactaaatgggtacattcttgacaaataagaaactggggcccgatatgctgattcccacatctgtatttagatcccactcatgacacagtgtatgaccacaagcaggtcacttaatttcactggcctaagtttctccatctgttaaagacatctgttgtctgtcttataggtgaaaatgaaaggaactagctatgcaaagtatataaaccacagtgggtgcctgatcagtgtgacatttccatcttttccctttccctctgaacattcccctccccaaagacccccgaagagaaatggcatgatatcttctgccaacaaactgatagacgccagggtgaaatcagcggaattcaacttgtgattggcatgcatttattaaaacatccttctgctttcaggaaaatcagagctctttatttcagatggagttatctcgttggcttactatttaaaataagaatttgtaccactatacgttggctaactctgatgttaaaggaaacttgctgaaaactgatttttgttttggcaaaatatagaattactacttttcctggtgggcctaagccagattcagtgccaagagggaggtagggagaagtagggttttttttttttttgccagcagatgccatcaatcttgaagtattctggacaagtgaggagagcataaattaagactattgacgtcaaaatccagataaacttgaatccaaatcctagtctcatcattttatcaactatgtgcccttgagcgaattactgaatctctctgagtttctcagctgattgatctacaaaaagaggaatatacatgtaaagtggctagcacagtgcctggtgcttactcagtgctcaaggggtgggaatgggggaacgtaggtgtttcacaataattattgccatgaactgggtatgtaggagatgaatctgggggagcttctgggtaatcacaaaagcatgagtgactgtgatgagttgtattagcttctgagggctgctttgcttgtaaagtacaaagtactatgagccgggtgtcttagaacaacagacacttattgtctcacagttgtggaggctagaagtctagaatcagggtgtcagcagggccatgctccctctgaaacctgtaggggaggatccttccttgcctcctgtagcttctggtagccccagatattccttggcttaggccatcgtaactccagtgcttccataatttcatacggcattctccctatgtctcttcacagaggcttccctctgtgtgtgtctgtgtttgtgtccaaagggcaccagccacactggattagggctcatcctaatgacctcatcttgattacatctgcaaatattctgtttccaaatcaggtcacatcctgaggtactgggggttaagactttaacatatatttggaggtggagtatacaatttgacccatcatctgagtatacatacttctagattaaatgcaacgagcctgggcattacctccacattctaaaattgggcacaatctccacacattgggcacatttcttgcaacctagagaggcctattgtgaaaaatgatattgtgatattggttagctttctaagtgaatattttctcgtcacaaaagagcaaaagttccctagactcaagcgtaggcagggactttctttttaaccccactgagtgaaaggcaaccaggaagtgtgtgcatgtccattcaccccaaaggaaacagccttgcatcatagacagagccatcccaggtctacataagttcataccatggagaatatttttcctacttgctttccctttcctgtatatatgttcaaatgtctgacattaatgaaacattcagtgtgatccagggaagtatcatgagtctgtttttcctgaatctgaaggttttggggctgggagggagatcatgtaaaccaccccctactcccaggaaatggagtggctctgtgatccagctacccctgggagcctaggaaggcttaggtttcatgagcccacctcggagctacagggaaatctccatccaagatccccagataccagaggacaaaaggaacacagcaaagggaaaaactgaacatccaagagaataaatttacaacctacaacagaaggcatctgaaaaagtcaggtggactgccgcttcagtgtaatgaaccactcacctgaataaacagtacaaggtgctggaaattgtggaaacatgattattaacaaagtagaatccttcaatccttaaactgactactgtattactttcctagggctaccttaacaaagtatcatgtactctgtggcttaaaataacaggttgtccttcaataggtgaatggataaatgacttcagtggatgagtggataaataaactgtggtgcacccagacaatagaatattactcagaaccaaaaacaaatgagctcttaagccatgaaaagacatgcaggaaacgtaagtgcatattactaagtgaaagaagccagtctgaaaaggctgcatactgtaggattccaactatgtgacattctgaaataggcaacactatggagacagtaaaaagatgagtggtttctaggcactagggcaagaagagagggatgaataggcagagcacaggggatttttagggcagtgaaaatagttggtatgacactacatttgtccaagcccattgaatgtacaatggcaagagtgaaccctaatgtaaactatggactttgggtgatactgatgtgtcactgcaggttcatcagttgtaacaaatgtactacacttgtgagggatgtttataatgggagaggttatgtgtgtgtgagacggaatatatgggacatttctgtatcttcctctcaattttgccatgaatgtaaaactcctctacaaaaataaaatctttaaaaataaataaatcacaagcagggttggttccttctgagaaccgtgaggaagaatctgttccatgcctctgtcctcacttctggtggtttggcagcaagctttggcatttcttggcttgtagatgcgtcactccaatctctgccttcacatggccaagattgtctccctgtgtctcttcttagcgtctgccctctgtgcaggtctgtctgtgtctgaagccaaatgtccccttttgataaggacatcagtcatattggattagaacccaccctgataacttcatcttcactcagttagctcggtcaagtccctgtttccaaataaggccacattctagggtactgggagttaggtcgtccacatatcattttttggaggacacaactgaacacatgacaaatac

SEQ ID NO: 49696 - DNA, 2118 bp, Homo sapiens
ggctgaggcaggagaattgcctgaaccggtgaggtggaaattgcagtgagccaagatcacgccattgcactccagcctgggagcctgggtgacaagagcaaaacgcagtctcaaaaaaaaaggaacttcgtttggaagtgcagactgagctgggaatataaattagagaatcctcaccttaaaactgacagacaagttataaacatagatgatattatccaaggagcatatgttggataggagaagaaaggagttgaggaagaaacccaataaaaggtacaaaagaaactacaaaataaatttaaaaacagagaatctcaaaaagggagatgtggtcaacagtgtcagagctctctgtgggatcaagtaagattgagagcacaaagggacattggacaatttgtctcaaaggacagcttagaaagcacaagcccataacacaatgtcattttggagttagggctactaatacctggatcaaaaatattgaatatagtcaatatagtgttccgatatatttaataatgaaactgaactgttcttttgatattttgatcaactggtcaagtgattaagatgtctggaactaaaaatcactagccccgtagagatccatctcaagatgattttaggtcaactaccaagtaggttaaactaactgataaacctaactccaaaattgaatgtaaactgacaagacagcccgtgatagggtggatttaactattttgggctattaatgacttatccattgaatttcagaaccagttttggctacagcacatgaaaatatttccaaaggactgctaaatcaaacatgctcagtttacctagttgtactgagttctttttgcttcccacagacattgcaaaaggccaaaactaacactaggcttgatagtgaaaagagaaagaatataagaaatttgcaagggaagatggtgcaggaggagttatggaggtaaaaaggcatgtgctggagttgcaggaaaatatagaactgctctattcatgagccaagccaaggccaatcacatgacaataaaaaagactgatggcacatgcacacacgtacacacacacacacacacgctcttgaagcaggccaaagtccacagtctcactggaaaacaccagttgactccgtttgactttagcacctgatcattgactaggttcaaaagtcaaatacttttcctgtccataatcacttggtcttcttagtaagtaaaatatccattttccagctctgaactcaaggggattttctgcatatagttgcaacataatgccatctccagagaaagtaacatgggaatgagaagcaaagaaatgcattaaaacatttgcattctggaccaatgagcaaaatgcaccaagaacctacctaagcaaacactggcaagaaagtttgtggctagtaattgcttctgactattggcaggaaggaattgaaagaagtgcaaagtgttgggggttccatctcctgtatttttttctaaaaattcttctgtctccaagcctagcttttagtaggctgccgccgccactcctcggttggtttaatatggttttgtcatgatgatgaaactgaaacctgagaggtcatttcctttttcttttttttttttttttttttggtgaatgatcaggcttcaccttctggaactgatggtcagaaagcgagccctgcagcccatagcaacatggcagcaggtgtagccaggtattcctggttcatatccatgagccagtatgaagtgtctgcttttaaagccactcacaaaacttccaacagagtgtatgtgtgctctgtgtgtgtgcacatgctttggttttggggatgaccttctcccgcctctgttactgagagaagataaagctgtaataactttaaacaccatttttgcagtaaatactcataagcctagcatagaattgtcagcctttccctacacatggactggagtcatatttcattgatctgccttttaaggaagcactgttgttctgtatatgacactaaaacttttaagtcttggagtatttggcctttccatgttctgatttagatgaatccacatgagcttaggcagttcacctcttattcaggtatag

SEQ ID NO: 49697 - DNA, 1256 bp, Homo sapiens
gaacccaaagaagaagttaagagcttcatggatcgaaagaagggatttacagaagttaagtcgcagaatggagaattcatgacccacaaacttaaacatactgagaatactttcaggtaagaagtagcaactagttaatagaaactgtgttcacatgcaaagaaaaaaaaaaaaaagtcagtcttcccatcctgtgcttccagacagaaacgtgctaagcaggcagcatgcttttgttgtgaggtcattagccattgtcttagagatactcagtcagcaggtccagttcttatatcactaacagaagaccagcagtcatcgctcagacagggcttagtctgcttttcccattattttgaaaggcagatcatgcttggcatccatgtttttgttcactgaccttttgtgagattagtgtattagaaaacattataactgggattcatgtcattcaatgattctctatatggtctgaccaccttcctaagagacctttctcagtaccattttcaagaatgcattttctaaaggttgtaaataaatattgcataagactaagattgttttgtggcgaaatacttgggaaacactggattaagctaaattcctcagatttctttaccacatgactttgagagcccttcatgttcattttcattggaagtctctaagagggagtgagaggtatggacctactgctctattttatacagtttggaaaaactctcttgtatagcttgagctttcccctcaacataatcccttaccccatcaaactgaaaatctgggcaactgattatcagacagacgagaccagtatattcaggtaaatcctcatttctaaatacagtcgaatcctgagagctctctaccaattttgtagaagaacttgaggtgcagacactgggctggctacgtgattcctgtgctccttccccacaaaacactctctccaaccactggggccaaattccaacctctgttttgtcactggttgctgtgccagatgtgccggagaggagtcttgggtccctgcaatgtggatttccccgggcttgttccttggctgcaggcttgcctagtgaccctgtttttctgaacacttcaaataagaaagtcatcaagcaggtttgagggagaaatctgacatgctcctcacaccaaagcctttgtaatattcaaaagcaggcggagctactagggatggatatttcagtctcatccaagaggctaagatggataaatacggttgcccc

SEQ ID NO: 49698 - DNA, 1308 bp, Homo sapiens
taaaaaatcaagaccaacgtactttttaatattctaacatctccaagtagtagttacaagtattgtacccatgaagtccaggtaattaatttgttcaatgtcacactgttaaaagtcaggtgggctccaaagcacagtcctaaccagcatgctctactgcctcctctgaggcaacagccgaagtgcagaccactgggaataaatagctgcccggtcttccccactcctaaattctcccgacagaccccaaagcctctctgagagcctctctgaccgccctgcggcccaccccgagttcccggcatcctctgggatccctcttcctggagccaaaacctacgcaggctcctttcctccgagctggttgctaggtgatctccgaaggctgtccgaagtctcgcgagggcggacccgttgcctgatgacgagagttgggagtgtggctggggctgcggatctccagcagtggcgttacttctagcggctggataccgggttctccgcgagatcgcgagatcccgagatattctccccgcacggaagcgacgactggcctggccagaggactcgcgtgggagcgaggtgccggccccgacaggacggtgaggtatgcagaagtaaggcggggcgccccctgcgggaagcgagcgcgccccggaaaatgagcgcctccccacaccaaggtgtccaggagtgagtgcgggaaggaactcggccgcccggagttgtggcctcatcgtgcttcccgccaaaaacgccttggtactgtcgggacgcggctaagcgtggacgcgcccgcatctgcccctcctccgcagtggtggaagacacccgcggagcgccggtggataagggccgtttcctgagaccagagctgtatccgcagcaggtcagcacttcgtgcgccctgtgtgcacctgtaaggaatggaatttaggccagtcggattttccaaatgtggagttgtgatgcccaggcagaaacttcagtttcttaggactgaaggtgtcatctatgagacagtcggttccgtggcattggcagtgatttgccatagagcttggacttaacttatatgtagtccacgctccaaaacacgcttcctgtagagaggggcgtaaactaatagatttgaaattgtcgagtcctttggtctctcaagaacgatgggaacttgacaagaaatttcgattattccctggtcttgatattacccacatgggaagatacttgcatagaatggtaatggtcattaccaatacaaccttctggtagctatttagatttctaagaataagaataatataa

SEQ ID NO: 49699 - DNA, 1577 bp, Homo sapiens
tctgtactgagaacgccttgatctcagaggctgtcttatcaatgtttgtatctcttccaagcactgggtctggcacatagtaggtaatcactaaataggatattatcattgttagggtggtgtgactaaattattctgctcaagagaaaaagaaaaggctactctcaagcattttggaatcaaacatttataataaaaaataactccaaactttagtaaacagaaaaaaaaaaagactcagtttctatctgagatttagccatttgcaccaccacacttctctgtgcatgaggcctgccattcagcaggccagagcaaacaaggggctggactcaccttcctgtgggggtgcttctctaagtattaactctacagtctgctcttgtttacttttcaaattcttcagatagttatgtttttgtattttatctagagtttagttggaattagtgagagagaaggcctttataagacttatgttgccacagcaggactagaactcttgttcattaacttttgggtgaatgacaaacttgcaaattttacatgtggttgctggattttgttgtattcagttaaagaatgttggactttgtcctgataagcagttgttttgcttgtggatcagtttcattactttgaggcttgcctttcagctttgttagagtgtgtccagccacaacagtctttactccggggctgagttcattatttaggtgtcagctcacatgttacctcttcagagaaatcttgcctgaccaccctatctaaaatagcattcttactcccactttcccatttctaatcttcatttatatttctgttttttatttttgtagcatttatgatcactgaaattatcttgttttcctatttatatatgccctactacagtgtaagctcatgatggcagggacattgtttttttcaccctgtatggcaattgtctgtatatagtttttagcacatagtagatgcatgataagcatctgttgaatgaatgagtctatagaacaatcctgataagtaactagggcaggtgatattattagttattgacctgtagtaagatttatgttcaaagaggctgccttgcccaaacaaagtcatacaaaaacaaagtggtaaaagggaaggaatccagttatctgagctctagtccagttgctgtatcagctgttgtacaaaaataaccaagaactaaatctcggcaaaaagccacatttcagaggtgaaagagcaagaggagtcagtgagacaaatggaaaaccaaatatgtggaagggagggggaaacccaggaaatgtatcataagagaagtgcgcttaaggagggtgaccatcaacgtcaaattgatgccgtacagtatcacaccaaaacaccagatcactgcacagcctgcttggcgtggccccatactagtctatgtgaattgtgttcctggcattgtatcacacagtagctctagaaggagaactgagaaaaagttgtgactgagttcactagcaaaccttgagaatacagttccaggaagtggtgaggaattatagttcatcactgtatttaactcgttagac

SEQ ID NO: 49700 - DNA, 2441 bp, Homo sapiens
gaaaactaggtacatgataaccttgaataaatttcataaatataaatatgtttctatctcttctatatcacttcactcaccagtattgagttttcagagtaactactgtatattagtatctaaaagttaattttctgtcttaaaggcattaatatggatgctagactaaatatacagaaattccacttttcataataatagctaccattactatggtcccagtattgtactaagcacttatattatctccagtccccagagcaaccatgcaaagtaggtactgtttccattttacagataagaaattgatgctcaaagagattaaataatttgctagtatgtagcagaactctctgatctcaaagcctctgttcttccttcctcctggatcccatcacctctttctagagtttgcgtttaaaagaactaggggcagggggagggcaatgtagcagttcaaataactcctcctttggaggaagggcaaggaagcagaagagaaccgctgaaggattcagcaatagcactaggtagcagtctcatgtaaccaagtttaacccacagttgaaatttccagttggtcatgtgagcaacggaagcaatttttaaactctggccaggagccccaatgcttacaaaaataaaagctttgttcggctcttattttgaaataaaatagatgttccagctgctccaacatgggcctaaacactgcagtgagaatgctcaggacacaaagttttgtgtccagagaagcccagtcatcattacaaaattgatctctaaaaggggttgggggacagacggcatagctgcttcccaaggaaatgagtaggaggtgacctgggtcctgactgccacactggctgggagcttggaccagatgatcctgatgggtttcttctgaataaaattccgggttgtgtttatcttgcagtttaaatcactgggagcttcgagagttctttggctccttccctttctggaattattgtgtgatataatcaagacatttacctggctctttaaatcagttggtttgccggctacagtgtaggtaaagagtatgtcataatggacaataaaaagttgtttacatacctcatttctgaaaagtcatgggccactggcaagttaggaaacgaaagtgaaatcagctgatagtgacatcagtcagaacaaatgtaccaaagttcagagagctgtttactaggcacgactgcgaaggcaagggggcaccagctcaggactgcatctgcctgccatttcccttccactcctcctttctggagtctgacattagaaagccagcgagaaggaagattcaaacaaccaaccctgatttcctgcttctccttttcatgagtgttcctgtggtctctgcacctcctttctgtaagtaccgatcctgcaagcatcacagcttacccagacgtctactaccttgtaagacaattttgttttcttctcagatatttcatgttctggcaatccacataggggaactcactggttgttcagtatctgtgaccctccctcgctcatgtctgtataatctacataatctaccccctttactctctgctctccttccttccactcttcggcatcaacatgtgtagctctggcctcaaagatgatgaaagtaaggccagtataactggttagaaacgatgcagggctgactgcacacagcagagtcttgcacgcagtgtgtacaaggacatggctgtggcttgtgcaatacactgttcatcagaaataggtaaacaaaagcaggtcaccgaccaacactaactaaaccactattcaatggtagttacgaacacatcataaaactttaaaatacacactgaagattaatatcaacagaaaaacttgtgttcttgcctcaaagaatgggacctaagagatgtttagatcttatgttagtcattagaccagattgctcctcatgccccagtggaaatccatggtggtattttagttctcttgatgcatattttaagagattttttttaatgtgggcttagtttcactaataacttccactatgcttcttcgcctataaaatcaaaggctcctttgaaagagggaaaagacacatatttccttcttccctcatgataactgaagagcatttttcagtatccacttaccataccccattccccaaaatctcaggtctgagactcagtccatgagatattttttcaatcttgcacatattcccctttctcaactttctttccagcttagtccctgctttatctaattactaaggctgttttgaatgcctgttttataaatttctttttttttcataaatgtagcacataattctaaaaatattttactgcaaatagagaacaattgcctgtaatgtcaccacccagagctaccacagctaacattaacattttcaaatacttctttagtct

SEQ ID NO: 49701 - DNA, 1470 bp, Homo sapiens
ctttatttttaaagggttcatacagaccaacaaacaaaaactgaaactcaaaattatttttaaaatagcaaaagaactgacagcacttcacaaaagaagaaatacagatggtcaacaaacacttgaaaatgttaaactttacttattatgaagaaaaactatcaatgattcatcatttgtcattatcaaagaataaaagactcaagaatatgcaatactggggaggatgggatgagacaggcactctctgaaactgctggtggaaacataagttgattcacaaaaatattcaccatagcattcatagcattataaaataatgttacaaagcatctatgtataaactataaactatgatacagctatatgcagcccttaatgtttaggaaccatttctagttcacatagaatgatgttcacaaagtgggatacaaacatatatatttatgtaatcccaacagtgtaaaacaatagtgtaaaaagaagtgtgctgttcagagtggttatttctacgacctgaagtatagatgacttttagtcttttctctgcactttcatgtattttctagtttcctacaatcagcatgtgttattataaacaggaaaaggtttatctaaaaatggccacagtgactcagcagtctcccctttgccctctgaaggaaacactggcttatcattaaaggacatttaaaagctcattgtggtggaagtgtcattaccaggattgtttaagaaaagaaaaacaaaaaccagggaaggcccatggggaagtagagaagagtgtcatggggtttccaaccaaagatccatatgctgtcactgcaaaatgtttagggaaagaagcgaggactgacttccaccctctccatacacaagttcctgaattctgtccatagttcaacagaaagcatggatgggccatgccagcactgtgctgagcatgcatacgacattaaacacaaccctccctcaggcagctctgctgtcctaagatgtgtaaccaggattcgtacatgaaagaactcagggagcctatgtagcattttcattcgctcatttaaaaaaaaaaaacaaaaaaaagagcccctactgtgtatcaaaataacaaaactgaagactgttcctcagagacatgacactagagtggagaataaatcctaatttatagctaaaccagagtgtgggctgaaggagcccaggaatgctcttgctgcatggatcagatttagagaagcagaaagtagagtaggactctaggagctggggggtggctgaggatgggcagatgggaatgtattcatacacagcctgagcagctgagcaggtgctggactgcacaaggcaagaggggaagctgggcctcaccagagaattccaagttcaagttccaagtcgcaccagatgatggcgagcctcataagagctgggactgaatataaaaaggtgagaggccaccaccttctccac

SEQ ID NO: 49702 - DNA, 4314 bp, Homo sapiens
cactccccagctccttagctcttgctggccctgcagctgctgctcatctgtccatccctaaaggtctgtccacaggggcaggcaccactcagaacagacccttccactgatcttgcccatctgatgttaccatgtttgttgtaaaggaagagactggcattctggacaactggcatcagagactggctgacatggagaacccactctgtgtgtgctgagggcagggcactcaccagtgcagaggcagaagtgggtgcctgtcctcgagggttaacccgctttgcctcccgcccacagcccctccaccttctaaaagctcaagagatgatcagactgaaacacccgcccatcttgctgttctgcctaggctggaagacctggcccaggtcatggaggcccctgctccacttgccagattcgcaggagtcttctgaccagagctgtcgcaccttgctgctgccactggcactgctgccattctcatcctcttgggggccttcattggtgccacattctttgtagccacctgggctgtcagccatgagggaaggaccctcgttttagtctcggattgtaaggtttccatctctgtaccttctcacaaagaagagtcagggcccaagcttaatgacctgttttttaattcaggaaggtaaatctcgttctctcgtcacacccggaattacaggtccatttgtcctcagtgggagttgatctttgattcctacaaagaacaataaagtccggtgaattcccatacctccagtcatcaggcacagttactggtcggtgcagggcaggccagaagtgaccaaggcccaagagactcagacggccattcacaggcatcaggcaggtgtgattgtgggcaggacagcagctcaggagagagccctctgacctccccaaagctggtgccccctacaggcagccaaagccaaccagagatacctcctgcagcctctgtgctgactgactcagcacaggaggaacggaaggaggcggaggcccctaatgttccttctcattaccaccccaaatgccactgtcctctgggtgcccagcccattcaatccctaaaatacctcttaatggcctctccctcatctggccaactcgatttctctactcttctatggtggctcagttaaatgaaactgagggcattttatttcacaataaagtctcattggccaacacgccgcccttaagctaaagatacttctgattggtcaaacttgaagcagcaataggggcccggaggcattaactgtgccagtctgtagattctgaagcccacgccagcctctgatctagtttggcctctcttttccctatcccaattgttctgcctccactcagcagtcctggagctcagtcctcacccagagagatggagttgtgactcagagggcctaggtctctaccttccacttaggaatcaagccagaagctcctgaagcggaggtttgcccaaaaaaaagagtagtcagcgatagtcctctctgaatcataatttgataatgcattgctcatccagatggctgtttacaatttaagaaaaaatattaccaggccctcctcctaacctgcccggccatggggcacacctttgccaatgcaccttcatttctgtcaaaactcagtgatattagtgactcctaccccctaaggcgcctcccaagcgcaatgctgcagtctgtgcggacaaatttagttcaccctggggtgcctattaagtacatttcgcaaacgaggaactgagacttagttaacttgcagaagatcacagaaaagtttgaaatcagctggttggattcgcagccaggtcctgcagactccagaccccgcgcctccccgccctacttctgggccccaagagcaggccgcggcaacttccagaagccgggtctctggggcaccgcgctcgcggaccgacctcagtcccatcccagccgctccctgcctgggcagaatgggggccccgcgggaacgcgatgtgctgccagttcacagcccgccctccctctgcgggccggtacccgccgctggcggcgccgacctgtgggaggcccagagggcgggtgagtgcggagcggaaggcgcgggcgaagcaccgcaggggcctcgctgaccccgccacacgccgggcagggctgcaacggctccttccgactggagcggccgcgcgctcctccggccggctactggcttccctgctctcaggttcccgtctccggctctcgtgccccttcttagcttccagagcggagccgggaggcaaattccaagcggttgtgggacccacgcctcacccggaactttaagccctgccgtctcgcctggcgcccaaactctgcggacctccactggccgcccgcctcttccggccccgcgcgctccggggtcccgcgggctcccggcctcgggacacttccggtcttggggaactcccggccccctcgcagtcccggcgcccgggacacttccggctcccggcagctgcctcagtcggaggtccgcgggcgccccatgctggcagtggtaatgccgccggctggcatccggttggctgcgcgctgggaacgccagcgaggcagcgccaccggcttgaggagggtgaaagttcaattcttggcccctgaagttagcggaagggaacgggcatgttttggaaaggcccgccgggaattccctcagaaaccaggcgaagctccctgctgggccaggcccccctcgtgtgcttgaggaggatgggagcccggcctcggtttgttatcctaattaagtggaaaattaagaaaataatagaatagcgtaagtactaatagtaaaattatagtaagagaaataacaatagctagaatggaatgaattgctgtattaaccaaggctagaaagaatttcagccctccgaaagttaaagcgagggaagagagagaccctctcatattgttttatactcagtacctgtttttttttttttttttaaaaaaaaaaggaagtgaaatcaaagacaggcagcccagcgccaggcccaaaactggacctgggcctgcctggcctaaacctagtagttaaaaatcaactcatgacttagaaaccgatgttattcatagattccagacattctatagaagaacattgtgaaactccctgccctgttctgtttctccctgaccatcggtgcatgcagcccctgtcacgtaccccttgcttgctcaaatcaatcacgaccctttcatgtgaaattttagtgttgtgagctcttaaaagcgacagaaattgtgcactcggggagctcggattttaaggcagtagcttgccaatgctcccagctgaataaagccctttcttctacagctccgtgtctgagaggttttgtctgtggcttgtcctgctacagtccttggttccctgaccaggaagcgaggtgactgacaagccctgtggagcgtccctgcagaggactccggccagcctgactgacgcaatccaaagagcgctcccgggtaggaaatggccccggtggaatgccttgccagagcagcgcatagcaggctcccgagaaggattaacactggctgaacaccgggaaggaactggcacttgaagtccagacatctgaagcttgtcaagactagtttttggaacttgccccactccatgtgagtggaagcatggcctgatcacccacggtgtgcctgtattgacatctttgttctggttttgacttggcttgacttggtaagactagtctttggaacttgccccactccacgtgagtggaagcgtggcctgatcacccacggtgtgcctgtattggcacttttgttctggttttgacttggcttgacttggtaagactagtctttggaacttgccccactccatctgagtggaaacgtggcctgatcacccacagcatgcctgcatgggcactcttgttctggttttgacttgacttgaattgctggatactttggttttggttttgacttggcttgaattttttggtactcggattttgaatttcgtgattttggtttggtataaacggtaaaagtgtgtgtgccctctttacctgttctttgtcttgtggtatgtgtggtgtgagcgtggtattttgtctggaaaaaaaaaaaaaaaaacatgggtcaggtgcaaagtaagcccaccccactgggacctatgttaaaaaaattttttttcaagagagaatttaaaggagattacggtgttagtatgacaccaggaaaacttagaactttgtgtgaaatagactggctagcattagaggtaggttggccacca

SEQ ID NO: 49703 - DNA, 1780 bp, Homo sapiens
tatagatcaggccactgaagcccagaggggtgaaatgatttgcttttgccactaagtagccactaactttggccaggcaggaaaccagatctcctaactcccctccagtgctcttgctgttagctcactgcctctcattgaagtcagtacacacaaacatacaaatcacacacatatacattccaagaacctcgcaatggaaaatcattttagagcaggggaagtttgggtttctctaatgtgccatgaggtcttccacaactgcagaagcaaaattgccgatgagtccctgacgaggccattttaaacaaacaccgcagatacttgaacgcagctaacgttttggactgcagacttctttgcttccactgccactggaagccaacacgaatatctgttgccaaaacgcaaccatctacctaacctcggctcctaaaacctcatcgccatcctggccaaggaggctggagtggagacagaaccctagaccaggagccggggcatcggggctccagcctcggcgatgctcctgactcggggggcggcttcaggcaggtcctgtccgtctgagggtctcagttcctcatccgtcaagctggggtcggacgcgctgaggtctccggcgccccggcgcgagtgacagcgccgctctcgccccggaggcagtgctggggggaagcccgctccccggctccctcgggccgcctctgcccgcgccgctcccgccggcctctcacccggaaccccttctccttgtccgccttgatctcggcgtccagctgccgcagtgtgtgcgtgaacccgcggaagagcaggtactcccggaccagctcgtcagtgcgctccacggcctccgccatcgcagcgctagcgtctttaggggtggtgcggtgagggacggaggggcggggcctgggagaaatggggcggggccggacgcgggcgccgagcacgtcacgccgcgacaggcctaccagcccgcacgcactgggcgaccagcctgaggccccgcccctcggccggctccccgcccgaggccccgcccctgagccagccccagcccgcctggccgctcgagtcacccttacccctcccgaggagtggcgaggggaggtcctggcggcgccggcggcggctttgtctgaattactgaaagtggcggctgccacccacgtcaaacaagactggatcttaagaacatcccaggtagtcccgaggcgggcagggggtgcggcgccctgttggttggcgttacatcgcagagctcccggtcccctgccctcctcctacacggaggaagctggagccctaagagcagagtgacctgcgtgaagccacaacacgcgtgtcctcagagagcgctaactcccccaaatctctgctttcattagtaagacgaattggctacacagcaagataaccaagatgcactgctaggataggcaaatttcatagcagtgtatgtacgctatagtcctggtttcttgtgaaaaaaaaattaggtatgtatgtgtgtacattttttaaattcaggaagattatacaccaagttcctatgcagtcgggtctctgcatcctcgggttccgcattcacggattcaaccaacgaggattgaaaatattttttccaaagttttaaaaataaaaaatagccgggcgcagtggctcacacttgtaatcctaacattttgggaggccagggtaggcggatctcttggccccaggagttggagaccagcctggacaacatgacgaaaccacatctccacaaaaaaaaaaa

SEQ ID NO: 49704 - DNA, 784 bp, Homo sapiens
cacagctgaactctgattgccaaaccatgtcatttctctggctcccagcaatcatgtgcaatttaaagactttgggccagaaggaccctgagcttctttcacccttatagtcctgggcgtcatgctactaccaagaaccttctgggaactttggtctgtctacttagagataatgaattctaaagagagaaaatgaaccactttctctcaggtctcagactatgatcatatctccttgagaagcagctcaaattattgtgagaacctgccacttgcctaccccaccaccttccacctcagcaaagtccccattagctcagggtatcaaaccactcataatactgctagatggtcagtggtaggaatttgcagatttatgggcctataaaatcattcactttcactgctggaatgatgcaagtctcctaggttaataagtaacatggccttcacaaacatcaactggagcacagcgtgggagaattccaactctgttgccacatttcctaaaatccaaaaccatttctgcttctgcaatacctgtgcttctctgtcatggtgcatgctggtatgaattctccctcttccgacacatcattgtcgtcctcctcagggcttctcttcatatcactttctactgtctgtgaggggtcacccagcacttctcttagggaaaccttctatgtctccttgtatcaggatctgagtcaatgaccacatctggtggattccactttcctgtgcagatggcatataagctagctgtccatcctcaaaattccca

SEQ ID NO: 49705 - DNA, 1594 bp, Homo sapiens
atcggtctctagcacccagggcagcttgcgggcaggttctcccagctgacctggaaggagaaggcggggagggggctctggggcacagagaataagggccaacatgcaaataggcatgggccctgagtttaggggactctctgagttctgcaaaggggggttgctgcttttcatggtgctgatgggaacggatatggaaggaggggagaaaaggatagctgaccccatgaagtgggaagacacaaaataggatgtgaaaagattttaaaacaagaagcagcgtgactaacaatgtcccaaaggtgtgttttctgagagaaatcctttaggactgaaattcccttgctgctttgcttgaaaaacctgtggtcttagagcctgaaggcacaggttcttcagatacctgtgctgctatcatggctaaaaagaatcctggacatttatttttctgctttgggggtgagagggacatatccttgtgatcccaatgaatatctcattgtcctctcaaggggagcctggcctatgggtgcctgtgaggccttggggccacagctgtccctagtaacccagctggcctttcagcagagcttcagggaaaccacacatcaacattttccctccattctccctgttccacccaggcctagatggacttggggagaagtgggattgtcagaggagggctttgtcctctccaaatcgaccttacagagtgactcaagtgcttctcagctgtgagtggagtttcattttgctgcaattggctggaagacacattcctgtttctgtgctgagcttggactgcaaagacaaccatcgagaagctgccagcctgtccttgccaggcaatattcagaactccctgccctgctgatggaacagaaaaacaacctattaaaaatgttccacttcccctagaaaagtcaggggttgctgccagagggttcctcatcccgggaggaagtgagggctgcctgctgactcacagtgagtgagtgccagctgtcctacagacacacagcctctgtgctctaagaagccctttgaagcagggtccacattgcagggcctggctcttagcgggcattcctaaatgttgcacgagcccctgccacctttcctaaaggctgagctaactcatcatcttctgaggccctgcaataacagttgctgtcagcttttgaaggattttcatgtctgcttccaaactgtgctgcttatggtgacataagctcgagtcacacagggcttctccccttgtcccaggcaggcaggaggaaaagagcctgcacaacaggcctcctttctgcaccagggcttgagttccacgttagacccactgagcagtggcaactcagtgaactgaactcaagatgtgcggcgtgctccagagctgcctcagcagccacagtggaaccagaactgtgggggcattctgcagaagattgagggatagaggaactctcgttcccttgttccagtggccacagctcagaacactaaattagggcacaggagccagtctcaccacagtctcgattttccaggggattccagacatgatatgtgagcagaggtaacacaaaccttt

SEQ ID NO: 49706 - DNA, 415 bp, Homo sapiens
taaaaaatgatatactgatgttttgctttttgattgtttctgttttttaattttaaaaaagtttacaagagtatgtatctttcagtttagggggaggtttagaggaacaaaaaagggacaaaggagaaagaaatcctttagatagttaatacaaaagtaagtacatttgtgcacctctagcaccatggagagaagccacagaagccagctgccaaaagtaatctcataaatggtaaaaggtaggaggagggtagtctgatgtggtagaacactgcaatacaaggtcaaagagttgactgactcacctctttcacaaagtaactatatgatcttggataagaaatccaaaagaatttgatgtactcatctgaacaatgaagaaacacaaacttttagggaatttcaagtacagagc

SEQ ID NO: 49707 - DNA, 2396 bp, Homo sapiens
atgacagtgagttccaccaaatgcatgtatgtgcacagctttgtcattcttttcccagcccccttcttttctatgagaaaaatacgaggaacttaggtttatataaaaatgtcgatttttcttttgcatacataactaatggattttcaagacaagacaatttattctgataactatcatcctagaaatgtcaagagaacttcccaaatccaaaaataagaagaaaatctgatattaactggagaggaaatttccactcaaatcataaataaaatgtcatcaattaagctgaacatcaataaaactcagtcaaaaatcaagcctcaatacagaacccacacataacccacatgtaatcaaaatatcacttatatttgctagcggagttcacagatgaattctgtatgtgcgccagatttatcttattttgtaatgctggggttaatatttattggtataaatcagggcccacactaagtgtcctggggagaggcaatccaaagaacgcttagtagcatgataaaaccggtccaaaacgaaaaaaaagaaaaaaagccaagtcctaacacaacagagcgaataagcgacaaatagatcacagaaagcaaaacgaaaacggtcctctccggagtagcctgaataaaagatcttcactcataacgtttaatagtatcctacctcacttcattcacttcccaacttccttttacttttcaagggccaccacggggcttccctttttctggaagtgtatattgaaaggatctgtacaggaaagagggaaggaacggacaattctcaagaaggctgagaaacaggtgggttagcaggaggagcataatctagatacttaaggggcagctttaagatgacagatgtggtggaaggaaagactgcaaatcggaagcagctctagtgtggcagatacactgtgggctgattgcaagcaccagaggggggcaaaggctaactccagagtggtagcagtggagcaaaaaaacaagcagcaggacgagtgggcaatgagcagtgggattaatgagcagcagcagccaacacggatcagagtggaagtgatggctttggtcttgggagacgggggccagagggaaaggacgtcagacagggaacaggggattggggaaacaaggagggctgagacctaagaatcctgccccggtgaaaatgcagggggaaaagctggagaccaaaagccgcctcggctccccaattaaagaaattctcgaaggagagtcgctgcttgccgccgcgctgccttctgacccgctcccttttccttatggtaactgctgtggcgtaaaggggagagggaggaagaggaggaggaggaagaagaccaaggaggaggagggtgaagatgaggcggggggtggggagaaaggggggtgcggcctgtacagtcccagcgaagcctccgctctctcgtagccggtcagccccgggtttcccctaagcccagccccgcatagactcacccgcctgccttgcctcgcttttccctcagccgactccacgggctgccgcgtcctcacaagaaaccaccgaacgagcgtcggggaaaaaactcttcagaaccgggcctgattgcttcagcgagtccgacctttacggctgagagagagactctcagctttcggtgggttccacagccagacgggccaccatcttacattagggtaagactcctccggcctcccgtgcgcaggcgcacgctgatccggccaggaggggcgggggaggggcgggaggagcggcgggcggctgagtgggaggttgcggtggccgctcccgcagcaccctgggagttgaagtcctcggagggtaacctcccaggggcacgccgggagttgaagtcctctctcagagggcggaggggatcgcccacctcacgtggctgctggactgatgcctttcttcgtgttttgcttccttctctgcacgcgtgtgctgcttcaatgtcatttggtcggcggttttcactagtgattccgtgtcctcggtgtttgcggaaatgtgctaccccaagactggggcgaggctaaacagtttttcggggagcccggaatgtttattctctgccccgcccaccagggatatctaaagggggcggggtggaggtggaggcaggttgtgggtacgaagagcgcgggatttgatccagggtgagaatttgatacagacttggcgtctgtttgcgaacaaggaggaaacaggcgcctgtttaattcatttccctgtccttgcgcatttggggccaccacccttgatcccttcttcactgtaaaatcaccagtgaagacatacactaaattgttctgtgcagattacccaagagaacggaacacccgtgcacttacaataacgtgcttctgttg

SEQ ID NO: 49708 - DNA, 1528 bp, Homo sapiens
tgtttgctattctaattttgtatccgtttgaaaattttataattaaaaattatgatttgtttcgctctacgcaactatgttgacagaatatatttggtaaactgaaatgtcacggaaacttagtttgtaaccggtcagtggctttttgaggtgtagacacttcataccttacttcactccccactgtaaggaagatttaacttgaagcggagataatgatttgaatttacggcttttataatgtcataaatgggcgtcattttaataactactctcagaatatctttttctattccactttactttttcctctccacttaaccaactcatcattagaaactacaagtcccaggatgcactacacgatgaacgtcggatcgaggacctcgtgtctctgaagtggttgccctcgccttatttgaatgggaataatcccaatgaaaattgatgtttgtgacccagagcagattctggagccttttgtacgcctgggacggcccagcgtggaggggacagtgtggtgcctttttgttcaggcttcgctcaggtcagcctcaccctttcccggggcctccatgcggcagaagggctctgttagtgcgcctctaagatggcgacgcctttggcggtaaattcgggtaagtgtggccagacagaaagacgattgagctgagcgataaccaggtcttcatggagagacgagaccgtgaggtttctcggagtctaggaccccacttatgtgcggtgcctgcttttccctaattctgggcctagagtcccacccctccccagtttgaatggcgcgcgtcggtgctgcggctccagccctcgagttggggtttgagattccaggcagtgaggcttgggccgctggacccaggtgtgtaatctctcacagcccagggctgagtctggtccccctcacccccaagtttcactgtgcgtctgtggtcccgatttcgctggaatacgcatcaggtcttccacagtgaagccagaggacccgagatattttccagccatgagcagaggctgaaagtaggcgtcggagttccttatagggtgggagatcttgcaggcagcgaatactccctattatgaagtcggccatctgaaaggtggtcaggaagagggtggcggggcttcagcagacgtcttctaaccctgcggatgtggttaggccctggatgttcttgtacctttggagctgtagattttcggggtggaattgaatctagaaggtagtaaaggaactctggaagatttggggtggatcctctttcggtgattctcaattcgggccgtaccgccctccagtggtgtttgaatgagtgagtgcattttgattgtcatatttcctggggtacactgctgtcgcatagtaggcggggcaaggatgcagaaagtccttcatggtcagagcagtccggaaaaataatttggtgcctagaatgttaatgcctcgattgagatgctctgaagttcgcgggcaagattaagagtatatctgtgtggtaaatgcttgtga

SEQ ID NO: 49709 - DNA, 1825 bp, Homo sapiens
ccaaacttttccttaccttcaaccgcctttccccacacctcagaccaccctgctcctctatcccataaatatccctaaaacccatctttggggaggcagatttgagatctgttctcccgtctcctcggctggctgcctggtgaataaaccttttctctgctacaaaactcatcatctcagtgactggcgtgcggcacacggcagcatgggccccatacggtacccagcctctaccttgattacacaacacctgattacacaacgctgattacacagcacacctgcggagctttgagagctacaagcctcctttcctccccgcaaagtccagctgggcccaagtagaggatgctgcaaaagcccccacgattcagctgcgaacctagggatgggacccgctgctcatgccgtccttctaggttagagagccctaaactgggctgtgtatcagaatagtccgcgtgctgagaataatatagattcctgggcctcggcccaggtttacagaggcgggatgctcaaggatgcccagccaggctcgggacttgctcttcgcaagtcctgtcgcgcgctcgctgccccgccggttcaggcggtgaggccaacgcgctccgccagggggaacctgggcgctgcgacactgcaagtcgtttccgggcgcgggctgagtgggaggagcggggcggggcgtggcgtgacccggaagtcgacgaggggttccgccccccccgcgcatggggaggtaggctcggaccggcccgcggagctgctgcagtccttcgcgccctcctcgccctccccaccgacatcatgctccagttcctggtgagtggagctgccgaagagcggggcccgctgcctggggcgtgcctcggaccccatttcccccttgaggattgccgaccccgccgacccggcctgggcgtgggtccagcggtcccttcgtcccccgcgcctggtcgtcgcctcgcagggcggccgttttcttcctgcctccccagaaaatccctttgccaatatttttctgcagccatccaagtccctaaaactttgaggtgtcagagagtgtgcgtttccagagcttcttattgtgtgccgcgccccgcgctcattgtgcaatctttgtattaaagcttgtgtggtccttgatgacttttcgtagtccgcccccctttctttctgcgctcctgttccattacatggtcgccggccggtccctgctgtggagccctgctagttggcttttctgaggaggtaggaaggccaggaataaaccgtaaattagccacctcacgaagtccgagaggctaagtcctcatcagacctttcagagttggaggaatgagtcagacactggtatacaagtaatttttcccaaaatgtgtaagcatgagtaagcagactatttctcttggctccttatttgagttaaaaacgagttttctggcaaaactcggtatatttcaaaaattgcttggtgaaggttccaggagttgctcatcaaattttcaagtgaaagtttttctgccaagctattgtgcattcaaaacttgatgctttcaacctctatttttttttattttttattttttttgagacggagtctcgctgtgtcgtcaggctggagtgcagtggcgcaatctgggctcactggaacctccgcctcccgggttcaaccgattctccctcctcggcctccggagtagctgggattacaggcgcgcaccaggatgctcagctaatttttgtatttttagtagagacgggtttcaccaagttggccaggctggtctcgaactcctgacctcaagtgatcaacccacct

SEQ ID NO: 49710 - DNA, 1392 bp, Homo sapiens
acacccctcatccacgcacacacaaaagtacacacaaagtggaagaatgcctggctcctccctcctcctctgtttaccatctgttagccatgctttgagttgtttgaacaagagaatcagtgtcagaataaacttgcttgtagggtgtctggaaggcaggtgcggcctgccacttctaatgcaagctgagaacaaacacggcatactgagcccaaatcggccttctgctgctagagacagaggtagaatttatgttttgctgggatgataccccctaatgtgctgccttaccttggggccttaattagaagcagcagtggccctcgggcctgctgagcttctatttgatgtgattgcacaaaagagctgagatggaaaactagaacttttgttttttcacacattctaaaaagctttttcataaaagcccctttcttgtttcttgtttgctgtcacatgcaccaagataatttaaaaaagatttatacagggtaaacaattggtaaaatctgtctttcccttgtttgttctagtattatcaggttcaatttattttttctctgccccacctcctcttcctcgcaaggaccctcccatctgcagccacctcccatttatttaccactgcctccctgtgggtcccttttccttttccttgggtctttctagagctatcctagtgtttagtgttgaaagcttgaacgtttaaaaaaatattcaatacaaaagtgaaaaatatccacctaaaatgtgggtgttttaatttcataattgcgcccctctgaattgacctgataaatgaagctaaaaagctgtggagatgtaattggcttgctttatacccatagaagcaatggaggacacaccacaggctgttagacaccagcagtaacctgtatgaaatgcataataaggagcaggaaagagatgtgactatgttcctggatctaccacgtgtgttgtgtaaataaattcatgatctcagcccagtggcgttcttggctcaaagcaagtcctaattaactgtctactgtgtggcacttcctgcatagcagagtagccttacccttggttaacaggaacctcataagaactgatgttttctgacatatcaagggggtcttgcacctggacttgtggagctgtgttaatcagaaagataactctcgttgttctctgtcttgacgtctctgggctttcaaattgtggcttattcttgtttgtttttgaggcagagtctcactctatccccaaggctggagtgcagtggcacaatctcggctcactgcaacctctgccttccgggtacaagtgattcttgtgcttcagcctcccgagtagctgggattacaggtgcgtgctaccacgcccggctaatttttttgattttta

SEQ ID NO: 49711 - DNA, 1378 bp, Homo sapiens
aagttaagacaccacagtgaagtgatactcagtttcagaattttaactatttctattttcggtactcttttcacggtcaatgaattcttcaacttcacaccaggccgagagttaaaaaacatgttcctctgatcctaattacttaggttacttcatttagtaatgggtaagtccaagatggagaattacctcattcaaagaaaggtttaagtaactttggtgtagaagagggccaaactcaaatgatcagtgcgcagaagaaactctggatgagccagacaccactcctcccctcccccaagaggccaggaagtcaggtagcgcctaactgtattaacgcagcagttacctgacacagaacgctaccaagttacctggacccttctttcagtttagctcctccctagacgcccctctctccttggtgccgcctccacccaggaagtctctcctcccgcccacccccatccccgcagtccagctcccatcagcttcctcagcctcatctccagcccacctccgtgttctcgcctactcttctcatccccgcttaccttggccacatagtctttcacctcatccaagtctccgtttttcagggcccacatgaactccttgtcgcacatcactgcagcggggcaggccggttggccgggcagaagatgaggaggcggtggcagcagcaagcggatgccgccgggcgagagggaggcagggccgcgcgaagccggagaggagaagaagagaaggagggttaggctgccaggcgggcgaggcagttggccgcggcgaccgttcgggcgggagaaagaaagttcttttgcggccaccgggcccagcagagaggttccgcctggccgaggagaggcaggaacctttacacttccggttcactccccgctaggaccctcccccaacttcctcttcctcttctcctccgcggaacgcctctctctgggtccgcggcgcgaacgccactagtgcgcatgcgcaatgtacaggctgccgggaaggctagagtggagggtaggagccggcgacaagtgggcgggactgggaggcagaatgaaggaggcccgggggaggtcaagacagcgaatggaggaagagtgagagtactttcgatgggattaggacgcttctgcaccaccattaatgggaaaaactttactttttaaaaaacataatcttggagggcatcttgctcagcttctaaaaatgtataggaagagtgtttaatttgaattccttcttccttgccttttccccttccctccctccttttcacccctccctctctccgtcatccagtctgactgggctaaaaacgatggaataacgctattcctgccctccaggaaatcttcaacactaaaac

SEQ ID NO: 49712 - DNA, 679 bp, Homo sapiens
ggtagacgtgaccaactagaagcaggggccaaatgtggggagattggatagtccctcaagaaagggggcagaagtgactggtttcggagggtcacctgtggcggaccttccagtgttcagttctaagcattatatgtgctgaacagacagtaattgcagcagaaaggtttctgctagatcagtgacatgtggtgtgagtagatatttctcccggatctgttgactttggctgcattattcctggtcttgcggcatccaagcgagatctttggccctcccggagattctttgaactatataatacccttgaatagacctcttttgcttaacgagctagagtagatctcgctgtatctaaaagcttttgacagatacaatgttttaactaatttaattaatctatattaattaaactcaatctcttttcttaagaaattaaaatctcaagtgtccaacacaattgttcaccaatttatccctgccagactctggtaatcattaagcaaattccagctacaatctttcagtcaagcaatgaacctttcccagagtaatactgcctccatctccaggaaagctaaattccagatgtgcacatttcaattcttatttctgcataagagcatgaatattccctcttcttcttagtataaaatatcaaagtggatagctaaaaggt

SEQ ID NO: 49713 - DNA, 595 bp, Homo sapiens
ggactaatgcattcttcctaaaataactttttcaccaaagtcaatcagatgagctggaaggaaagagggagtgaagtaatatagaacagaggtggctggagtgacctccggctggctggacaatggtcaggactccaggaatgctgggtagccctttttctgcatttttacattttaatcactgaaggaaaagtcaacagaaatttccctgaggagaaaatcaatgctgccccttggaaagggatgagacagacagaaagagaaccggagagctaattagtgctactcagaaggcaaattaaggccttttctttgacaagctgcaaatagctggttaagtaagagtttctgccacccctctccagcctcacagctgcctaaatggctgatgcaggtacgcaaacaggaagctgtaaacagtaacgcagtcctgggctgctggacaaagtgtaaataagaaaaaggcagaggtttctttagtagaaaagaaactcacaattgagatgaaccaagaatgaataacagtagtaatttattttaaaatgccaatgaaatgtatttattcaataaatacttatccaacacctaccaagca

SEQ ID NO: 49714 - DNA, 1753 bp, Homo sapiens
ttcatcttgctagtagccagggggacattatggtaggaaccaaaacttacccatagcttctccatctcctccaactctccaactctacaaagttggaataaaacaaatgtattggaattttggtgtctcagttccatgtccctactaaatttctcactattagactgtttacttacttgcagaaagccactgcaagttaacagaaggaaacaggatattgatttaccttggccaaggtaaatattagcatttaagaggatcatcttggctattcaaaagcgtgctgggctcaccataagacttctctagtttcaattttcctactgaatccacagcatgagtattagcacgtaactgaagaatagcctcatgaaaacgaattgaccattcctatccagttatctgttatagactgcaagctccaagaaggtatatcagatgcattttgttgtccttgttctgtgacctgcacaacataatgaacaactggccattcaaatgagtttcagtgatgatgatgaaaaccagcaggatcatcagttttgtgactatcccaggcttaaggatggctgtctgttaccaacttacaccataggagtcatcagaaatataaaggacattcacacaagaatggaacaaagttccaaacatgtttacatgaagttgtccctcttcctagttgagaaataagtctacacctaacatcagggtacagagatcactcgtctcatggcaatctcaaaggccaagtcagcccaaagaaatatcattttctcttaggcaaatgccagctatcaaagtgcaaacggaaatagccacttggacctggagttcggcattcaaactgctgaccccattatctctgccacagtgaggctgatacggacccgtgatgggcaatccagcagttgggattcacttgctaacttcccacagacgtttaaaaaagaacatgtcagaaactgtgtcgttgtaaggtgtaagccagatctcaaaacacactttataaaggactcacgtattctcattttaattgcaaaattatcaggagagagggaatctaggttttgtttctccagtaattcaaaggcttggggaggatttccctagtttcaagatccttctgtgcaagttacttccttatatttcgcttttcccatggatcaaatggacaccagtgttgcactagcctcttcccacacccctttgacctgggtatgttatattcaccaagtctcttctatgactttattcaacagctaacacagacgtaaagcttgtcaacaccccaatcaagattagaaaaaaaatctaagggatatttcatgaatgtttactttggaacatttgtgtttctcacaccagggaaaaataacatgttttggaagaataaaattaaatagtgacatttgcttagacactcatggatgcaaaacccaatccgcactggttatttgataatggtgttattgagagtgatcaactccaggccgagttgctgggaaacaaaggtcactgtcaagatgactcactgattttctctaaggatctattgataagctccttgtcaacggaggtactgtcagaagtataataagggaagtggctaagtatattattttatttaatcttcacaacagacatatgagtggggtcataattatccccattagaccaatgagaaaatgcaagctcagagaggctttacaacttacccaaagttgcacagctgaggaaggggtagaactaggaa

SEQ ID NO: 49715 - DNA, 2742 bp, Homo sapiens
gcacctttccctgtgaactcacaaatgcaagctacagggccaaagaacagcaaggtagatgcctgtgcgtaattcatcccaccagctgaaagacaaccccctagctgtggcattgcagctgctggatgagacactgtcacagcgaaagaatacttcaagaacaaaagagaagggctgcccctctgcatatggataaaatgtagcctgtcagtagaaactcctggagcacccattcatcaaaagatatttgaggaacaacatactccaagttctttactgaggacaggaagcacatctggtaccccaacctccgtgctgcccacatagtgtccccatgacaagctcagcaagcaaagcccagaagatcacactgaacatctggcttttgccccagcatgaactaccactccctctcagccctgcactctgcattttttttaaacaagccactctcagccaccacaaatacttcggtgggaatcagcagggaggccctcattccttgtctcaaaataacgtcagccagagtcaaaggccaaagaggtggagcctgcaggccattttgcgaaagtttcaaatatcttggtactgaccccattaaaaaagcgtgaaggggaagcagccaagcctccagtggttttctcattagtgtcccccctcaccccagccccacccccattacaaacgtctgcatggataagaatcaaacaaagagatcttgcataaagtcctatgatcagtgctggctattgaaaacaaaatttcattttgcaaacttaataccaaaaacttgacattaaaaactttaaaagaaatgtgcgtgctctgggacagcttaatcccccaagagatctctgaggcattagtataagactgaacaagcaactggtgagctgtcccaccttccccagagcctttcttaaatatgcaactgtctcagattttccatactcctctgctggtttttcctccgaagagggaggaaggagacttcttggtcgtacagtttaagaaagcaaataaagccgcctttctccctaacgtagaggagccctttcaacacacacacacacacacacacacacacacacacacacacacacgtgtactttttaaaatataaatatgaaagaagaggaagggagggagagagggagagagaatacgagacagatgaaaaggaaatgctacttaatcttgtccagtttttgaaaacctcaaaaaaaaatcaatagcaaactaggcggaggcatgttattctcaaaacacacactccctctcccgcattacagtactgttaacaacagcaaatgatattacagatggaaaaagcctcagggaaaaaagcatgaattgttaaaggaatacaaagtggcattactctcatgagaaatgtaaaggggccagctgcccgccttcatctgctcagacattaaagtacacctcgcccaggacctcttgattctgaccatgccctgccccaaaccctgccttcccgggtcccaggactccagctgctcctcgcgtgacaacacttgcccgctttgaaagccctcctgccccgcccgccgggtcctcaccgtgtggtacatgagggcctcgccgtccccgggctctgacagctcgctcagcttgcggtcccactgcagcacgccctgctccccgctctccagcacctccatggcggtgcgggccgcgctgggccgaggatgctaagcgcaggaggggacgcgcagagctgcctcggaccggcaaggttcctctctctccgcgtgtgcttgcgtgtgtgcgcgcgcgtgtctgtagttttgcacttggaaagcaaacgtctgctcctctgccggagagaggatggccaagcgctcccgtccggtgtcctcggagatccgagaatccccagggacacgagccggaccaaaggctgccggggctaaagcgggatgtgcatccaaaatgaaggcagaagacccgctctcatcccaggaaaatcccttagccgcaagcccacttgccgctacggctccagacacaaactttgagggaccccagggctcctcggctctgctccaggacccagctgcggccccacctccctccaaggcttgaccaattggatatccgccttgcctagcagacccaatcagaagtctcattctcggctttgtcccgcccccaaaggcagaggccgcgggaagtctccgcccacgccttggaatgtagccggggagtgtctgtgacgtcaccgaggaactcctcctgcttgagcgcggcccgctgtctgctgtcgcctacagctgaccaatagagggcttgggtccggaagtgatggactggaggcttgactaatgtgaaaggggcgtctgaaaggtacagccaatgaaatagcgacaagaatacattttgtaaaagagggagggtgagttcagtcctcttgctgagaatcctcagaaatttaccagcgcgccgacagggggcgcgagagttgttgcgcggggggcttaaacattttcgagtactttagttcatttgaatctctcggaatttttttaatggattacatattatacaaaaatacaaatattcctcatgcacatacatttatattagtgcagctctaggaaattgtcattgttcttcacctttttcgcccattttctgttgggttcttctattttttatggacttcacttattgtatgtttttctttcatctgcttgataagagtcaatggcatgcttttcc

SEQ ID NO: 49716 - DNA, 1500 bp, Homo sapiens
gtaaagtgctgatttactgatcatgagataaatacataattgtatacataaattgaatgcataaattcccctgcctgctgcttttctcttgcaacatgtggattaccataccctccctctttcccctccagcccacttttcccctttaaaaactgaagccctcaaaatcacagctagagaaaggcacagaccacagactgtttctgtgattccatgtttatttcttccaaggatgtccttaaccttggcaaaataaacttctaaattgattgagacctgtctcagatactttttggtttacacaacagaagccccatagagacgggaccttttaagacaaaactcccctaagagcttgacacccttgagatgaagagtgtgctgcttaaaatattacatcttggactccctgtcctttcagactggtcccctgatatgaacccaaaaattcatgccctcttcctggacacagtgtaatgcctgtaatcccagcactttgggaggctgaggcaggatccagtcacctcccatcaggccccacctccaacattgagcccaggagttcgagaccagcctgggcaacataatgagataccatctctacacaaaatcaaaaaaaattagccaggcattgtggcacgtgcccataatccaaattacttggggagctgaggtggaaggatcacttgagccgatgaggtcaaagctttggtgagtcatgatcacaccactgcactccagcctggatgacagaatgagatcttgtgtcaaaaataaaagttaaaatttaaaaaaaaatcatgcagtccggatggcagagaccaagagagggtacccccatctagtcacaagatcaagctctcaaggccataaaacaagatgagaggggactctcatctgatttttatttctgggacctacagcaaagtttgtctttacagatgacaacatagaactgtgaaaactgatgagtctgcaggctcttgaacagtgggtttaaaggggttctaggctcatgttctcccctacggtacccctctttatgacggaacaacccagaaagaaaaagacaaaggaaaagagcaacaaaaaaagctatttctgcgagggaagtgggtcaaacagtatgaatattcataccacatgtacaccagagtcactacaacccaaggcttgtcacacaaattcttttttcccattgatcaaaaccatgtagaggagacaaccagtgatttttaccatctcatcggctggagtgcacagagggagagaggccccctggctggtaagaaattcttacccctttgcttccgggttccgggtaaaggaatcctttgcccaggttcctggtttctcttcaatgcagcttccaggacagaagcatagctttgaccatcctgctcacactgccatgttgtgggggctatggccattcacccactaaaggttcattgaaaaatcactggcatgaagcagactgattaagaggagaaaagacat

SEQ ID NO: 49717 - DNA, 923 bp, Homo sapiens
cacatgaataggaagactcaataatgtcaaaatgtaagttcctcccaactttatatattcaacacaatctcaatcaaaatctcaactcattttgtgaaaatcgacaaactaatcctcaagtttatataaaaagctgaagacctagaatagccaactgacattatctaacttcaggatttactataaagctattgtaatgaagacagtgtggtattggtgaaaaaacaaatagatcaatagaacagaatcaacagaccagaaacagatctatataaatacagtcaactgatcttttataagggagcaaaggcatttcaatggggaaaagatagtcttttcaattattggtgctagaacaaccagacatccaaaaacaaacaaacaaacaaaccaaaagtactaatccaaaaacaaacaaacaaaaagtactatagccctagttactcaagagcctgaggtggaaggatcacttgagcccaggagttggaagctgcagtgagctaagttcatgccactgaactctagcctgggtaacagggtgaaaccttatctcttaaaacaaaacaaacaaaacaaaacaaaacaaaactggatctgaacatggactttacacctttcataaaaattaactcaaaatggatcatagaactataaatgtaaaacacaaaattataaaacttctagattataaaataagagaaaatctaggtgaccttgggtttggcagtgaattttttgatacaacaccaaaagcatggcccatgaaaggaaaaaattaataagtagaacttcagtaaaatttaaaacttctgcttcaagaaagatactgttaagagactgaaaaaacacaaactggcagaaaatatttgcaaaacatatctgataaaggactggtatctaaaatatatgaagaactcttaaac

SEQ ID NO: 49718 - DNA, 931 bp, Homo sapiens
gggtaactattacctgcctctagagactgtctcatgtttttatacctcctcttctctgaaaactcttcattttgcattccccaaatttaagccccaaattcagaaaaataagaggatatggacaatgcagttaatttacagctggactttccacctgtaaactctttgtctctaggtctcctggatgacattttgacactcagacaagataagggcagttttatgatatgctggttaaagggtaaagctccccctggtgatcccgcacccccaaggtcagtttctttactgatgatgtgcaacaggtcaaaccagctgagttagctaggcttgattatgtggctcaagagagaaaaattcctgctgggaagcttggttttgagttgtagcctaagctaatgtattcctcacacagatcttggcggttcaatctggaaacttggtgtgctgcgtgtgaatacagatgctgggaagcttagcctgggatgccatctctctgacccctaatgcttggctgaactcttctgctgcactcggtctttcctctgtaaatcacagcattgcatcactatacgctggagtctggtgagtactcacagatgtctcagcttggaaaatcttttcagtgaagatgtctttttatgactaagctatcattaaatttctcgaagggttccctaggtaccacaaagatttattttaaaaataagtaaaaataatcagatttgtcattctccaaattttcaccaatttgaaactattgtgcaaaatttaagatgaaagacgggtagcttgataaatcacagcaaaagttcacctttccagattaattatgtataagtaaaatacattaatacaaatatgtacccatcagttttgtacttttcaggttaaaagaaatatacctatgtttaaataggtatataatagt

SEQ ID NO: 49719 - DNA, 1351 bp, Homo sapiens
tctaagagtcactggaacttacatgtaagttcctacagtattccatttaccttcatgacataggctctccccttaagagttaataacagaccatgccatgcatttcagaattttgctctgatcctagtctttgccccactgcaagttgacataactaaatactacatcttatcattaaacggatacaagctgccttttcaaagtaaccatttacacaatctttgagcctgaaacctggagattttgtcttctggaagagaaagcaaaggaagatttgccttgagctttgactaacaggactgtatcaggtactgttactaattaacactgtggtgagactctaagatagtaatccctgcattcatattttcagttcaaaagacatacatcctttttcctagatcaggggacttccatttcactggtagacctcaagctgagaattctttgaactctaccagaagcagacaatcctctaaagtaacaattgattcaaaaccctccattgaagctaatgattatgtaaactagatagcttttactaaaatctctggaacaagattaattttaagataatttaatacacttttccttttgattttttttactatggatcttgcctaatagcatatgttgaagctctccagtgactgggtcaagagttctcagtctgttctcctatacatttttttttaaacttctaagcctctgtggtcttttcttgtggcatttcaagagaaagaaaacattcttatacatttttctcagaccttagttactgctgtaaatctgattggtggatcaatatccatttgaccccgctgggggaaacatatgtcatagatgtttctttaaatattgtcaagatagatgttcttatacaaatttcttctagtactgaaatgtctctcacattatgagtcccaaccttcaaccttgtaaaaattggactttacctccacattacaaaatacatcttattagatcattaactaaacccaggaactccgctccgctctctgcaatggtcagttgctctcttcagagtcactgtatcctgcaggaattatttaacttcactcagaaaatatgtccagcattagggtccaatgattagttctctgttttgaagatacataatgtttatactgtcctttgagtccatgccctaccaaaatactattccttatgtgtacactaccactggaaacgcatcaaacagtttaaattcattacgcagggtctgaatggataacaacatatttcatcttgatttcctcttcactaaccaagagggagtttatgccagaacaaacatacatatctacatatgtatttgcataccttggtg

SEQ ID NO: 49720 - DNA, 804 bp, Homo sapiens
catttgttgtatcaatttaaaaatgatattaaagaccattactgctatgttccacattgccacagcctagtttaaattactgtgtctagctgaatactgaacatgttatatatacgttatgtgttaatgtgtacataagcaagaatgactgttggagggagggcaagtcaattatagacaaactttattgctgaaatacctggagttcagtcaagattgtgatgctccctgcacggaatgccaatcactaagtcaacaaggattgccagagaagaaggctttaatctagtcctgcagtcaaggaaagtgggagttcagtctcaaatctgtctccctgactgaccaaaattgatctgtttacatagcagggaaggtgcgaaaagaaattagggagggataaagaagaaatcctgatgaatcaggtatttggtatctcagtatcaggatgtggtgatctagtgagtttcagtcccttgcctgagggtcagtttcctgaggaaaaaactcagttaagacataagtttcaagttttaagacagagggcacatttctatgtttattcaaaaatccataaatatgggacaatttggccagtttcaacttcaggacattttaaccattgtggactcagtgacctgtgaagtgtacaggccagggaaacttcctctttgccttctgaagtttcactgaaaaatcaactcacaaaaggcagattaattggagaaaaggtattcaattttatttaactatatgtttacacagggagaaccacagagtgattacccacccacaacagggtttaga

SEQ ID NO: 49721 - DNA, 1590 bp, Homo sapiens
ttgcactccagcctgggtgacggagaccctgtctctaataataataatgataataatgtagatacttgagaatgaaagtagatgtttattttcttccctgtaaatttctggacaccacgcctcacctccccttcccactgtactttggttgtcacacttgtcattcataacatctcattttacaggcttttttctggccttttgactcaattactgtccaagtcctattaatcatgttgttatttaattaaccaaacaaatatttctaatgttgctgaaatgtgtgtctccttttcccagctatttgatatttgtgactatgaatcttataatatcatctatgtagccagtttgttcatttttcgtatcctcttatcttctctatagtgatgacttccaactgtagcagggggaaaaaatacaatatatgtccccaaggctttctatatcctgcccaggactataaaatcactagaaatacatttcagatttattctctcgctcagcctacaacaaatcaataggtgtggaccagagttcacatgtctgatgtgatttgtccagcatttggttagaacactaaagaaagcacaagtagttaaccaacatttgttgagcaagatcagaacaatcaccctttgatatgaagtcagcacaaatcagaaaatagaatcaaccctctcacacacacacgctctaaaagatgctttgaaaattatatttgatgagactagatgtttgtcttcagagaaatctcattgctgtttctcattaagaaaaaatgtaactaaaagaaacacattcgtatatttaaatgccatcataactgaggcatagggaattatgtggaatctgaaaaatggtgtcttactctattttgtgctgctgtaacagaatgcctgagactggataactgataaagaacagaggtttattctcttacagttctggaggccgcaaagtccaagatcaagatgccggcaggttagggcccagtctctcacttccaagggtgtaccttgattgctgcattctctggagaggagaaacactattactcacatgacagaagagggagcacccactctcacaagccctttttatggtgacattaatcctaaacacctcccattaggccctacctcccaacactgtttgtcaaattggagattaggtttcaacatgagttttggaggggacaaaaataatcaaaccatagcaaatgaaaaatcagtgttcagggaacaggatatgctcattcttatgtttaacgtgagttaataaaatgaacaaacctgtagctaccaaatgttattaaaatatatcctaaaacataaaatgttcctcaacaatattttttcctcagtttcattgagatataactgacatataataaactgtccatatttaaagtatacaatttgaagagtatgacatatatacatctgtgaggccatcaccacaatcaaaataatgaacatatctatcaactctataagcttcctcatgccactttgtaatccctccttccacccatacttcccccaactcctgaccccaggcaatcactgatctatgtctgtcaccaca

SEQ ID NO: 49722 - DNA, 1136 bp, Homo sapiens
agccaggcatggtaacttgcacctgtagtcccagatacttgggaggctgaggcaggaggatggcttgagccagggaggtcaaagctgcaatgagtcatgttcatatcactgcactccaacctgagtgacacagcgagaccctctctcaaaaaaaaaaaagcatttgagcaaatgtaattaactcagacatggtattcagattttgtttaataaaagcaaacaaacgtaaattaaaaaaaaaaaaaaacaagctcataaggtcaccaatccaaaagccagctatgtaggcttcctgggcaggcacattatgcaagccttttgcttaatgactcatattataggagtcatttcttactatgatagaggctaaagttagcatacaaggaaaaggtggtcaaaacatgctttaaattgtcctttaactttaatcctttaaattgtccaaaaagtacagttgtgaatagaaagcaatatttatacgtatacaatgtcaatatgggctgtatgtaataaagcatacttgggcgaaatattggtgtttacttacgtaaacagaaacagtgtgtgcagctgagttcatgtaatgtgccattgctattgcctcatcaggactgtcttcactgcagctcagcagcacctgagaggcaatgtgggggtgattaagagcctagactggtgcaaggttgcccaggtcagaggcccagatctgtcactattggctgagttgcctagcatttctggacctcaattttttttctctgtaaaatggggataataatgtcaactatttcataaagttgttatgagttcacatttacaaagcactcacaccgaacctggcacaaagctaatactatgtatgtttgttgaataaaagtaaattaaaatatcatcagcctatgcccaggaatgaaaaagaaagtaaaataaatatcaaacagaatttccacttagatgggattgcaataggaacaccaaagagacccagagtagcaatcaaaacacacgtaacacatttttccactactctcttcatgttaaattttctctgtgtttttaaggcaagaaaaaaatcattgtccaacagaggaaaaaatcagatattaccaattttgcttaccctttcttgtgaccaa

SEQ ID NO: 49723 - DNA, 665 bp, Homo sapiens
accttgtctcaaaaacaaacaaacaacaacaacggaaaaagaatgctatcattcagaaacatttcctttaaaagaaaaaaaaaagaatgcctgacactgggtaatagataataaacagaaatgtattggctcaaagttctagaagctggagagttcaagaccaaagtaccagcacctcactagagccttcttgctatgtcatcacatgctggaacgaggaagggcaaagagcacaagaaagcacccctcctcgtctgagccctttttacaatggcattaatccacgactgaacaactcccattaggccccacctcccaacacagttgcactggggattaagtttccaacacatgaattaggggggacacatttaaaccacagcaattcccaataagaaaatccctattaccaaagtcaacaaagactttcatcctgccaaattcaatagacattttgtcttcctattatttgatctctttcaatacagttgactaccaccttcttctgtaaacattttcttctcatggtgttcgtgacatctcatgaccctctcatggtctttggcagcttcttctctgccagcttccaaatgttgttatgcccagtcctctaccctcaatattcttgtcttactagctacactctctctataggtgacttaatc

SEQ ID NO: 49724 - DNA, 516 bp, Homo sapiens
agaccctgagatgaagagaatgcatacaagagtgatttatttcgaagtactgttaagggagtggggaaatgtggctgaaaaataagaggttaagcagatgtgaggtagaaatcagagtcctacagagagcaacttaggctaaatgtcacagaaagctctggagacaaagttgttcacatctcagaattacacagtcacaaggcaaagaaacaaatattgatacttgtaactttagttcaaaggctgtcccagcagggggagcagggtgtaaattcctgggcacatctaattgagtagatacacaagtcccagtagcctgaggtctgtcctctaacagatgcaggtgtcagctgtacagagtgagaggacagtgcacacaagacaggtactggcatcccaggaagcatgggcaggtgtcttaatccagctgggccgctatgacaaaatactttagactgggtgatttagaaacaatagacattgattgctcacaattatgaagactgggaagtctaa

SEQ ID NO: 49725 - DNA, 751 bp, Homo sapiens
aggccaacttggatttgaatgtgttctaaaattcatcgaccatgtgaccttttgcgctactgaatttacctctctgtctctgagcttcagctttccccctggtaaaatgggaataatatctacctcaaagagtttctgtaaaaatcgggaaaatcagagcaaagcagctggcatagtacctccctcatagtagaggctcaataaatgatagagatgtgagaagaggagcagctgtggttcaggtagtaggaataatagtatttttggtaatcatgggtgagttaatcattaaagagccaagggccaaatgtcaagtggttaggtcagggggacaaaactaggagtgtattcaggagatcaccaagcaaacaaaacaaatataaaaaataagacagaggaggtcacagtccctaggatgcattcaggaatgaagaaacagaaaaaataggcaagtgtgcaggaagcaaagcagatctttctccaggagaacgaagctgcacctgaggctgcttccgccagcatatgtgatttctcttgccagtcagcatcctcttctcaaggcctaacaggatcctggcctatcgcaggattttgctcttgtagggcaaagtttctttatatgtgccagctcattctatctcatgcatattctgtgaattctgtatgtgtgtagtggcagctaatagtatttccacctggacagagggaggccagagtccctgacattccctgcactgatttgtctactgag

SEQ ID NO: 49726 - DNA, 1429 bp, Homo sapiens
acaagctaaaaaatctggggccgggtgcagtagctcacgcctataatcccaacactttgggaggcctaggagggcagatcacctgaggttgggagttcgagacctgcctgaccaacatggagaaaccccatctctactaaaaatacaaaattagctgggcatggtggcacatgcctgtaatcccagctacttgggaggctgaagcaggagaatcacttgaacccagtgggcggaggttgcggtgagtcaagattgcaccattgcactccagcctgaggcaggagaatcgcttgaacccaggaggcagaggttgcagtgagccaggattgcgccattgtactctagcctgggcaacaagagcaaaattctgtctcaaaaaaaaaaaaaaaattggaggctgtacaaggtgactcatgcctgtaattccagcactttgggaggtcaaggcaggtggatcacttgagcccaggagttggagaacagcctgggcaacaacatggagaaaccctgtctctacaaaaaatacaaaaattagagaggcatggtggcatatgcctgtagtcccagctattcaggaggctgatgtgggaggattgcttgagcctggcaggttgagctgcagtgagctaagatcatgccactgcactccagcctggatgacagtgagaccctgtctcaaataaatagatatataaattttttggaggggaaacatatggccaagcaaaaattaaaaaagctaagatggcaaaaacagactgaacttcaagtctaagcagcaattgaaggttgaaaccaaaatggctcagagttcctggcattgaatgtgaacctgaaaagctggaggctaaagtgctgaaacctactcagaaagaagaatgcagcccatgccctgtgcacagagagctggaccagggccatgtacacaacgctgctgtctccaaaatgattatttagaaaacatgacccaataaagtttggcaggagcagtggctcacacctgcaatcccaagtgtgattgggaggccaaggtgggaggatcacttgaggtcaggagttcaaaaccagcctggccaacgtggcgaaacctgtttctcctgaaaatacaaaaattagccaggcaaggtggtgggcacctgtaatcccagctatttgagaggctgaggcacgagagtagcttgaacccatgaggcagaagttgcagtgagcccagatcatgccactgcactccaacctgggcaatagagtgagaatctgtctcaaaaaaagaacacattacccaataaagttgatagaagaatgtaaataagaatataattgacctgaggtgagaaataatttcataaacacaattcaaaagtataacccataaagcaaactattaatgaatggaattatagccaggtcaaggatttctattcaatgaaag

SEQ ID NO: 49727 - DNA, 660 bp, Homo sapiens
gctccaaaggacactttttcaagatgttaaaatataggttttatcaagcctccagcaaatgcataatccctatttcacataaaatatttcagagaataaaaggaggaaaagccaccaaattcaatttaccttgatgtcaaatagaacaaaaacaatataaccttacttacgaacatacatccaaaatgctacattttagaaataacaaatcaaattctatagtacagtcgatcctcattatcggcagattctgtatctgtgagtttgcctacttgctaaatgtttttgtaacgccaatatcaatactcacagcactttcacagttatttacagacacacacagagttgcgaaaactttgagttacccaactcacacattcctagctgaagtcaaaaatggtggcactctcctttcttgttccagcacctattcagtaaaaggtgtcctttttgcagcctatttagtgccatatttttcacaattttgtgcttattgttggtaatttactgtttgaaatggtccccaagtgtaggactgaagtactgtgtactgctcctaagcacaaaaaggctgtaatgtgacctatagagaaaatatgtgcattaggtcagctttgtacaggcatgtgttatatagtggtactggccatgagctgcatg

SEQ ID NO: 49728 - DNA, 1075 bp, Homo sapiens
tacagatgcaattggaaagaaacacaattcaaccaacagttatttttctcatctctgggtgatgtgattctcaaatgtaaattattttcttgtacattctgttttccagtttttctaacttgaagatactttgaaattagaaaacttgttacctttaagttaaaaatggtttttcatttaaaagaaaaaagctttcaagataaagatctttttattaacaagtttgtctcctggacaggagaggattaaaggaaaataaaacaacggcaacaaaaaacaaaatgaaaaagtttgtttgatttttgtctgtgtttgcattactacttgtttctgttacctataaatgatttaagaatttgaatcaattcctaagtaacattttagaccagttcttacctgtgatttggaaacatttaaagcactgaaatgaggaaatcactccagagtgaatggaaggatatcagccactgcaaatgtctgtctaatcttgggacgttgaaccagtttacagagttgcagggggagccaaaaccttgccgtaatcctaccattcactggctgtgagtaatgaccatctgctggggactggagaggacccagcccagtcagtttgactgccttggtttgcatgataaaggaaggtcacagaaagtcaataggattgagagcaactctccaggtggtggaagcgatctgcaggcaaccggcagaaatggcttccactctacgactgcagctctgtaaagaattctctctctttggacatcactcttcttcaaaaggatgttacaaaatcaaataaaagtgaaattcgaaaactacactctttaggtgggcttaggttttttgtgttttgtgtttggttttcttcattattacatggagaagaggggtgaaagaaatatatagaatgtgctttttctttttggatctcaaggggcaaagagtttatcagattcttcagataatagtttattatcaccatagaccaatgaaagctgtcttttcttctgtttaattataaaaacatttcctcctttagacccaaagtcaactcccactcccttcctccttc

SEQ ID NO: 49729 - DNA, 1424 bp, Homo sapiens
acaagacacatcactaattcattcaacaagtctttgctgagttcttgcattgtctagccaagactgggcctagcaactgataacaaatcttggttgcagttcaggctctgccacttatcagctgcacgaatttgtgaaatcactgaaattcttgatatctaaggtctcctcatatgtaaagggagaaaaacaaaacccaccctacctccttggaaagattgttttgaggataaaatttaatgggcatagaggaaatcacagtggaaatataaagcaccataaaactttcgtttattattttgttgatgttgctaaaagagagaaagagagcagatatgaggggaaacgggatgagaattggaaggagtcgctgaggaaccttagccatggctacactggccaggtgtggccaaactgatgaaaactgacacaacgaaacacttcgaaagaactaaagaccttgaaaggatgatcacaatctcagtcttgactgttgatagaaaaactgtgatggaaaagtgaaatgaaactagaggtcaatcaacagcaggcagctccaaattttctcctagtcctaacttggagatattgctggagatcccctgttgtggaaggcaggagcaggatatctcatgagcaatgtcatctgtttgcccagatccagggtcagaattcttgttagtatggttagtgtaagcaaacacccacaggagtgggagaaactgtggagtggggttgggagctgtaataaagctcctatagaaagaacacaccataaatacatgagccaaaagcaattagtttatctaaagaaaggagaaaaaaataaatagggatgttaagcatgtattccctgtcataaaaaaaaaaaaatcaagtaaaaaatgaaaataaaatacattgttgcactgatttatctctaaatgggtagtagaccaaacatttattccccatatttttttaaaaaaagtgaaaatgaaaataaaaagggtcattgcgaccttgaaagcattatgctgagtgaaataagccagacaccaaaggacaaatatcatgtgattccacttaaatgaaatatctggataggcaaatacatagaggcagcaagtacatgagagactgggggtaggtgtgctggagagtattgcttaatcagtacagagtctctgtttggagtgatgaaaacattgtggaaatggacagtggtgatgattgcacaacattgtgaatgtattttagctcagctaaattatacacaaaatggttaaaaggcaaaacttatgttatatatgttttatcacacttttttaaatggggggaaagggcactgatttatcttttctaaatggataatagacaaaacaccagatcataagaatgcttggaatcccagaaggataaagggtggtctctttaaagcatgt

SEQ ID NO: 49730 - DNA, 993 bp, Homo sapiens
accaattttcccaagcacttctataatttataaatctaatgtgttaaatttttacatgtgtggaatgtgaatcttaaattacattcaatataatgagcagaagttactcaattacacttaaaaaaaatagagacaggcaggtctcgaaactcctgggttcactatgtttcccaagctggtcttgaactcctgggctcaaggattcctcccacctcagcctcccaaagtgctaggattacagagatgagccaccctgcctggcctcagttacacattttaaattataatcccaaggctgtgtggaaataaagaaagcattaaagttgttggaactcaaaatgctttaagtcttgaaagagatgggactgtgatctgagttgggtagcatgtagttgcaacttctgtttctcagattatatattaactctctctctccttgttctgtaaatgactaggagagacaagagaccagacctattctcctaatcactgacctttgttatagattaacctcctccttttctgttctgagttttgttaactcagaccagatggcgcaaaagaccccatgactattacatcttcagtatggaacgttaaatatacttttcctgaaagaaaaatatcacctcaaccaatgagatcattgtaactatgcattaagccttatatagaaagatgttgaaattccgttaaacttcccttgtctatataaacaaccctagacatctatgcttctgaacacatacttccattctttggaatctgtacttccagggcagctatcccacaaggtttgtgcttgaataaactctacaattaatcatattttctgaattttgttatttaacgtggacagctgatatgtccagttaccttctaaaatgccaaataaacatgcataggttatttctaaatttgatgccaaaatattaattgtattggtttgacttacttgcttctctctgtatttaattctaagtcttcatggta

SEQ ID NO: 49731 - DNA, 1108 bp, Homo sapiens
tcaggaggctgaggcaggagaatcgcttgaacccaggaggcggaggttgcagtgagccgagatcgagccactgcactccagcctgggcaactgagctagactccatctcaaaaaaaaaaaaaagaaattatgcaggtgtggaagaagtccttgtgagctgagtccatcatgagtcatgggtctaggtggggttagtcagtggccagaatgcaaaagtctgaataacatttcaaaagaccaatcttaggttatccaatcctgatgttatctacaggagcaattgggcaagtcacaaatcttgtgacctccagccctatgactcctgagctagtaaaagattatagaaactatgcctatcttatcagaattcaggcccctctcataatcctaatcttgtggcctttcattagttttacaaaggcagtttgattttgggaagagctgttaaagcaaagatgtttgctttaaggttaaactataaactaaattcctcccaaagttagcttggcctatacccaaaaatgatcaaagacagcttggaggtcagaagcaaaatggagtcaactgggtcagatgtcttgctgtcataatcttgcaaaggcagtttcagcatcactgccaatcatttaggctagaaaagggagtttgagaattcagtgtcttatctgtgtagttttatttatctgcttctccttatacgggagtgggggtccagggaggaaaggtagtaatgattgactttgctattagaatttttgaataaaaagaacagacctcaatctcaaggagggttgaggaaaaagtgcagtcaacttgggataatggattaatattaagtttaaaaatactattgaaaaatctttgtgacactttatacttccatgaattctaaatgttttttgcaccattttctccaatgaaccaattaatatagtgcttggcaagggagtagcatcaatctgggctgggcgtggtggctcaagcctataatcccagcactttgggaggccaagccgggtggatcacctgaggctgggagtttgagactagcctgaccaacatggagaaaccccatctctaataaaaatacaaaaaaatcagccgggtg

SEQ ID NO: 49732 - DNA, 460 bp, Homo sapiens
aaccagggaaatgcacccaagccttggattccaggttttttattggagatcctgtaggcatgcagcacctatgtgactggtcttggctactcactttccagcttcccagagatcaaactgacatatagtggccaagggcctcacgtatataaaacaggtgtgagccataggtcacatcccgagcataaactctctggtcaaattaatacagtatggcccaaactctcaagctctcctcttatcaggcaggatattccaaaagggcagcagtaaccccccaggagcgagtcaagggtcaatcctctctttggaatgtgcaccatttgagtaacctaagcttgctaagttaaccctttattgcacatccaagaagtgtgttatgttgactacaaaattttttaaaaattatctaaatttttaatcttcctgatggtagaaaatttgatgtagtcatatttga

SEQ ID NO: 49733 - DNA, 2233 bp, Homo sapiens
ttttgcttaatgatgctatatttatgcaataaaaacatttgtcaatctgtattaattcctgggaaaacgaaccacttttagtcacttaaaaagcaaatcactgactttaaaaattaatttcacctttttcattggggaaaccctttaaaaatttccaacttgcacgagaacttcccccccttattcttcatactcattcattctagagatgagtaaaattaggttgcaatatccctgctgcctccagagtacctctttcacacagtattttaaaaaattatttccttgtttgctcttcagtacctccactccttcctcctgtgaccctccgaccatatttactcctcctacaagaccaggtctccagtaatgaaatcagttttccaagcagttacttaattaacggcattgagtagacaagtgaggtcccgccccctaggaggagctaacaccgcggaccgaatcaggcggatggtcgttaacaaatgaacccttaatcttttcagaggaggaaacatacacaaaggcccaatcagaagccgcgatttcaggcgtccggagggggcggggctgggcaagcacctcccacttcccaacctcccgccgcggccgacggagcctcgcgggctccaacaggtcccgccccctcgccaggcgcggccgctattgggcggcgcgctccacaccgaagcctcagttgctgggagagggagggcgggggcgggggcggggcctgaggtgggccagggggatgaagagaaaggcggggaggcaagggcgggctgggcgtattccacgagcgcctcggcggttggcgaagcggacggggtgcagcctccccggtgcgaggaacggtctccgctgacagataccctccttccggccgcgccactcgggaggcggatcccgtgggcctgaggaggcttcccccgcccggtttgctttccctccctcgctggcgctgccgcgagtccaccgagcggcctctgaggagcagccgcaggaggaggaggaggtcgtcgggggcggcgggcggagaccgcgctctcgcttccccggcggcggcaagggcaggacaatggaggtggcggtggagaaggcggtggcggcggcggcagcggcctcggctgcggcctccggggggccctcggcggcgccgagcggggagaacgaggccgagagtcggcagggcccggactcggagcgcggcggcgaggcggcccggctcaacctgttggacacttgcgccgtgtgccaccagaacatccagagccgggcgcccaagctgctgccctgcctgcactctttctgccagcgctgcctgcccgcgccccagcgctacctcatgctgcccgcgcccatgctgggctcggccgagaccccgccacccgtccctgcccccggctcgccggtcagcggctcgtcgccgttcgccacccaaggtgagaaccggccgcggccgctggggagcccggggagagggccaggagggggcgggcgcccttgtgcggcgcgacccgctgtcatgtcgccgccgcccggggtgcgcggcgggggaggggcgagcaggagggtctgtgctggcgacggtgacatggagggcccgcgctctgcggcgtgtcgcgctcggccagcaacttccccgggcgctgtggacttgaccgcgccgccgccgccgccgctgctccgcattctcaacagccgggcggcccctgccactcgcacttttgcagacctctgtcggagtctcctgcagccggaatctcgggttctttgccggctgcagccagttaactgctacccgcccgctgcctccacaaagctttgtccaggtccatatgatcctgatcatctcgtctatactcacgttatttgagctgcaggggagaagggagggatgaagatgaagtgatggtgactttctttgatgattgattgcagatcggatgtcatttatttcttatcttgcatgtttggggctctttaccttaatgagttcccagttctcttccctctcctctgctggggacaaaggaaccaagagacgttgttttgttgtgtgtctctttcaaaggttttattttgagacggcgaagagaaataatacaaagtgatttgggttttctggtattttatagataaagctggaagttactgttctctttgtggtgtttattactgtaaaattagacttttgacaggtgttccattgctaactttgacaggtttgaaa

SEQ ID NO: 49734 - DNA, 912 bp, Homo sapiens
gagggaaagattttttgatggggtcttacctacattttccactgtaaggctggacaggtaagccttgtggtttataaatcttggaatgttgtaatttaaaaagaaattggtttatgtactagtataattaaaggaaactgagaagtatattgattaatattataggtcagggtaaattattttgttttgggcacagtggttcatgcctgtaatcccagcactctggaaggctgaggcaggaggatcgcttgagactaattcaagaccagcctgagcagcatagcaaaaaccctgtctttttatttatttatttatttttgaggcagcatcttactctgcggcccaggctagagtgcagtagtgcaaacacagcttacttcagcctttatcccctgggctgaagtgatcctcctaccttagcctcttgagtagctgggacaacaggtgcatgctaccacacccagctagtttttgtttattttagaactcagggattcatgaatgggcagtatcagttgagcaagtggctcagtgctccaaagaaggggcaggagagggaaactttgataaggtgttcttggcatcaagacagtagaaagtacctagttagaggctagttggcagtttctgattcataaagtcactagaggttagttggtggtttctgattagttaagcttaagttcactttgagtttggtttctttttgcttaaataggaacccaaggtgctgtggccatctcagcatagtggccttccaattcattattttaatagggattaagaagactaaaagttaaggctccatccttgactttttaaaaaagcttaatcttcccttaacaaattctgtcaattctcctttctacatctcagaaatcggttgccttctttttatcttcatttcctgag

SEQ ID NO: 49735 - DNA, 608 bp, Homo sapiens
ggccttccccctacccccagtttctgcagcctgcttgaattcctcccttgaaaatgggcttttctttcctaccacatggccaggctgcaaactttccaaacttttatgctctgcttccctttgaaatatctaagttccaacttcaggtcacttatttgctcatacataggagcataggttgttagaagcagccagatcacatcttgaacactgctgcttagaaaccagatactctaaataatctctcagattcagagttccacagatccctaaagccaggggcacagtccaaccaagctctttgccaaggtgtaacaaaggtgaccgttgctccatttcccaataagtttatttccatctgtgacctcctcagcctggacttcattgtcatattactatcagcattttggtcccaacaatttaacaaatctctaggaagttccaaaatttttctcaccttcctgccttcttgtgtgccctccaaactgtttgaaattctgcccattacccagttgcaaagctgcttccacattttaaggtatctttagagcagtgccccactcctcagtaccgattttctgttatcagtctggtctcacattgctata

SEQ ID NO: 49736 - DNA, 3686 bp, Homo sapiens
agtccattagctggccccccacttctaatgtgaccatgggctcctgggggcctaaggagaaggagcctggtctgtccttgtccttatattcttcagtccctgccaccccgatcaggtcggtatctggttccttcagggtgcagcagcctttgactggtggcatttttgtttcatagcctccgccattttcttcactgccctctggacactgattttttccagtgtcccttttagcatcatgcacattggtgcttatctaacctcagccggcttttgagcctctgtctggtttggccccatctccgtctgtgcccgtgtccacatccgcaccctcttgcaatgctagtttcccttaccgtaagggtcactgctaacatattggcctttttcctaagcctccgatctgcttccttttttgcctcttggtcacggttaatatacatcttggtggccactcctataagttgggtggcattcatgcctgcgaaattttttagcttttgcatcttccacctgatgtcaccctgggcttgtcctgcaaatgccgtgttcactgtgcactgattttcagaggcctcagggtcaaacggagtgtaaagctggaatgcctcacagagtctctcataaaactggctagggctctcatcagctccttgaagaacttctgagatatttcctatattgattgcctttttcctgccttcctttagcccttgcaagagtgcttctcggtacctctgtaggtactgtaattggactgcatgatttgaatcccagtgggggtctgcttctggaaactggccctgagtgtatgcctgaacgttaagtgtgccttcaggtgcactggcttctaggcagcagagagctgcctggattaccctccagcactcctcagtgttaaacagtgtcaagaggagctgcctacagtctggccacgtaggattgtgtgtctggaagatggattgcattaaatctatgagggcctgggtcttctccatgtaggagggggtatggtgtttccagtttaggagatcagtggttgtaaaaggctggtagatgaagttccgttgccccccttggacttgaccctgttcatcataatagatgggtccccgtgtctccctaagaggcatttgcatagcccaagcatgaccagattggaggcagcccacttgatcatcttatctttcttccctgacctcctggggctccgatctttccttttggggtgagtcttggagcatgttaccatctgaatctgactccttgggggccgttggcctcagtaaatgggggtagattggaatatatggaagaggaatttctatctcctctggcagttcctgcaaaactggtttctcttgcccttcccatgactttttctttgtctccgtatttgccagcaaagctgattttactttcactttaggctcggtctgagccacaagcattttgcagtaagctgccaggcagggctgcaaccatgcaggtcaagtttgaactacatttagccatgagtcaatataagggaattggtctgggtgccctggctgtccttcgaccccaatcaccaccttaaatacatggccaattgtttccctatctgtggttcctttggctggccatccgacactaaaagagggccattctatttcacagagttctcaacctctgaggggtcaacttcatcccgtaatcccctgcataacctttcttaaaattctttaacatacattgtaatggggtgggttttgacgacttccctctcatttcctcccagttacagcgcaacacactcactctcactttcacttcggaccgattagaccgtccccctcgcaggagtatttcagatgccacttagcattggaggctctgttttgacccccacaattactaaattgtggggcacctccctaagccatatgtggaacactgttagtcccggtcagtcccatggttctctcagagtgtatggtctacgctaagagaactgcggcccccacacatcactccccgcattggttcctcctggaaccgcctctttcacatgcactcacacacttccccgctcccagttcctctttctcaactgactctgcaagccactctcatgtcctgggttggttggggtgtgagcttgtgagcttccctgactttgcaagccactctcacgtcctgtgtttgaccactagttacaccccgggaggtgatcaggctccccttccattcttatgggacaggtcctgcctcgggctcaaaccttaccacaatcctgtagtgcactgttcctggaatcatcctgttcctgcttaggttccattgtgctgtcaggtagggtcaagggagagctgatcacccctctgggttgaagttctcccagtggcgcctggggtcacaggtctctcccggcctggggctccagtctcacaggcgaagagacagtaaacctttcgtctccaatcccgggcgagcccccagaaaatgtttcaggaatcagaggactggagagaccaataggtagaagaggaggattttatttaagtggccactggcccaacggattcacatccaaaggctaggccctgaacaaagacagggcttgacttttatacacacttctgaaagggggttggctagtttaaatggcgtggtgggaatctaatggcatgaaattcatggtgtaggcaagcaggcttacagaagcagaacaaaggcagttaatcagtgacaggtttcataatccttagcatagcttgtgaccttgcagctgcattgaaggaaaaacaggaacttacaaaacttggaaattgagtaatggtaagggggatgaggagatagtaaaggaatttgatttgcttaagcttgctctgagggggtgttgggagagtctctggagctccttcctttgggctctggctttccagatagttttatcaaagctttgccagggccctgcatattgctggccttggagtgagtcagctaagtacagggaaacttgtttttctcttttttatttctgcttcagcctcatttgtgattccttcacccagccttcctgtaatcaaccagggttgttcttggagactttgctttgaaaatatgttttctggccaggcacagtggctcaagcctgtaatcccaggactttgggaggctgaggtgggctgatcacttgaggtcaggagttcgaaaccagcctgaccaacatggcaaaaccccatctctactaaaaatacaaaaattagccaggtgtggtggggcattcctgtaattccagccacttgggaggctgaggcaggagaatcacttgaacccaggaggcagaggttgcagtgagccaagatcggaacaagactccatctcaaaaaacaaacaaacaaacaaacaaaaaacagaaaatgttttcttctatggagactcatcctctaagttgtaattactcagtatcttaacagccagctaagcacccgaacatgttttggtaatgatatggcagactagatttggattaaagccttggtgtgctgcttggtgttagctgtgtgacttttttcaaattatgttttcaaacttttagtttcctaatttgcaaaacaaaggtaataatacctacttcataagactcaataacataataatatgtaaaatgcctgccagggctcaataagatctaaaactta

SEQ ID NO: 49737 - DNA, 759 bp, Homo sapiens
caaacaataaccaagtcttccttgctttgtcttcctctttatgaatacctcatatagattacgtttcagctaagctttggaacgagttcggactggcataaggagacagtgggaggagaggcaggtgacagagaaacagagcgtcacatagggacaaacttcctgaactcaagtctcgtcatgtctaggtccctgactctgctgcctgtccaggtcaatatccaacaaagatctcagaaaaatagaatttaatctgaacatatctacaaccatttaaaacatacacggtctcagcacattccgcttaatcttttgcactaatagaggaaagcagagaacgaccatctcaaaccgtctgtgtgtcagagctagacgctgatgtcctctggaaggttaatcttactaaatcctatttggttcaggctgatattaaactctgcttcacccccctagtacatctaaggctcaggggcagtttagacaaaaagagaaagtgggctgaacctggtatttggcaacaggggaaaaatcacaaacaaacaaaaactgacctaattgaatttgtttactcttctaattccctgacacaatctgtaacataatacagtaaagtctcacaactttagaatattaatgaaaaaagcttttaatatttgttttaaaagtaaaatcataataaaatattatttataactaataaaacaaccacattcagacccttataaatcattaactaccacgagactcagcacacataca

SEQ ID NO: 49738 - DNA, 795 bp, Homo sapiens
caaaaaatggtgaacaactgtcaaacactgaaaagacaaaggaatttcttttatgtcctcgagtggggttgataactgaagacacaaagatgaaggaagcaatcctaccaccaagtcacttgagttcatgtggcccatgaggccaacaccctctgagagcccagcagaggggctgactcatcggacccctcctggctccacctgccacgcaccatgccttgctccagtgccctcttgatacgtgtggcatctgccaccgggaaccagatctcggcgatgacacactgctgggtgacgtcgatgttgcacatgttcaggatgtggtagacagctttcatcttctgcaccttgatgagccaggagtgccagttggcagcggcttcctgcagcaggcgctggcggtgagactctgtttgtgttatgacctatacaaaaaacaacacacaggaaaacagagaaccttcacagagctgtttgacaaggtgccaaaaatggagtgtcacaggccacagcagcttcctctgctctggcaggctcctttgacctgtggctgtcacctggccttgaactctcctgagcagtttatctcccccgctagaggctaaaacccttaggcagagattgtatcttccttttcttctaaattcctcattgtcctattgttatgggttgaattgtccacataaaagagtcctgaactctgatacctgtgaatatggcctttttggaaagagggtctttgcagatggaatcaggttaagaagaggtcatactggatttgaatgggctctaatc

SEQ ID NO: 49739 - DNA, 1192 bp, Homo sapiens
ggaaggagttgagatgacaatagaaacacagagcaaatcccaaaagtgtctgaacaaaaatttgccatcatgtagcgagtgccattgaaagcatttattacctgattgatgtcatttgtgaaacgtcaccacaaccaccatgctgcttccatttaggaagtggagacaaggcaaagttattgccatctgtttgtcttcagtgcagccccacacgggcactcccgtaaccctgtggtcccggagtttgggagagcagggctcccagattctcccacccacaggtgacacccggcacggtcagccagctgtgggtgaactgagaccacctacacgttaggtgtgacaggcgacctttgcagagaatcaaacagcaaccatagggaatgagctgaccttggctgagatggaacgatatgctcacagagcctcttttcaattcactgtccatactgcctcccaaagggatcgttccaaaagcaaatgtgttcaagctgctctccctgctgaaaacctttcaatgcttgcccactgcttacagcataatttgcaatcccttctatgtcctgaaaaccccccagggcctggctctctgccacctggctttcggctgtgcccttttttatgacctttgctctagcttcctgagctgccctccgctcccccactgggcccgccttcatctccaccgtgaagcttcagccctggtgtcacctccttgaagaaggtagaagtaccccaccactgcaaatggggtgcccccctcctctgtgttctccagacatccttatactcctggatgtctgctttcggatggctcgtccttctcccttgctaaagccctggaatgcagagatcgcgtgctatttgtgttggtaactgagccggatctggtgtggctcacagcaaatgctcaatgtttggtgagtgacacccagtgcctgaggcagctccagccggttgcccaaagtgctgccctttagaagcaaccaagggcagtcaggagctctggtctgacaccagtaacgaggtgtggactatcccccatcagaaggaataagtttccatgaggccagtggcatccagccaatgccattcatgatgaagaggatccgggctggagttttttaggcaacagtaacaaatgatgacttgagtctacagatagagaatacagataaaagaaagcatgggg

SEQ ID NO: 49740 - DNA, 547 bp, Homo sapiens
gaagggccccttgcaggccatcggacagcacagccaaggagcaggagccatctgtcctgcacttggatccgggtgacggccaatgcccacaacctcttgcccaccaaagagtggggtctcctctaggcacacactgggaggttaaaaccccattctaagttgctcctgttgtcctcggagcagtctcaagacttgaagtttggcacttggaaggcacccaattaaaggtcaaagtacataggagggctccatgccaggagatcttggcgttcttcttttgaagtctatgacggaaatgctgcattttgaaagctactgggggaagcattgtgagactgaggcaaacacagcagctgggcagaaaatagatctattaggctcctaccgtgggctgagagagctgctttgggatcggccccatgatgcgctttccctaccctgccacgaggctatcaccccccacagggaccacgggaggctgctgctgtacacaaaaggtcctcacctcctccaggcctggcccactcaacaatcctttcacagcttc

SEQ ID NO: 49741 - DNA, 1027 bp, Homo sapiens
cccagaagaatggcaaagcatcttccagaaaggacggcgagggagctggagaataaaagaggatgggcggggaaagccggggttttgaaaacagcagcgataaaggcaggcggggtcgcggccgcgttccgagggtctcggcggagcttacctggggcgcacgaggccggccgggccagcagcagcagccagaggccaggaagcagcagccccgggcggcggcggcgggcgcagcgggcggaaggccgtcggccgctcggccccggggccagcgcgaccccggcgcggggcttcccctccatggccgcgcctcggcgtcggcgccgcgcccccggcattcccggccggcgccccggcccggcctcgcggctcagcggctctcgggtccgggaggggcggccgctgcggctgcggctgggacggggcgccgcgcaccggcgcggagggaggccggagaggcgggggcgggccgggccggaaccgaggacaggggcgccagccgcacgcccgccttgccgctccgcccccttcggagcctcggagccgctgcccggcaacgcgcgggcccgggcgcgggacggcgagcaccccctcccggccggccggacgcctgcctgcctgcctgcctgcctgcctgcggggcggccggggcagcgtgcgcggggctcggcgcggcagaggcggcaagggcggcgaggcggcgcggcccagccctcccccaggacccgccttccggagggagcgcgaggggctcggggggcctgggccgggcggtgccgccccgacccgcacccaaccccgggtcccgccgcgcgttccccggggcgcccggatcagggtaggccggcaagccgggggaggggtcctctcgcctccctcgctcctcctctcccgccgactccttgcgggcagcaggtgtgtggggcgccgcgctctcaggacagcctcggggccgcggaggggacaaagccagacaaagtcgggctcctgcgctagagctcagcgtgcaaggcaggggcgagcagag

SEQ ID NO: 49742 - DNA, 748 bp, Homo sapiens
aggtattaaatgctaaagtatacaacaaaattctacagtaaaactatatgaaattattcaaaccgtgtttttaaattatgaagttaagccaaaggctcttttgtcctaaatcatttagtacttttaatagttctgtgatgaactgatcaggatacgagccggacactgaactgtgtttttttgcaggacacagacaactgtcaactaaacaaataatcatgtcactgtttgtttcatttgagttagcaaacattcccaggatctctggtattagccaggctcagtgtgacctcaaacccacccagctgtggttttccttcattaactcggcaggcatttgccattttttatctcaagaggtatttcacactcgaatgggattctgatggaaaagtgtttttttctttttcccctgagcctagcactaatgcttccctttgataatgttggactcttgaaagccagagtacagccaccaacttacaggtggattccggggttacagtagcctttctcgatcgtctccatgtgctcaaagtccgtccaggttttaccaataagcatctgccaccggtaaggcagatggaagtggactttgctgcagctacctacaaagacaaagaaggggtctgagggactgttgagcagggattctaaccaattcagtcaagttcactgccagctttccccatccatgcctgccctgccccctgccagacaggttccatctataccagctgacactgct

SEQ ID NO: 49743 - DNA, 2948 bp, Homo sapiens
ggagccactgcactccagcctaaaaagtttgctgacaaccattttaaaccctgggacacaagtcaaagtgtttaagaatgggccaagtgtaaaaagtactgtatcgagaaaagtaattgagcagagcacatagtgacagaaagggtgggaggaaagactggccattcattaattcaacaaggcgttcattcagttcattcagaaattagatgggaaggcagaatccgccaagaagggaaagagacttcacaaaaaggacttggtgatgacagattgtgaggaggattaaaaccctgcctgggggaaaagatgagtttgactccatggacaggacacacgcgggagaggaagggcttgggatcaagggaaaggcctgggcagcgaatgtggacctggaagccatctttttagatgtgcagctgtcctcgagggagcaagctctcttagggagaaactgggaagaaaatcactcaagagtcttaacccaaaccttgcagcgcatctgcatttagacgaaaaaaaaaaaaggcaaacggaaacaacagaagcagtggcccgagacgtgagccacactgcttcaaagggatttaagagagttgtcccaaggcaggcggtcaactgcgcgcgccaccgtagagagaccacccggagggaaggcccgcggctgctacaacttcaggaacctggaaaagggccacccctgctacgcgccaggcatcagaaaagcggtgatgaggggcatgggggtgaccgggaagggagggacaagcagagagacctgcggctcgctccggcggagacggaccgggggcccagggcggctgggttactggctccgccacgtctagggaaggaggtagtagggagggaaagactcaagataccaaagacgggaggctctttccttccttcccaaacctgcctaccgcttctctaggccctggctggctccagagcactttattcttctgattcgtgcgggcgggcggggaaaggggtggaggttgagcctggtctcctccaggcactagcattttagccattctcgagaaaatgtctggaggtgccggaaggaagggaactgcaaaggtagaagcgcgggccctgcagaggctcccagaggggagcagagaagggagtggctggaggcggaggctgtcaggtgcggggtcccggcgaagccgtgcccctcccagaacattgcccgcctggacagtccaccccgaccacggctgcggacagcgcccctccctccgggtgcactcaccgctcggactgcgaatagttgcaccggcccagcaagttgagtttgcagagatgcaggttatcgcagggtctctggcagtacttgcgacggcagacccgggctcgagtggtggccaccaccgatcgggtgatcccggcctcgccgccggtctccaacaccacaaagcggtcgggcccggccacctgcagcacctcacagagctgcggctcagacagcgcgatctcctggagcagcgcgtccagggccatgcggcccccgtgggcgcacaggattttggtgatgaagcagcacacctccgggtccgccatggcgcgctggctgtgctggctctgccgcggcgcgggactcggttccgcggaaatcggaaatcgaaacttacaagtgtccaggggcgggcgcgggcggtgctactgctgggcgcgcccggagtcagcgagggcgcgctctccgtcgccgttagcccagcccagcgatccactctcggctctcaggtcaagaggctagatctcaccgaccgggtcctagtggcaggtttacagccggccgcaagggcaactgggtggaaagaaagagaacgcgcgggcaaatctgctggtgaccgcctggggtggccccctctcggttctaggctcggcgagggtgaggttctccagccgggctccgcgagccttctttagaaagaagagaaactaaaagcgatcttggggctctggccggtgttttataagccagccgactgaggcgtgtgacgcaagtcctgagagccctgttgaggagtgcgcaccccacccattcccggaaagagcagaccctagcgagcgcttcctgcgagccgtgcgctctgcctctgttggtagtgaatcttcccagcaactccacatggtagatattattatcctcaccctgaacttgaggaagtaacttgcacgaacacgcactggcatcaagcggagcccagatgccaccgagtttccccaaatcgcgtccccaggccccagatcgtggtaccccaggccccgatgtgcaagtttctcctccaccaccgtgccctcttaaagaacaacgattgccactctccctcgtttctgccttctcacgaacttttggacaaaccacttcttgacatggtcttgcttacctagaatcgctaactcggtgccctgaaccactgcttgtacctcaatcacggtggacatgctaagacatatcccaagatttcagatcggttcctccccgtagagattgggacaagaacttttccaccgtggggacgtactttgacccccagagttgacataaagattgtttttaagtgaaaacattgagctacagaagatgtagaaagaaatcttaatgaaacttcccttatctgactaaagcaaaacctcccgaaaacatggtgccattaaaagcctctcggagtattcagctgccaggaagacagactgtcccattaccattagcaccaaaaaacccaatgggctgggtgctgtggctcagcccgtaatcccagcgctttaggaagccgaggcagtgggaggattgcttgaacccaggagttcaagactagcctgggcaacatagtgagctctcttcaataataataataataataataataataataataataataataataaaaacaacccgggcatggtggtgtgcagccgcagtccca

SEQ ID NO: 49744 - DNA, 755 bp, Homo sapiens
aggagaagagagggaaaagattgttccggtaatgagagggagaattttttttgttcaactgatacttgcccgtgtttttatttttttgtttttgtttattattattattgtttgttgttattttactagaagatctgggtatttttgaaagtttcaatgaaatagatctgaggagagtgcaaagctgaagttgctagggcatgttagggtgacattgagccatatgaacctgttgaagcaccgatcagagagggaagcagaaaacacacaggctgcaatgagtcagctatgctgtaatgagtcagctatgctaaatcatagaaatgaaaagtacataaacatcagagagttgagtcaaatttggacatttggaatgtccgaagtccctgccaaacaggtgttctacaggagatatgggagtcgagagaggcattaatcaaatggtcagacaaatggaggaaggctgcagtcgggggcaggcaccagggatttccctacctcgaacctgcatcactgcaagtgcctccgggagtactgtactggcaagggaaggaattgcaggtatacttttagaattggaaaagggccatattcctctcagaggactatttacaaactttgttttcgtggtgttaaaatgaggctgcaacccctcttcccgtaacatatctgagagcagagaaaatggggatgtagaaatccagaggtggggttaacttggtgacaatggcctgatgtggtaaccagctggctcc

SEQ ID NO: 49745 - DNA, 534 bp, Homo sapiens
ggaaactgtattttggtgcactcctgcttccaaatcacagaactacaactccttcagcagaaattttctaagcttcccgcaccagccagagaccaagattctgcggtgcacatagtcaagggttgctatggagtccaacacggccccaaacagaagtggtccctgaaaatttctttcccagaaaacttgcatttgaaaaacaatgccattccaattcgccttttcctaaagtaaactcataaatagagacaaccaaactttcgctctcagcccagagaacgacgctctcctcccaagaggaacctcggctcttccgcggcagaagctgcacggaaccaagaagccgcgggcgctggttctccaacgagcttttctcccgttcgtaccagcgtccaggcggggttaccgtggagacagaacgtgctgtgtggatgcggcgaaacgctgaggcgcggccttcgctgtgtggtggggactcacaagaccgacgtcaagatggttagtggctctgaatagtaagggagtactttgagt

SEQ ID NO: 49746 - DNA, 2829 bp, Homo sapiens
ttatccttttaaacccgacttccaattaattaattacaagtgagcctatggggcgtgcccaatcaattccttccccatcctgaaatgggtcctttagcattctcataaacagtacgtttcctgaaataccactaaaccctcttaagaagttttctatgatttcagcagtttaggccttctgaatgagcccagaactcctcatctgcttgttaattttccaactgcaaagcgttattgaacatttaatgaccctgccccacgcaacgcccactgcggccgggcgagggaaaccggagtaggtcgaggaaggggaggcctgcgctttcgggagggaagccgctggggctagtctggctgaagctgggcacttccttttttccctcgatacttaaggctacggggacacagggcgggcaggcacaacggctggcgcgtctctctacccttgcccagagtccgccttgaataatcagctaacaaccccaattcccttgaacccagcacgggagacccggcgccaatggctaggtcggtctcagtcccatcccgatgctagccccgggaagctcctggagcgcctctggtttccgggtgcgaatagtaaactgctcgggaaaccccagaaccctccctttgaggaagggtgcagacggcgtctccgtttccacggaaacaggccgagccatgtcgtcacttccgccgacctgtctggactccagactgttgggaggaaaagaggaaaactgagcaacagccacgacagtggacgcgagcgtctcctctgtgcgcatgcgcccgctcagcggcctgcttctatttatgtgggggatccaacatggcggccgcggcgaccctggcgatggcggtgaagcccatcagaacgtagtagcggggaaggggacacggtccgcactcaccgtggcgccggcggagacggctgagggtggtggagggaagaaaagcgacagagagcaagaggaagggcgggcaggcacgcagcgcgccgtagaagcgagcgccggctcgagcaaaagcggagggccagaacagtggggatggcggagccgcgcagagtagcgttcattagcttgtcaccggtgcggcggcgcgaggccgagtacccggggcccgagcgtgagcccgagtacccccgcgagcccccccggctggagccgcagccgtaccgcgagccggcccgggcggagccgccggccccgcgggagcctgccccccgctcggacgcgcagcccccgtcgcgggagaagccgctcccccagcgcgaggtcagccgcgccgagccgcccatgtcgctgcagcgggagcccccgcggcccgagccgccgccgccgttcccgccgctgcccttgcagccgcccccgccgcgggagtcggcttcccgggctgagcagccgccgcggccgccgagggagacggtgcgcctggagctggtgcttaaggaccccaccgacgagagctgcgtggagttcagttacccggagctgctgctgtgcggagaacaacgggtacagaagattcttccctcctgccccagaccccgggagcctcaggacccgccgccttccccagctggtttgcaccttgggacgcccaccgagcgcgtccgggtcgccccgagggtggggtgcggggggccggggccgagcgggtggacggggcggtgagcgctgctttctccactccccagggtggccgaggctctcacccggctgcgccgaatccccaaacccccggcactcgctcccaacgccgcgccgagctcgttttcttgtgcacctttcggaacctcagattttccttctttcctttctgctccccacacaaaatcctggggccctgcaggccgtgtggctgggttctccctgtggcgctacagctgtcgttccagtagaaaggaagagaaaaccttgggggacacgccccccagtctgaagcagagattgtgtaacccctctcgtatcatcctcatcctcatcactgtttgttttgctgggcgccgtggctgctgaggtgtgcttgcgtgcctgtgatatttttcttaatcgaagggaatttaagaataattaaaggttttcagagactaaggatcccactttaggaatggagaagtgggttagttaatctggttactaatttttctctcgtgttggtattggaaaacctttttagctttccttttttgtggagttcgttcatattgtaattgaatgggaaggtgtctcctgttttatttgacacctacccgtcatattatttaagtgtactatcattagtttatagaaggatattgtattcagcctttgtaattttcggaggatgatgaaaaaaatgtcagctttgaattttttaaaataattgaaaatatataggtatgcttttgatgtaagaggtgaacaatggagaaaggataggggttatgttcgtaattgtaatttttattgttgtgggttggtggatcttcagaagtaagttagaaaaggaaatgatagattaacagtaaggaaagagaacagttttctctgttgcttagcaattatacccgttattaggttttgctttagcttgagtctaatggactccagaagtcccttgttttgttttcatcttcaactacctttatggtcaaaatgactgactgcttagtcacaaagtatcatgttgaacaatttcactaggttttgtttacttcatggccagctaatgttttgatcattatttagaaatgttatgtggtcaaatcattacaaaatgttttcaaccaaaatgaattgtttaaaggtagagatcattttggtcacttccacctaacat

SEQ ID NO: 49747 - DNA, 2305 bp, Homo sapiens
agtcttgattttcttttgtataacttgtaaaagtgagtctttccagataatgttttaaagaatggcagtatcttggaataactaatttctgatgagtaacatcttcacagtaaatactactcggctaagtggaaagaaatataattttgtcttaaaataattatagattattgttttaaactgtcttcaaatgtgaaactgataccaagtagttagttttgaaagcatttgtgtactgtttctgggagttgtaagaatcatatcaattactcatattattttagttgatcatccacacttgctgaggggttagagcttccttgggaacttcataggctggttaacctgtttgttttggccttatgtgaggtctggtccctaaggatcatctcgatgtagagctttgggcaaacttgttgacaccaccacaaagtaaattctacttgcaaaacacaaataccagtggatttagggttttgtagaccaataatagtatgatattacatgtacaataaaaacataaaataatcttttaaagcaaactgggggaggggagagggccttaaagggcaaggaggaattcctagctcaaataataatttctttattgcagttacccattctgatcacttgctgtgacatgcccttttaattccttggcctctttgaattgaataaattctcttcagccttctttaatgccttaggaacaattgagaatcagcagttttagggtatttaggaggaaggactggtatccatatgtggtgattatagaagttgtgtatactatttttgtgctgtgtagtcagctcttggctgtatttccactgccttgaaactcagctcctttctattggtaggttgaagaaatgggcacagatgtaaagagataaggtggcagggctgggacaagtagggagtcttgtgacgacaggatgttttcttctcacttataggactggtgtgttttttagtaatcagggtcattcttgctctgtctactagaggttatcaatgaatgttggtttttagtttggtttactattagctggaggcaatttggggtcagggggtctagtactaagaacatcttgtttgtttgttttccagttgagtgttacactgtaatgaggctgcattggcctaaaacactgattgtcaggttaagcaagtactaatgactcagtaaggaatattcttctgagtcacagggagctagtacctagaacagtagataagaagaaagttcttcactttagatatagcaaaattcaagggtttttttttgttcttgttgtttggaaaataagttttgatttttataagatctacttaatttataaactgtgtaatatcaactgcagaggttcagagaatttatcaagtaagactttgattctgttgcagtaagggtactgaaaaagagagtaattcaacagaagtctttctagtagggaagatagtataatcctttgccaatgtaacttgagtttctttaggttaaattttaatatttgtgaattaatttatatgtacctttctggcaactgccaaaagtttggttccagcttatacaatttacacattattgaattttagcacagttagggaactggagggtggagaatagatatggggtggtaaggcaggaggcaggtcagggttagaagttttccaggaaggccacaagtgaggaaaagcaaactgtacctagaaaactactctaatggcctctgtgatgaaggagggaactggagattgtgccttatagttggcaaaaatctatttataagtggagcaatgcctttggaactctggttgttggagagtgagttaagaaagagctactcaggtttgggtgtgtcaaatacacgttttccaaaactctttccccacagtgggactggaaagtagagccaaatgaggaggagttcaaaactttggtagtgaacatttggtgggccaaacctaataaaataacatttattgagtgggtagtacatgtccttaataaaactcggaagatacaaaagctaatgatagaaagtaaatctccttcctacccctgactcccagctaaccaggtcactccttagagacactgtgagtttcttgccccagagagctatgtgtatgtgggcagtcacatatttcaaagatttttttttgttactgttcactgtaagaggatatataaatacagataaatgaaaagatcaaaataaaaatcagcaaatcacctgtaagtccactgccaggcagaaccactgtgaatagtttgatagttgaaagtgtatccttt

SEQ ID NO: 49748 - DNA, 2947 bp, Homo sapiens
taagtttactgggactccgaagtgatttgttcgttatacaattaggaacagaaccaaaaaatgaactgctaatttttaaaattaattcctaatcaatgtactattacttccccgctgtcccatgtttatcgctgacgcaccaattcaaaggacacggcacatgtttctttttttttttgagatggagtttcgctcctgttgcccaggctagagagcaatggcgcgatctcggctcactacaacctccgactccagggttcaagcaattctcctgcctcagcctccggagtagctgggattacaggcatgcgccaccacgcccggctaattctgtatttttagtagagacagggtttctctgtgttggtcaggctggtttcaaacccccgacctaagatgatccgcccgcctcggcctcccaaagtactggtattacaggcgtgcgccaccacgcccggcctgcggaaatggcctcaacgcttcaaccggaagcagaaattgaccgcggcaggcgccatctaacggccgctggagcaaagctcctcctggaaattcgcaacaccggaaaaggtccggctgcttccggtaaaaacccaccagagctgacgttcagagggcgagtctcgaagatccggccaatttgcccagcgcgctgtgctccgcgacggcgcatgcccgcttttgcgcaggcgcggggactacggcgcaggcgcggagactattgcgcaggcaagcgcgtacgcagaagcgtgcgcgcgcccgttcaacgtccggagcatcggtgcagtttcgagggtaaagcctttggcgcggtgatgtggacttttgttctctaactacaactcccagcatacgtcacccctcacgtgggcgctaggtgtggtttcgtgggatagggtaaggcgaaaatgaagtgacgatgacgtaccaaagaggaaaatagttgaatatgttgtgtgagcgcgtcgtttgcagaagccccagtggcctaatggataaggcattggcctcctaagccagggattgtgggttcgagtcccatctggggtggcctgtgacttttgtccttttttcccctttctaaacaaagcgaaatatgccaactttactttttttttttttaaatgggaagtgtgtgtgtgtttttactagctggtgggctgcaattttcgagaatctgcacacacccatgtcctttgtctgagccgcaggtcccctgggatttggggagacgtcaatacgttgaattttgatatcccttttataaatcatttaaaaatgtcttctcagcgtgttccatatcaaatccacacccacaccccccgccgggcccgcttctcctgagactcagcggttggtcggctaacgggcatcttcaatgacgcagtgaagaaaagcccctgtttccccaaacccttgttctgggttagaggtcctggtaccttcagttaacagtcgggtttcgtttgattttgttacggcgcccctgggccttcgattaataaggttcggtcaacggacaagtgagcggttccactgctcgtcagtcgatagggggagtcggtagtctgtccgaccgtaccattaggcgcctgggccggaggaggggttttcagggtcgtaggacgccgttgggcaccacgctcggagaaggacaggacaatggcggccttagggtccccgtcgcacacttttcgaggacttctgcgggagttgcgctacctgagcgcggccaccggccgaccctatcgcgacaccgcggcctatcggtaccttgtgaaggctttccgtgcacatcgggtacgggagccatgtcccgggtgctctacgtgctggggagggaggaagagccgggtctgggctagggtggggagcacggtgtttaattcctgcatttctgaggccaaccctcccacggagccctggttctgaccaaaccaacccaggccctaggctccatgctctggcataaactcggggaccaaaggaccagcgggggggggcgcagagtcgctctggggacgtcagcctgtcctgcagaggggcggacccgtcccgaaggatttcattggctggtctgttgcctctgcggagggcagtcaggaaagtggaatggaggattcaatgctggggataaaacaatgaagatggagttgaagggtgtactgttgctagacttaaagccacagcatctggccaacaatttcctcacccgtcccctagaaaagttattctaagaagcatttctttttgaggcggaaaagaacaactgggctttagggaaggaaacttgctgcccttgagcaatgtggggaaagggagaacgatcaactgtcgaatttctgagccacggacgtcagaatgtaaaatcttagaactcaaattcacctagtttttaaaaggtggcaacgttagggtctgtgctaggaacctggtctaaacaggaagaatcagatgcacatgtgtcctgtccttaagacacttgctgcccacctaaggagccatacagtaaagtactgaggataaataagtgctcaaggtgtagacaacaggggctggggtataaagaaggggtagttagggaaggttttccggaggaaattaatcagggacctgaaggctaatttggagttagcaagtaaattggggttagggtccaggtttaaaagctacacaattgaaagcccaaggggagaaaaattgccagttgagagtggtttagccctaaggtgtggtgggtgaagtggaggtagatgaagtggtaggccgaacaggaacttaaactttattgtaagtgtaatgggaagccattctaagattgtgatcacctcccaggttcaagcgattctcctgcctcagcctcccgagtagtacaggcaggcgacatgcgacaccacgcccggctaattttgtatttttagtggagacggggtttctccatgttggt

SEQ ID NO: 49749 - DNA, 2918 bp, Homo sapiens
tacagttttaaatttctttttaggcgatgaatatacagtgttaatggaacacaaatctctattatgtcctttcaaagtatctagaaagtgcctgtcttcttaaacatttggttttattaactcattcatttttcttacagttttagatttctttttaagcaacctttcttcctgcacactgacctatgtcttacttaaggaatttttttttttagaagtctcgctctgtcgcgcaggttgcagcgcagtggcgtcatctcgactcactgcaacctccgtctcccgggttcaaacgattctcctgcctcagcctcccgagtagctggggaggcgcccgccatcacgcccggctaatttttatatttttagtagagacagggtttcaccatgttggccaggctgatcttgaactcctgacctcaggcaatccacctcccttggcctcccaaagtgcggggtttacaggcgtgagccaccgcgcccggcaaggaattaatattttactaaaacagtttttagaaacaccagggaaaggctcagggctaagtattttattccagtttgttctaacagccacgccatagcagacgtgtgaccacctccaccagccctacgaggggtagaactgaagccaaggccccagtcacgggccgggcttcagaatccaggcttccctgcggccagcgccgctggctccctgctccccgagatcgcctccccagtagctgagaatacgctgagtttttatggtttcacattcagactaagccgcccgcgaccttgtaggtaaagatgaatccgaatgggtcggcgcgcctgtttcctagggtactgctttcgggcgctttctcctgaagttgacacttcccagccgaggagccttaaagccccacgcagcggaaggaacgcggccccggcggcggcgagacaggcctgctcccggccgggaaaggcgcacgagaaccaggacgcgtccacgccactcggggcgggcgttcgccccgagcacgcccacctcagacgccaaggaggctgaccgcagtccggtcgacgatgggcatggtctctacttactttccgcccaggctaacctctagcgcattttgctaatttgggtctgaatcgccatcaccgcgggcagcgcagccttagccgccagccctacagccgggagggaatgtaatgtaaggtttggcgcctcggggcggatccggcttgcacagtcagttaaggaaccagagtatcgcgagatccggggtaaaggggcgggaggagcgcgcgtgcacgcgcccagagccgttagggtggaactccactcgggcggggcgggcggagtgatacagctggacgccagttggtggagcccccgcgggaaacgactgagcgcgaggagcgtgcgcgctcccgtcgtggcgacggtggcggcgagcggcgtcagagcttgagggggggttgacggcttctggcgggtggcggtgttgaaggcgagagcttgcttggcccgtgtcgcttctgtcccaagaaccggacggagagtgagggcacgagggtcgctgtcgggggctgtcgtcttccacgtacacgtcgtcgtgaggagcgcagtccggactcttcccgcaacccctccggctccctttccgcacgcctcgaggcggcggcggccaccgagacagcagcgcaccttcccccatcccttccccttatcccccagcccaaaagggcccggtctgcgccccacccccgcccgtccgcccgctacgccgccgccatgtcggcgcaggcccagatgcgcgcgatgctggaccagttgatgggcacctcccgggacggtaagtctctgccagggccctgggggtgggggaggggacggggacggcgaagggaaggggttccgagggcgcacctgggcgcgcgcgtgtggctgagtaaggggctcccagattggtaacacgaggtccccgtcccccgtcccatccaatcagggctcggcaggcgggcagggggggcggtgaccatgcggattggcgggaactgctgccaatggggtgaggcggggcctggaggcagaaaggagagtttgtgcttttaatgttgacttggctgagacgggagagcccgcgtctctgttgcgtagttggggggcccgttttgtcgctggttaggtacctgcggaaagctaaggcctccacccccgatataattccttaacccagagctttgggatcatccctcgccgccgtcctccagagtacctagagagaagcttccccctcctcttcctgggtcaggaggaaacctttattactaacccagtctcagagatgcaccctcgagccccacagaaacaaccatttttatggaaaatctgacccaaaccatggtttcttaagtgggtgtgtttggccccattttgtgagaaggaacatgttatggcctgtttttccgagagacctccattttgttagacaatttaatagaggctttgttcagtaaatattgacaaatgttgcatgtccctaacagaacgattttgaaaatttggtacccagtgaagtagaatagaggagaacaaagatcctttcaggcgtttagtttagaatctgtatagagagcccttaattgctggattatcctttgtcataaagagaatttctaaataaaatgatgaaatgctgttgcttttttggtgatgttaattagtaatgtactctcaaattcaacttaaatacattcaaatatgtaggaaaggtctagttcattactttcttaacacagcaaaatccttggtagtttttatgtgttgcttctttaggcagatagtttcttagccactaaggaaatgctttttttcttgagaagttatttaagtgtattgatttaagagaaaaggcacgtcttaaatttagtttttaagttac

SEQ ID NO: 49750 - DNA, 687 bp, Homo sapiens
ctcattgtctgtccccaggcgaggtggcacgaacagaggtgagtctcagaggaggtgtgtgtctcagagaggtgtggatatgacagccaaagtgggtgggataaagggctgggaagcacaatacagaaggtggggataccaggccacagactgtttcggagctgtcacctgacgtgtggcagttcctgacccctaatcccaggacagagcctggacacctaatccttctgcaatgcatggcaggcacttccaggaacaatcccagaagaaacaaaagctagaaactccctcccctccctattgtgtggggcagaataactttgattccaggtagggacagtccaacaaaacgtcatgcatgcaaaaatcttcagtgaaatattaacaagtcaagtccagaaatatttggggaaaaaaatcatgactaagcagacttgaccacatgaagccaggaataaaacaaacaaacaaaccgccacaagagattaaaaggagaaacaaaaaagatactatcatcccactggatgcatagaaagccttcaatgatttaaactcattcatatttaaaactcttaaataaaaatagaattttttaaaaaatagaaagaaaaaaggacaaaaaaaaatgggaagagaagctgagtgcggtggctcatgtctgtaatcccagcactttgggaggtcagg

SEQ ID NO: 49751 - DNA, 839 bp, Homo sapiens
agctacttgggaggctgaggcaggagaatcacttgaacctggaaggtggaggttgcagtgagctgagattgcgccactacactccagcctgggtgacagagcaagcaagactcagtctcaaaaaaaaaaaaaaaaaggaataaaactccctatccacaatcctcttgcttcttccttgtgtggagaaatactaccgtaacctagtgttccttttatttcatctcacatgaatgctgggtacatgcagtacactaggcaatgaagactgaaaagacagccatgcgcttgggctgcttggagtcctaacagtgtgccaggctagaggtcagagtgatgcccagggagcacagcccggggaacaggtttgggagggtggtcccgtgggtctgaggaccccggtgggcagagtcaacctgtattactgtgtctgcttatggcatcggcggcaacaagggctgggacgcagggttcagggtatagtcccttgctcaccccaaacactttggtcaagtctgagaccagagtcaatgtcttgctcatttacatagttcactgacaaaacaagggcagggttcactgccactccgaacttgggtaataaatctgcagcgctaatcggagcgcacaggcggagctgtgcatttctggaaaaatgttactcaatttctctgagtttttatttcaccatctataaaatgtgattattaatctcactttttctcttgtctctacggcagcttatgaagataaattatggttggcagaattataaaacagtttaaactccttggaagcaagacactctattagtccatggtattttataatcactggtatta

SEQ ID NO: 49752 - DNA, 978 bp, Homo sapiens
attcaaaaacaatatgggaaaaggcagcaccatatttcctctgttcttctaaggggaagttcagaaaaaggtcagaaagagaacaatgcaggccatctatcatagcagcctctaacctagaggtgacttgcccgctgcagcctcatttctcagttctgtaattaccacccctcccacagactggacaccacagcggcctatgaattatgcatttcatttccacctccccacaccctgactcggtgaccactgctgcggcgggtggctgcggggggcgggccgatgcagcaccccttcccccaggtacacgcgcaaatgttacagggccccagagccccggtgcacacccgcagatgctgcttgtgctgaccttcagttcccagcctaagattttgtttattgagcaaataagactagttaccagtagggattttcctaggggaaaacacactggggcaccttttcttccccttcacgtttttattcaggcaaaatctggttaaaatgaatattaagggtggtcttgaaggaggcagaggtgatgtagagcctgagggtatgtgtgtgtgtgtgtctcctgctgttagaattcgggggggtggtttggaaagtgggtcccagaaatggatactgctgcaggaacaggagcaaccctgctcctccctgtctgtgcctctgattaactggtgcccctctcctaccaattcagagggtcccagaaaacttctggggccacctgtcttcacaggtgctactggtataccaaagcagggactactctttgttcagagtgattttcctttcaaatctttacaaaacgttaggtttagtagagaagttggttaggtttagttgctcgagcaactgagagacctaggaatacccctggaagcagacaggggtaagcagcaagcgaaagggttcccttgaaaagcaagggttcttctgtttggtacacctcagtctatcgcttgaaga

SEQ ID NO: 49753 - DNA, 581 bp, Homo sapiens
cctgctaattttatattggaaggccagttctgggtcactgcactactagtctttctcaaccagggttttctatctgaactacagagcacagaaaatgatctgtgtgactgtaaccttcctatataccactctcagtggccaggagaggagtcgattcactacaatggatgtcttaaagcaggagggcttatttctccctgggaaccctagttggggaaggctaaacactgactgatggacatatttctcgctgaggccgacggcatgtggtattggcattggctgaccaaaaacaatagggccctgtctctgctgcaagggggccgggagggattttttcactgaggagcactaccttaatgaactcacttgcttttctatgccgcttgtgtccacatttccctcactgccctacttctttcctgggactgtctctcgtcttaaccctttccctgccacgcatcacaattaggccattcaaaccaaattttctactctaaaagcattcacagatatgccatttcatgcagctgaagattcaacaggcataatttaataacatccgattctttctgcaccct

SEQ ID NO: 49754 - DNA, 1158 bp, Homo sapiens
cctgacaccctattagaaaattagggttatttcttgatttcctttattcagttctccctgatccctctacatatgccaccatcatacaggcatatagctaatctttacttgggtttagtctcttcaaaaacagacctatttatagcttcccaatatataactgcatgttaaatgcaacacctatacttcagctctcttatttataatttgaattttgaaattcggaattgttccatggttcaaaaatcacctttgggcgggttgttttgccaagaaaaccttttatcaaaaacaaacagttcactggctggcaatacacactttactggaatggcctcccatagtttgagaagctcatatctggttgtagcccaactggtcaagggtgttattgtctgtctcttgggaaaccactaaaggaaagagtaggaagtaggcacccttggggaaaatggcaaagcctatagggtttcaaatagaacacagtaggcaactaagaaaagtaaaaacaaccaattttttgttgttgttgttgttgtttttaattagagcctcaaccaaactcaaatacaatttgcatgaccacagctgaattcgcctatcatgtataccacaggacatttgcttttcctggttacagcatgactcagactttatttaaatcctttttacaaagaaataagggagataaaagtgacagaaataaagtcattgtttgctctctgcccaggcagcatggggacagaggctgatctgaggtcaacccaaaggccccatcggttgggctgttattgccatatggcctgcggggctttgttatatttgtgggttggaccttactcctacaatcacttgttctcaacagcccaggtgtttccaaatcctatttcactggttgaattcatctgatattcacagtccttgaggctagtgctgagaatgaggtgggaggcacctctcacagagggctagccagtctagatacgtaacaaggaaagaattattccaagcaacagaagatatctgcgttttcctggcagatccagagacagagaaactcacaggccccagatcttggcaggagataggaagtggtatgagcacaaaaggggagctacgcaccattaacaaggaaacagaatctgaaaactccaaaga

SEQ ID NO: 49755 - DNA, 4541 bp, Homo sapiens
taagccttgaatgtgatagttcagattcaaggcaaagaattttttaattcctcccatttgtttgctacttatacctctggtttaaaaagatacatctgaagtttaacattatatgattctagatttttataaaagatttttatgagtttcttatagtttatgtctatagcttactcattcattgttcaatatttatctagtgaccacagtgtatgctgaacactgatttagatgctaaagataatgcagggaataaaacagatgattcgcctacagatgactccctgccctcacggaatttacatctacctcataacacttgaagataagtagaattgattagctagtgatttagttacctgaaaatcaaatgctacatttatgtaagttggcatgaaattataaaatatctttcatagcgaggaccagtcaagatgataaaaactactgggtaagttctaaatatgtcataccaagtaaccattaactatttgtaaaaaaaatggtcagtttaagtcttgacttagaacatgaagacttcaaaaaaaataattacaagtaacttttttttttgagatggagtttcgctcttgtagctccagctggagtgcaatggcgcgatctcggctcactgcaacctctgcctcctgggttcaggtgattctcctgcctcagcctcctgagtagctacaggcgctgccaccacgcccgcctaattttttgtattttcagtagtgatggggtttcgccatgttggccaggctggtctcgaactcctgacctcaggtgatccacccgcttcagcctcccaaagtgctgggattacaggcatgagccaccgcgcctggccacaagtaacatttttattcacttctggtgattaattagaatcactgaaccagaatcatagtttatttaatcatcgcaggttgtcttctacatgactacctcatctttaacttctgtattaataaagaatttgcactttcactattctcagtcatggtatgactcaatgttttagaacttagtatcctccttgcaaaaagtaatgcgagctggaacaaagcccataaggtaacatttaccacctggaacaatcaaaacaaatattttaacagcaatagatttgtggaggacagaaagtcctagtggctagaacagtggtgattagaaaagcagtggttagaactttttttttttttttaatgaaaaagatgggagggaagatggccactaaattgtatttgaaaccaaaagaagtgacccatctgctctggggcccgtggagagagaagagagtgcagattacgaactgggaatgcagaagacagaaagatgatcagctggaaacaaactgaaggagtgtgttggctagcaacacataatgagagtaggggcaggcttctgaccttgatggtggcggagccgcattctctcgcataatctgtcagttctctctctctcttacaggagaccagcctgtctgggaaaaagtcacttagctaccaatgcctctgagcatacggccaaattcccccaacctcctctctgatcagcttctgcctctttttgtaacactaagtgggttggggaagcccctggaggctgagggctgtcataggccatctgtgtgaggactcccaggggctgagggagctgtgaggagggacgtagagactgggctgacaccaggtgcttaccattatcatgtaagttctctaactgtttcatgtggggtcttccctatccttctacctacagtgatggtaggtaacctgaagaagtctgactttttaaaattggcacagagcaaagcccattcctaaggaatgttaaaaaatttgctgactttggacagggcgtggtggctcacatctgtaatcccagcactttgggagggtgagccaggtggatcacttgaggtcaggagttcaagaccagcctggccaccatggtgaaaccctatctgtactaaaaaaaaaaaaaaaaaaaaaaaaaaaaaaaaaattagctaggcagactgcagactacgcctgtagtcccagcaactcgggaggctgaggcagaacaatcgtttgagctgaggaggcagaggttgcagtgagatgagcctactgcacttcagcccggatgacagagtgagactgtctcaaaaaaaaaaaaaagaaaaatttgctgacttttggctggagattttaattacaaatatagtagagaagttaagattaatatataaaaaagacggtgccaataactaaatgttgtgcggcactttttagtttataaggaatcttccctacatcatctcatttggtgctcagagctgtggtggggaaggcctctcatcagctcagatttgacacacctaatgtggagtgaggtgggtgtttggtttttcaatcttttaattcttttccattattccacacataaagcaataagaaaaattaaatgctaagccgtatggtattgattaggtaaaacggtgacttaaaggagagctcggtagtgtcagaagagcgcaaatccatcctggggatgagatgcgtgctgagcctgaaagagcaaggttttaaacggaaggccttccacctgtggagagggcaggaagaaaggcatgaggatgggaagcagacaggctacgtgggaaaggcgagaacagattccaggcagcatggtgctagcccaaagcagcaaacctggcatggaccaaattctggctcctttccacgaaaggaagaaaaatgaacacagtaatctattaatcaattagtcttctgttttcgacttcaattcccagagctaattaatcacttcattaagtaggagattctctcttggtttaggtcattaatgaatattactaagtaaagcctggtttatatttctaaaacttttgcatttcaaactcctggtagcgcttacgatgaagatgtaaaagaggtgccacatatggactggaggttccatcccagctgccgcttcctgccatccaccctggctcttctctggaacagccatctccggacctgtcctggaagttcgcacacttctgcatttgcctttgtcatcgtaaggctaatgctgggaaacgtgctcacgtcttgattgtatttatgctgtgtctaattttagttctattgtaccaaaatgactgacatgggtttaattgcttgatccaatagatgctggtgcatcagaccaacagaagcttgctcttaccgttattaacctgatatattctgactaattcacagaatgagggagagtatgttttcttcttacagcacatcctgctcagtgactgtgtcatcaccaaacatttaaaaagagtccgttatgttaaaaatattatgctaaccaccgagaacacaaagaggtgtggacacagtcactgaccttcagggtactgacaggttgtgcaacaggtcactttacaaacaagaccagaggacagcatatgaaaaacagtgagcaaggccacaggtactaggcgcttggagtctggggccccagacttgcttccatatttaaatgtcggcactcactttgctgccagtgactctcatcttatttctcacatgcggactcgacacagcatgaggggcaggcaggtggggaggtggcagcaaaacaagaatgcatggttctgacctcaagaagcctgagagttactgtggagaaaagaaaaaataatctgaaaacagttacaaagttgatgtcagcaagaaccagacaccatgctgtgagttatatgtttgtgcaaagatcaccagagaggaagttagcatgtgaccgattgggtggggttgacctgaggtttctggagctgtgaggtggacccccaatctagtgacatgaactgggactgggagaaggacaaggctttctggcctaggaggtaatacttgccaaccccaacgcttagataagactcaaaatgatgctctttcttcaatgatgcctgaacagatggctgtaatatactcctaattggttttctcatacttggtccctttcccaaaagctccagtccactgaatcattctcatgtcaactttcctaaaccttacatatctccaatcaggtcagtcgtctcctgatcaaaagagaaccaagtatgcatcgtcactttgcaatggggccccctaaggtaactgcgctcatttttgttctgtgcctctatggcagagttcagcaaacactttccataaagaaacaaatactaagtcttttcggcttaccaggctatctatacaccgcaactcctctctgctgcatctactcatctctgctgacgtggcacaagagttgccagagaccacaggtacatgaatggatgtggttggcctgtggaccctagtttgctaaccctggcaagggaatccctgggctcacccatgctgaacttctggttgccctcctgcgggtgtctgagcctacacaatagtctccttaccagaagtatcctcacatccatcactgacagtcaagagccctacactttcctctgcccgcctcacagatttccatcacat

SEQ ID NO: 49756 - DNA, 4803 bp, Homo sapiens
cctcttttctaaagggccttaaacccattcaccagggagaagccttcacggcctaatcacctcttaaaggccctatcttttaatactctcacattggcaacacctgaattttgaaggggacccattaaaaccatagcaacaaacaattataaagattatgctaagaagatgtgggtacttcgggtagacagagaagtgtaaatggggttaggaattgcattaggaacactatatgctcagaaataccaatctttaaattaaacaacctatcgaactgcctttacatggtgcactgctggttataaatgtgcaatacctgatggggggaaaattccaggagagcttataaaagcatgctagaagcattaaaattttccagccatttcattatttgtcattcagcaaatgttaatatttctctttgtattcctactgaagcttgaaattaacatggctttttgtttatttcttcatttctgcctccttgtcagctcatctcaggaatgcagttggttagctagctgctgcagagccaaataaaaaagcctaaagaaactcaaacattgactggcaaaaggctctgcatgaaaaggcatttgttttttaacctctcagaagtagaacatttagcttaaaataaatatttaacatctaggatgcttttatcaagaatcattttgacatggacattagtctttatcccaaaagccagataccctggggagcaaagttcgctgcaaatgtatgcaaaggaatagcgtgtgcaggatacaaggaggccggaaggccggaaagcagggggagtacaggatttcctaaggtaaaccgatctcttaagaatgcctgttcccctcccgcaaataatcattaaacagaattcagcataagttcagcattttcaagtcactcagggacacaggtacccgggaatgttccctctgcccctggactgtttgtgttggattccagcctggctcctcctgtcccccgactgcaggactgtttcccacatggaatcacgattcagtcacgattaacaccctccccacagcgtggctggtgcccaagcagccccagtagggcttgggccttgtggaggagagccctcccctgggtgaacaacccagacaagccaagtcaactctggttttgggatcgaacattaaattcacgtcactggctttaattctttccttaccaggtgccttgggttttgaggggatgctgttttatgagggcttttgtgagggccagggatgttttcaaaactacagggcttggcagacatgggtactgaatgtccccaggaacaaagtaaccagggattgtgtccaaaactggcttgaagaaatgcctcaaatgtagcaaatcattttttaaaattcatgttaagatcggccaacagccttcagaagacagaacctttttcatgtctgtggcatgtgtgtgttcacgtgtgcttcctgaatttcccaaccaggacatgaagagcacagcccactgggatttttttgctggtggcttcccatttgggaacaggctctgagagacaatctgagcgggcttcctgtgttgtctgaggccagcttccacagggctgccatcagtcagcccattactcagccatgggcccagtgaggcagccacagggccactgtgctacaagcaccctccccgcccctggttttcgtgccatgggtttcctgtggagaacatcgtcacgctatattcatctttcctcttagctggcgctgagtcactccatgataaagccactcttcaagctctattttgggtacactttacactctgagggagccggtaacacatctctcctgatataaatgtacaggagagcccgtcaaccacagctctctgatggagcctacaagttgcaattgggtcaatgttttcactgccacagcacttaatcacttgaaaactttatctaaacttgtgaagttttccctgcttttagcttttcattctttttggcctgttttgataacagaagcatgctgccgtccatcccaggtcagagctggtggcaggagagaggtgggtgggagaggagggaggacacagcccacttctcaggtccttctaaatggtctttattagcggatttcaaaattttgcagtgaaattatcagaacacctggcacctccacatttaaatggaagcacaaacccaattccaaagccaaaggcttcttccggaacccctgctgttttctataatcagcgccagtgctgcactcccctcgcctcctcccgctcagtgtgggtgtcaagaggtgaccacaaaagaggctgctcaacatcacctgagaacaaagcctcctttcctgcaattccaaattgacttttgctgtacaagaaaattaaggatgctgtggctaccaccagagagcacatttaaaactcctcacatgaaaggcccttgcactcctgggaaaaatattctcactttaaggagagtcacagcgtgcggagcctggactttccatgcaccaagccctgggtccatgcagccaccactgctccagggagcagaaggtctgatgttctctgagctggaatcttcctacatttctttgtccactgactgggggccctggttctaggacagcatctcccctggtgctggaggtgctcaaaccaccatggcctggcctgagtgggctctatcttttccagggcaggcatcacagtggagccctcggatctggctgacactcctgttactcgtgcacggcttatgtcatgctggtacagaccctgggccatgtagaggactcatggtgagatgccaatgtggctactgccccagcttctgccctcacttggcacataccatagaccacgttgcttccactcctcagaaggaaaaccccctctattgccaagctgttcaatattcacgacaggcaaggtccttatgattcagtcctgttacctctccagcctcatcatccaccacatgccctcactcactcactcatcaaacatccactgagagcccatagtgagtcaagacctgggcttggcaccaggaacactgggtaaaacccatctctagcctcaagaaactcatccatgagcaggggtagccagacctgtaactatacatgtgcaatgaggggttggaatgaagggctctgttgaggcacctaggacagagatgtcagttccaccttcttcaggtgcagtgtggacaccacctcttacgggaagctttccctcatccctcccgctgcgtgcctgtgccctcctctgggtccctgtggtgggtggggccgtaatgactgtgcttgactgctcctcaagagcaggaacactgttttactcatctcctccccacagcaccctgcaccatgtcctgccacacagtaagtgctccatgcatgtttattgtttcaaatgcgcctaatggtaaatctcagactctgagtcaatggcaatctcccaaaagcactgtgttaaggacccgcgttcccctttcttctaacagaggggacagaaggcgctggaagactccagtcaggacatgtgactgctggagcaagcctagctgctcatgagctgtgtgcattccagagatgcttctggcccctcttgccccttgtcccctcctctgtaggacagtggagggccccctggcatcacagggccacagacaggaagtggggtggagcaagagaggctggtcctttctgggaaatgacagagcagcaagaaccagactttctggtgggagagaaaggagaatgtgtgttctctcttaaatataaggcatttttaccaccaacacgccactcagtaaggtcactcctgggttgatgaacaaaaccttgctgtttgtacaatatttagcattacctggaagggcctggctctcacctcggagcctggacgtgacctgcttcatgcttaactatataacacgcgtgccacacacgaggataaaaatgcgaacagagactgcattagctgcctgttaatgtgtaacaaggtaccgcaaaacttagtgccttaaaataaccattacttcatggttgctctaggccagtgcttcagcagcggcctagccgggtctggtgcagggtccctcatgaggctgcgatcaagatgtttccaagctccccaaggcagctgcggtctgtgagcctcagctcctccctacgggggcctccacaggactgctcacaacacgggagccaaagcgagaaataccagagagagagacacacgcataccaagacagaagctgcagaacctctcagaatctaatcttggaagtgaaacaccgtcatttctgccagattctctgggtcacacagaccaatcctggtgaataccaggaggtgagggtcattaggggccttcctggaggttggctgccactgtcataccctggcaatggcattcataccattggcaggcaatggcatgtcatacagcttcatgagggttggctatgtcctttccagagtaaaatagatagattcattattctgtattacaccaacagttaggtcttactcactctcctgtggttttgaagggctacaaatactttagaaaatagttttaaacactgaatgggcttggaatttggggaggggcatatatatagagagacatacctcattatattgcccctagcttgactgagctttgcagataccatgattttttttttttacacaaattgaaggtttgtggcaaccgtgcatcgagccggtctatcagtaccatttttccaaaagcatgtgctcacttcatgtctctgtgccacat

SEQ ID NO: 49757 - DNA, 822 bp, Homo sapiens
gatcactttcagggacacagtgttgagattctgtgggaaacctcttttctttggacaaaaggaaaacgcccccctacccttactatcacagtgtggtattggctctatatgtggctagctgcagagctggtttatatgtctctatagttccatagtttcgattgtgcaaacatctggcacccttgctgataaaaccgaacatcaaataacactgcagttgctggtaatttagcactctgacgagcccgtccccattatgactaagaaagttcagtgttcatatctgcggagagagtgacaacaaacttaggccctcttttcatgtaataagacaataatagcagatagccaatgtcattaagtcttgctcttttgcaaccctgctccctgcctacccaagagtaatatgtggcttggaatcacttacactctgacctggcactgctgcatggagcacaatttctatgtgaaacactggaccaaaatgaaagcctgacccttcacctcatgagccctcataaaccatgtgggaaaagtctggcacagtgagctgccccacagcagcaaaaccagctgggataaggaggtgagcctggtgtggagagagctggctggggaccagctggcttgactccttcctggctctgcgtccagggacagggcagattctcagtttccacctgtgcaagtggggatgaaacggagctgctctgatgattaaatgaaactgtatacatcatggtgctctgtcaagtacaaaattgtattaatacctcaaaaataaataatacattaaaaaccgtggcctatgaaaaaaatcca

SEQ ID NO: 49758 - DNA, 1146 bp, Homo sapiens
caatgctgcaatcttggctcaccacaacctctgcctctcgagttcaagcgaatctcctgcctcagcctcccaagtagctgggattatagacgtgcgccaccacgcccagctaatatttgtatttttagtagagatggggtttcagcatgttggccaggctggtctcgaactcttgacctcaggtgatccacctgcctcggcttcccaaagtgctgggattacaggcgtgagccactgcacccagccaactcacacagttttttaaaaaatgacatttgttaagggactggctcatttagcatattttccccccactatttacttagtttcttcataactttatatttcacaattagatgaactgaaaagttgcttcatatctgagtaacatttcctttccatttcaccacccctaaataaattatctactggaagatcagactacaaggatgagtgagggttcaactacaataaaaaaaaataaattgaattcaatttcactgaattctagcaaagctcaagccctgattcccagggaggtgatctctaaaatagtggcaccaattttatcggtatgtaatatttaatttgggtttggcagatgtaaaacagattaccgctcagaatccagttatattattcaagagaatggaatcatgaacacctgattttaagaggtactaacttccttacttcctaaaatcttctggacacaagctctggctgaataatgagtacttaatagatgctacagatctttttttttttttttcataataaagaactcaaaggaaggattaattctcatatttaatgaaatgccatatctgtctaatatagattatgcacataagacataacaaaattatagaatatgtcaaaaatatatgaatgttggaaatatgcatctaaatggacatttttaaacacctagaaagggttaatctgtataacccctgagaaccctggatgacatggtgatctaatacctcagggggtcaaaaagtacttggaaagtttccttcattgacatactaaataatattcataaagttttaataatcctgcttattaagtttatatttcacaaggagtacacagataatttcaggttagcccattctaaatgatacatttccaaaacag

SEQ ID NO: 49759 - DNA, 3085 bp, Homo sapiens
tagactggattaagaaaatgtggcacatatacaccatggaatactatgcagccatacagaattcttttgtcaataatgacaataacaatactactgattgcagcactgggcatttgaaaaaaacaaaaaacatgaaataaaatcaatcatcaagtctgtattaagggtcctctacataaaaaaagattagggttgagcacaacaggaaacacaaagacatctaagacatcgtcaccgacctaaaggagcttagaatctcatggggattgccaagtacaatgcaaattaaaaaggacagctggtaattctaaggcaacataaacaacttgccaaagtaaacactagaagtttagaggcaggagtcactatgcattgtggtcaggcaaagtttcacagcagaactaagactcaagctgcaattagaaagatggggcagaaggctagtgctccaaatcctgcaaacagagtgtacttcagtccatcaggagagtgagactcatggcgggagcggccagcactgcggtctctgtactagaaagctcaggctttgcttggagacaactgaggtgcgtttgcatagtggcaatacaataacaaatgctaaagcaataaataaccaccagtatgcactgtgtatacaactacctagttatccagaattgtcatcttctgataacttctatcttctagaagtaatttctaaatactcagagagctggggggaagcccaaccatgagagctgctcatctaatttctcctttcgccttctctctcactggctgccatctaacacatcaacaagtggtaggtgactgtcctgattgcctttgctctctatatgtcagactccaggtgtttgctcgatacaacaaaactacagtgtttccctgttttagagatgagtaaatggagctataatttgtccaaagtcacttcgcctctgctagcagggctgggatttgaactgaggtctgcctgactcccaaatccatgccaccagccaaacttcttcattctttaggttctcagactacaatcaccaaacaacgagatgagtcccacaccagccaaaggaaaaatgagggctgataagtgaaggaagacagactgaaactacaggacgcacctgactatacgtcacctgataaaatagtggatgtcaacaacaatgaccctgagtcatctctcatttctgtgtcttctggttatgacatctgagaaatataaccataagaaatgattaaaataaaatacatttacctatttaaagaggtaaccactgcttatctgatgcatagggggtcagtgcagagaagtggccttgagtaagaagagccgggctaagggagcttgggcaagtgctcagccaatgggaaagctggtccagaggggtaagggggacccggactaaggaactgcctgagaaaacaggaagcagcagaaatataaaactctgcagaggagaaaaggtgagacatgctgacagatgagatgtgagagcaaaggaaagaggggactagaacacatttggggtgccagaaggagtggggctccacgagtgagaaggaagatgggaagtggagttgaagtgttgggggaggggagaatagaatctgttttcaacatgttgaattatgagcactaacgggatatctacgttgaaatgtccagtgttcagctattcatactgaaactctgaggcaagaaattgcttaatttactgaagtgtcaggagctaatggtctttcctaaccagcacccagttcctacttgctaggttgaattgtgaatgacgatcacccactttgaaaagggaatggaaatcaataggatgggctgggcctgcatgggattaactggaaggggaagagagcaaggtgaccctgaactagttcatgggtaaggccaaagacagagggacacagccaaaagaccagaaggccagaatgagaaatagcaaatgggaaaaagatctaaatcaaaggttcatgccccaaagggactaagagaatggtgctgctgacggtaagagcacaggccagctagaagggcttggtttggggcagattttgttttaggcattagtaacaacaaagaggaaatgttctatatgcaacaagaaaaaagccaggttagggaatgggcgcaaggtcatgggtggagatgtggacctgaaggctgtcatcaacacctcggtggaaatggagtccccgtgggtaaagctgtttcccaggagaaatgctgtagaaagtagagcagatggcaaatcaagtaatcctcgggggcagagacattgtcaaatagtatgaggaggacaatatgagtcacagggaaacatcaaggatgaaatgatgataaacacaattaagggattgatccaggagaatgaaaacagagaaagagtggcagagcctggctgggaatgagccaatagccctcttttcccacagggtcaggagcagggaaagaagggtgctctcctgggaagagaaccaaatgcaccatgtcacgcctcctgctcttccaagaaatgtggttctcttaagaacgttcaaaatcttttatgtcatctgccttgaatctgcaaatgctaccataggctgtgtttctttgattgagaaaacatccttttcctaacatttgcaaattctccacacatctatctacttattgactcattatttgtcagagttacatgttcagacttaattctctttctgcaagctgctaacttggccccaaataactccttttggtaactctgctatactgctttgaatgaagccatcaaccactgtgggtgagccagccttgccctgcagtgggtgagtacagacaacccataattgtttatctacaggacatggtgtcaagagctcataagcaatctgaaaattcccaatccaatccagtgctgaagcaaacactgataagacacaaacgctttttcagcttctttctccaggaaactgatgggatcaatgaaaagaaaataaaacaattcaaagaatcctttttgaaacaagagtggcattggctaattttttttttttttttttttttttgagacagggtctcactgtc

SEQ ID NO: 49760 - DNA, 9319 bp, Homo sapiens
caagactaaaaatctggtaggctttttctcttctgagcaagagtgaatttgttagccttaaatgtctggtactatgttggtaaagtaaaatgatgcgttttactagccaaacacccatttccggcccagtccacagctgaggtgcctttttgagctacctcaggttctacttcagaaatgtttgtggcacacagaatcagaactggaaatctactctattctttcccattttggtgttcttgttaccatgtcactgcaattttttctctctttttttttttttggagacaaagtctcactctgtcgcccaggctggagtgcagtggtgagatctcggctcactgcaacctccacctcccaggttcaagcaattctcctgcctcagcctcccgagtagtggggattacaggcatgagccaacatgcccggctaatttttgtatttttagtagagatggggtttcaccatgttggccaggctggtctcaaactcctgacctctggtgatccacctgccttggcttcccaaagtgctaggattataggcatgagccatcgcacctggccctaattttcatttaaactaaaaactgtgtagattctattactatgtgtcctcccaaaagatatgttaagtcctaacccccagtacctgtgaatgtgatcttttttggaaatggggtcttttcagaggtaatcaagttacaataaattcattaaggtgagccgtaatcccatatgactggtgtccttgtaagaggagacacagacatacacacagagtgcgggccacacatcgacagaggcagagactggagcaatgcagctgtaacccaagggatgcccagcattgttgggagccatcagaagccgagagaaggcaagaaggggatttacctggagtcttcgagggaacgtggccctgccaactcctccaaaactgtgagagaagacatttctgttgttttaggccacctattaatagtttgtgttaatttgttacagtcaccctatgaaactagtaccctctgcaaaataagtcaggatgtatttcattgaaaaggcatgtctgtactcaagctatgataaagtatttataacaatcgcaaagtgacgctggccaaatggcaggttgccctctcagcctcccggcctgtgtctgtggcctcttggttaaaaagcaacagaagcatctacagctttactcccacgttttagtcttaattcctgccagggcactatacacctcctctccttatgcaaatatatttgttcattgtgattgaggtttgacttcaaaacaacaaaatttctaaggaaggcatctaaagttcgatctgttctcatcagtgacgtccacagttaagaggccacagacggcacttcctcaaacctgccttttctaaacctcaacttcttgctgagttatacaaaggaaccaggacaaagggccgccaaatgggttctgcgctcagtgcaacacctgtttgcacaccccttgtactcatgtttatgtatttctttgagcatttctctcacaggctgttctctaactgcaaagaaaactttgtgaaagatgttttgcagacacagtgatgccggggatgtgagatgcagataaccctttcccccaggctctctttaaatacaggattcatttcatccccttcttaaagcacaataatccatccttcttacttgatttaaatagcaactgctatttacaacaggagctccatgttacaactgttttgttccttggagaattgtttcattcccctcagttgcctttaactgacacctgactaaactcaattagggatcacttcgggaaaggtaccacctccacaactcgcagggagagggaagagcaggaagaaacgaaaggaagaaagctggagtgtggggaaagttggcacggatgctgagaggaaaaggaaaaagaaactaaagatgagaaaaaggtgagaaaagagaaggcaagtgaaattatattggagcacactaagaataataaagtagcattgtaatgtgctttgtaaactataaagcataataaaaatgcaatgtggtattatttgcaatatttaaataggtgcttttgtgtgtgtgtttgtggatatgaaaatcagctggtacagggatcccttggcagggcaaccagtggcccattctaagctgtgcaaattaaagtgggttctttggtctgttgcaaggacatttttctactgtgagtcactgtcatcaagccagtcctggcgttattacccaacaactccatggcacggagccacttacacccagtgctgggaggaggtgcccactcagataatactggttcttgtagcggggcgccttccccacgtacatctaagatgtctgatagctctcctatgtcttgctttaaaacagacaggatggcatttggtgatgtaggccatccctatcttcataggggtctgtattccaagagctaattttcagattgtttctgcattctcaacaactaggtcagatgccagtgctgccctttctagctctgtgatctcagcaagttacttaacccctttctgcctcaatcccctcatctctaaagtggagacagtaatcatatttcatagggtccttgtgaggagtaaatgaacatatatatatataactatatataacatatattatatatgacattatataacatataatatatataacatattatatatatatgtgtgtgtgtgtgtgtgtgtgtgtataaaatagtgagtccctgatatggtttggatcagtgtccccacccaaatcttaaattgtaatccccagtgttggaggtggggcctggtgggaggtgactggatcatgcgggtggtttctcaagaatggtttagcaccattcatcttggtactgtccttgcaacgggagtgagttttcttgtgagatctggtggcttaaaagtgtgtggcacctcccccctcactctctcttgctcctgctctggccatgtgaaaggctggctcctccttcaccttccaccatgactgtaagtttcctgaggcctccccagaaactgagcagatgctagcatcatgcttcttgtacagcctgcagaaccagaagccaattaaacctcttttctttataaattacccagactcaggtatttctttatagcaatgcaagaatggactaatacagtcctaaacaagcgtttagtgaaaactgaggggagggtggtcagctagctcccagaggcctagctaacacagaatagaatttactttcaaagcttctgcatctcttttccatgtaacattttaaccaaaagcactatccttggtcataactgagacccagtttctatgtacaatatgcttattgcagatttgtatctactgtataaacaatgatctcaacttttttgattaagcacttaatcaggggaaaagagaacactcctgatatatgtgatttttataattaaaaataatctatgttttactttccaatacagtattgttaaccaaaaacacaaatatagaaaaatttaaaggataaagtgagataaaatatacatattcaaattttcttctgtatcctaatacgttgtcttgcacccattactttgaaaagctgtgctgtaattcaggtaagctaagccatgtaacttagaattagtcttggccaaatgatccaccttggacaataagaagtacgcaagaagtagcattctcaggcaaaagcctttccggccagtgtgtgactcctctttcccttatattacggtaaccaaccatggtctggggaggagcagctcctttgcctggtcagtgaaagagggtaacaaagagcagagaccccagctgacccaagatgtggcgcaagtgtgaagcaaacctctgttgtttgttactgctgtacaacttaggccatcctaaccagtgctggaatattcgttaatgctgccatccctaatgagtcacaattaacgtggtttagtgtaattctattgtgaggcacagcatgctcacctagcaaaaccagagcacacgtttttaaagacaacgttaaaattccgaaatagttcagtccctttcttccatgttttagcatcacttccattccccaggagaatgcttcaggagatcaatgtgtcaaatgatgaaactactctcatcaccaccagtgttagtgatttcaagtgtgcacgtactaatcccccacctaataacttttctgaacaagtggaaggcacgggatcttcagtgacaaatgctctggtttggtttgcaaactttgacgcaaatcactctctggtgactaaaattggaagatgccctacaggagtctggcactgctgcatacaggcctaagtgcccccatgggagaatcagcttttaccctgggctgatgttttctctgggaaaaatggactttccacaccctgccccctaaatgcattcccatgctccatgacgccacggttgtgctcttggtaaagaatatttaagttctgacatcatgataaccatgggtattattcatggtaagctcacaagcctgggaaggcacattctgtactctctttatcactgaagtcagcaatggttttaaaaatagcatggctcacacacccaggggaccactgattcattaatggccaaatacacactactgtggactcctaacttgtatggtgttttagattgtgatttctagaatcaaggcacacacatttatcatttccctcataggagtgttatgctgtactaatttataaatagagatctgcagatcctaaatgaaggaaccctcaaaaattacaaaaccaggatttgacaagccgtatgatttgtgactccaaaatgacgtaaaatgtaattaatgagaatatctaccaacttggtataactatgatatgtcatacctaaataaagagagatgatgttacaaagataattgacactaatcttagtgaagtctagaagtaagtcataggtttttcactgtcgaggggggaagggaatatttgattctagatatcccatgcaggttctttaagagaagtatcccatgagcagagaatgttttcatgatttataaatacatttagaagtacatgacgacttaagccttttgcttaaattctgtgctaaataagcaactttctcatctcttactgggattccagagaggaccttctgaccaaggagaaaataccttgatatgtaggcctagcttctctggatgctaggattatctctctttaaatgattcagattgatccatcagccttttatagaattagttagtatgaaccagtcttttagaacccaataatccttaaatttatggagtcaaatttccaaatctgctaggctgaggactgtagaggacagagtgagcagcatccaggaatatctgctgagcacctacgatgtccaagcaccaccccaagagtggcaggtgaccactggcattgtgaaagaaagggctacctgtttttcaggtcaacaggacgagatgggccaaggggagaagagataactgaccacagaaggaagtcgcaactgttgcccattgaacggtgcaggcttcagagagtggatggagtgctctcagagtcagcgacccctttacacacgagagtgcaccccaaggcgaagccaggggtgagctgaaacacagaggccagtgagcactgggttccagggacagatgagacccatttttatttaagattcataagccatccactgcctacaggacctgggatagtgtgcagatacaatacaaagcacaatatgaaaataagataaaacaggaccaaacccatctaagggaacatcaggaagaataaaaccatgcctgtggttgagggctctgcattgcagtgagtgacaaaagggtctggaaaggctggagtcagcgtggcaggtctttggtgcctagtttcgattttgttctgttgaggagtcacaggaggtggctgagaggggagggaggaatggtaccacttctgagtgggaaatgaaagcatgtggccaggggcttggcacccaccatgaaggcgcatctgagaggcgataggaacctgcagggaaggtgcagacaacaaactagagggatgacccaaagaccctggcactgacaggtaggaaaggaaccacgataatgtggaagccacaggatcaggtgacaggagaatgaagggaaggctggtcccctttggcgtccttgctgacttcaagtggcagaggaaggcatgacctggtagacagaggggccaatgccctgaagaagcattcaccagggcactgcaactctgtttccagaaggggctcgcacacaccagtgtcagggtggccaaggtgcttccctgagggaactcccacagcaggacgcggagagcacaccctcctggcacagatgccctctgctctgccctgattcccagggagggcatctccaaggccagagctgacctgaaacaaaatcagctctcaggcactcctaggagttactgtcctgggccaataccctttgttgaagctgggaggatgctatcgaataacataaaaacttaatgcctacgctggagctatggagtacaacaggaactacaatcctacaaaacacagcaacccttgcggaaccacaaaggccaatcaaagccatttacccaactagggtgcctcatgttacgcataagatattaacagagaatgtccgaatgtatgttttccttccaacggctggatgcagggaagctctctggttctttcactagcatcaagtatactcaatttactcctccaaacaagccacacaggcccagcgctaagagtcttccctgtcagttctcaaaaggtggtcaaggggtagaaactctgttgccatcttgcaccatacggctctcagcagctcgccttgtggtcctgaccttgccagccaagcccttttcattccgttttagttaagcagaaaatgaagctatcagctccatttccactctctctgcatgaattcatttcccttttccatcctggctcaaactacatggctcatatagtattcctaccgaggtcttaccttgctaaagattcttctcttctaagacttgctgaatccaaacaaaaaggtgggaggacgtatgaggatacattctaaggggcaacttgaaatataggaaaggatacaagaataataagcccgttgatttcttgtttcccagcttttacacccacaaaatcctaagaattattaagggatggggaatgtctatggaagtgaagtcagtgacccaggaatctgttttccatacctactcatgccatgaaatcccattaagtcaccagaaatcccctggaggataagctctaacaccagttagtgaaagaataaaaatcactgcaatttgctcattaccccagcttttcacccaaaccatggctgaaaatcgctagaagcccacctttctcctggactgcaggaaaatgagctgccaagggccctgcacatccggcctctgctacaccaggagtttggggccggaagctccccagtgccccattggtcctgggccgcatgaagtgattcagagctacagggtcacgactaagccataaaataagaaacaaagaacaaaatgagccttttcttagttgcaagctaaaatttggggaaagtgattagaaaaaagaaaaacagtgcggttgctgggaaggccaatttccttttactcacaggaaatcttttctgctgatttaagagcagagccacacctgctcacagaccaaatgtcagcacaggaggaagctgcaccttgagttattcaaccagtgacaaaagcattaaaacaattctgagctaaggaaattcaacctgggctccagggcccagacccgatccatctgcacatgagttagagaaaggattcgagtttatggaaagaaagggcataggaaaggcacaggctcaattcaagacttagcagtcctgttttatacatgttccctgagtacagaccagcagatctgggctcacaaacaagacccaagacctccattctaaaaggaatgagaactccaccgggtcaactgacaaaactggaatgtaaacagtggctcagataaaaatattgtatcagtgttacattctcttcagttgatctctgtaccatgtatgagagcgccctattcttgggaaacacacgctgaagcatcgggggtaacgcggagctgtccagaggagctctgtgtgctgctgaagaggttctgtagtctctattgtctgatgcagccacacatgtgtctatgcagcccttgaaaatgtggctggtgtgactgaggaactgaatgtaaagttttgtttagttttaatttaaatagctacttgtggctagtagctaccattctggatggtgccggaataaagcaccatgatatttgtaacttaccctcgagtcatataacgatcattcgtgtgtctgtatatacaaacacaccacaggcacacacacaacaaccaaaagagcaacagtgagagacagcacattcaagggcatgacaaaacaaatggggtgaagtgataacaggaaaatctggatatggggtataggggaggggaatctgggtataggggtagtctttgtactatttttatttttgcaattttttagtaacttggaaactatttccaaataaaatgtttttaaatgtataaggatgaacatttatttattaatcactgaaatctaccaggcaaaaagaggaactcatttccgggcagggaatggaacccaggatgtccaagacattggcaaattttgaatgaatattgtggaggccacaggacactcctctctgaacactgctcctccacacccatggcacagtgcttctcccacagtggcagaataaatgccctcgcccaagataaattttctgacttctttccatctgacctctagcctgtccatgaaggacttggctacaaaggtaagtttcgggcaagttttgtttttgaaacagggtttcactatgttgtccaggctcaaactcctgggatcaaatgatcctccttgccttagcctctctatttgctgggaccacaggtatatgccaccatccccagcagggcaatttttaaagtaacagctttatggacataacaactcacataccataaagttcacattttaaaaatgtacagttcaggccaggtgcagtggctcatgcctgtaatcccgcattttgggaggctgaggtgggcagatcacatgaggccaggagttcaagaccagcctggccaacatgacaaaacc

SEQ ID NO: 49761 - DNA, 2698 bp, Homo sapiens
aacacaattgtgtgaccatcactgctatctaatttcaaaatattatcatcactctgattatcagaaaccccatacccattagcagtcactccccattcccccttcccacagcccctggaaaccatgaatctctactttctatctctgcggacttgcctgttctagacatttcatataaatggtatcacacaatatgtatatgtccatctggcttcttttgcttaacataaaattttcaaggtttactcatgtggtagcatgtatcaacattccattcccttttattgccaaataatattcagtggactattactgcacactttgtgtatccacttgtcagcttatggacatttgggctgcttctccttttcgctgcgatgcaaccatgtggacacgtgtttttattcctctcgggtacatacctgggagtggaactgccaggtcaggtggcgactctatgtttaaccttttgaggacctgacacttgttttccaaagtggcctcctgaagtccccaggagtcatgcaaagtcccccagaggtcccaggcaaagcgcacagaaggcccttctgcagagatgctgcccttctgtccttcggtaaaataccagcctaaattcaaagcaggagtcagggtttgtttgatttgaggtaaataaattagagaagctgtgactcgctcagtgccagcagcatgcttagcctggtatcgccccggagaaagagccagcacctggcatggcagacgagggttggcacaatgcatgcttgcttgccagatgaagaggcgctctgtgcaaagtgcagctgcagcaggacgcaaactggtgctctctctaccgtccctcaccagggcaaagctgtctgtgctcctggtcaaagcctcggaggacttatttgctgtcatccacacactgtgctccggaaagtgcctgctcagaaactggcagggagaagacccggagggagtgaggaccatgagaaatcagagagcaactagacaaggaagatatcaaaagagacgggtccttcgaggcctgcacacctgttagtcctaatatatttcagagcaagggatcagactggtgcacacatgggctgaagcccagggaaggagccaagtccaccaccaatgcaactggtgagtcagtatcaggcatgtgtcccctccaagctggcagtaaacaaacactcacacttcatgtttgggcactggactaaattaccaggcaaaagtacaaattccggccaggcgcggtggctcatgcctataatcccagcactttgagaggctgagatgggcggatcacttgaggtcaggagttcaagaccagcctggccaacatggtgaaaccccacctctactaaaaatacgaaaattagccggacatggtggcaggtgcctgtcgtcccagctactcaggaggctgaggcaggagaactgcttgaaccctggaggcagaggctgcagtgagctgagatcgcgccactgcactccagcctgggtgagactctatctcaaaaatacaaagtacaaattccaaagctagttaagcaagcttgggggttggtgaagagttggtgaggaaaggaggatttctgcagagaagagcagaagtcctggaatggctggctctctctttcattcccttcacttttcatccatgtgtgcgccctggggagacactcggtttcatcttagagtcactgtgctgagcctcataggcctcttctttcactctggaccccatccttcgtatcgtcctgtcctcttgcaacatttcacttgtccttcacctttgccccctcgggacaaactttgttggcaggcctggcattatttttgtttttgaagatattgtatttcaaaagcaaactgctacatatttaataaagaaagctcaaccacagtttgacgcggtggggatgcagaagtggcaggcaggtagcttgagatcctgaatatgtcctaccagtgcacagcctgttccctcagcccccattaatctccacactctagcctgtcccacctttgttatttctccaattccgtgaacgttgatcagttcagtatagctctgaattttcacaggtaactcctcctgtctcctgtgcattcattttctcagtcactattcaataaatactcagtatgatcaccaccattcacgttttgttgtttgtaatatggttcgtcttttgaaatcatagataagtggcacagaacctggtatgatgaaaaatgtcagagaaaacaaagataagaacgtgaacttgatctttacatacactctctcatctaagcctcacggcaaccctgggaggtcattattatcatcctcaccttacagaagaaagagatccagagagactggcaggattcgctcccccaaggtcatgagctcgtaaaatcagaggacctgaattcaaacacatgtcagtatgaccctaatgcctttacattttccattaggaatgtaaatgacaacatctttaaaagtcataaacccttactcagccacgacatggttataaattgtagaaagaacaatggagtgggagttagaaaatttggcttcaagtctggctttgtgttgattttgagcaagtcacttaatatttctgaacacagatttcttcttccatgaaggaggccatgcttaccaaactgggctgagtgtcctgtgaggtgctaatat

SEQ ID NO: 49762 - DNA, 2874 bp, Homo sapiens
cacagggtacagttctcagaatagagaagaatgtccaggtcaaaggtttcctagaaaactcccttctctttaaaacagacacatgattttccttgggacatttttatatacaacttacaactgccagatcactcttggaaaatccgctgctcatcttggcagtggcagtggaaagaagccagtgtccttagacatatctctttgtgggccccagccccaacatgcaggtgtccatagcacaggacagaggactccatgcagccaaaaatcagtgcagttaccccctaagtcctccatctagaaaaaaatgagacttggtagtagccactgccctgtggattcagccagagcccatctctagaccccacctatccccctgctgttccaagttccagactggggctccaggatcaaaatggctcagggctttgtgctaagaagagctctgaacaagacataaggggatggtttaagactcaggatgctgaggattaagtgtctgggcagttagttccagaggtcacctaaaagactacagggttctgcgagagacctggaatgaggaactaacattgattgtatgcctatttaaaagccaggtacaacatccagagtatataaagaactcttacaactcaataataaaaacacaacctaattttttaaatgaatgaagaactgaatatacatttagccagagaagacatacaaatggtcaatatgcacaggatgatcattattaattattagggaaatgcaaatcaaaaacacaatgggataccaagaaaactgaaaacatatgtctacacaaaaccatgtccactaatgttcacaggaggattattcataacagccaaaaagtggaaaccacctgcatgtccatcaagtgattaacagataagcaaaatgtggtatattcctaccgtgaaacactatttggcaatacaaagcaatgaagaaccgatacctgctacaacatggatgaacctcaaaaacatcatgctaagcaaaagaagccagacacaaaagatcacacattgtctgattccatttcaatgaaatgtccaggacaggcaaacccatagagacagaaaatagattagtggttgccaggggctagaaggagaagcgaatagggagtgagttaacaggaatgggatttccttttgggatgatggaatgttctggaattggacagtggtgcctgatgtacaacttagtgaacaggctaaaagctgatgagctgtacacttcaaaaaagtgaactttccggtatgtgagttatatctcaataaagccattttaaaaatagtcacaaaagtagatgcctgatacatattctcacccaccggacctgaaatacatatcatcatcccattttacagatgaggaaacttgaggactggtgaaaagcagctaattgccaagaggcccgctgcgaagccacgtgacggacttacggcaagtggattttaactaggtttgctgactccggaggccacgttctgctcgcttcaccacgctgctccctgccaagatgataagctaaccagcaactgcagaacggttcctctggaaaaaagatcactccctggacaaaggatcactgacctacataaaatgctagtgctggaagtcacgttaagcggcatctcgccaaatcccttcatttcacagatgaataagtagagtttcaaggcactgtactgacctgtccaaccaaagcagcaaggctggtgggcacagtcaccctctcattttacagaagacaagctggcgtattgttcactgcaattagttaggaatcaaaaggtagaaggagttcacccggttggggcatgcaggtcaacaggcattcaccaaccttcaaacatgccagcctcacatccaggtcccagctagaagatcactcgggccagttatagctcacattattctgcggttaccctgaaatttctcttctaaccctaggagtgctctgaaaagtcccaccagggtgcgactgttccaaggatcccttggagcttttgaactacttagcaggaatgaggagttctggatttagcattcaagtgtgaggataaaggctagggagactgaggaagcaactatcctccccccgagtctaaagtgactccatggggaaccacttgagaaggaaagggaaggaagctgaagccggattatttcacactgcaaccgcagggcctcgaggactctaagttgggggtctttttattgcctgcttaatgtctccagggaatgtcctgtctcaaacttaaaatgtcccaaatggagctcattaccccactgttctccatcccacaaatctgttcctcctcttgttttctctttcccccaggactatcattcgcattccccagtggctgaggctaagcaccctggctcaccttccacacccccctcaccccccaacttccaggcagtggccaggcctgctggctcgagctctgcctccacttgccggctggaatcacctcctcctctgcatgctcactgcaagcattgtcctggggactcagtaaatgtttactgaattgagaggtcaatcctacccactactagttaagtctttcacagcaagtagcagccacgattatttcaacacagaaaaggagaaaaagaggagctggatgacctcgtgtaaataggtgacagagaggttattaaagcaaagctcgagccaggaggagcagagcagatggggctgtgagccactctttgcacgcatcctgctggaacagaaaggcacaccaagacaccagggctaccaactgcatctgcaaattattcattatttcagtgcagtccctctgaactctccatctgctgatggctactacagtcaaataa

SEQ ID NO: 49763 - DNA, 2014 bp, Homo sapiens
ccggccgtgcagagtctgtctcgtggtttatcactactcaacgtgtctgcatgtgattttctccctcacctctcccccttctgcaccaaatcatgcccacctcccttctgaactgctggaaaccaaaatcttcctgaaagcaccccaagctaacttatggggttaggatcaccacacccaggattccctcagtcctcctatctttagacttcttttctttttgaggacacgattctccaaagttaacttctataaagcaaatcctatttctcactgacccatattttaccaaacagctggcactgcttttttcacagctgaaaaaaaaaaaaaaaagaaaaagagaaagaaaactctgctgaagcacatggagaaccggccacacagccctgctgaagcatgagggattttccttcccaggactttccaggctcaaaattcctgaacttcccacattagtcaaatgctgctgctacgggctggacttctgcacattagatgtcatcgtaaagagaatctaggtgacaaacgaggcagaaatgagcacaagtttgtccccaccactgggaaatcaattcccagtgcacatcccacaagagggtggtctaggtaggcttgggcaagcacaggtatgcctctgtcccaaggttctcctgtccctctttacagtagtcagatgggcatggttgttttctattccattcttggctgaaccagtgggcacagggctttgcacacagtgggccccccagtgctgctgagagactgacttctgagagggaggtgatggagactgaggctgcctccgcagaacagagggcagctgcattaccaggcatgccctctgagaggcctctgctttaagctgagtggcaggtaataaaaacccaggttccaaaggagcttaatcgagggtgctggcgtggcagctgaactggagatcagaggggaccagcaaccacgggagccttcctacatgtcacaccattccttgggaccagcagtgactctctaaggatgaaccacaccatcgcacacatctgaagctgggagtggacgaggagaagggggaaatcttcatggagaaagacaccaaatgtcatgagtcataaagcaaattctgacttggaaccatcgagggagattatctttcagctcagagtgcatttttttccagcaagatacaaaaagcttcatggatcatagtaaccagcttgcctgttattgagttgagcacagtagggaaaatgcaaaggtaaagtgtatgcttgcagagtggctctgaacacttctgaaaatgatcactcaagggctggagggccaagggagcgtctctgcgagggcaggcgtgcatacacaccagcggcccccagccaacgccctgacccagtacacataggcagcaaaggaggtgagcctttccctttaattatgccaattgtgagatggggaaggcgccagtggagaaggcatttaaagcagattgccccatttagggagatatgatacttggaaatgaagactggcacttttcctagactaaaggttgtgctgaatggccagagagcaggagggcagcagccctgcctgtggggcttccacctgacttcaaagacgggcgccacgctggagccagtgcacaacacaaagggaagcgggggctcgaggccccaggctgctatctgctccaatttaggggacagtcctgcttctttccaagagacaccctttggaagtggggagaaagtagctaaacaggcctgaatgggagggctagaaagaggagatactgcacctcaggccttgccctttaatttcagagccattttaagcataaatatcgtatctaagtctccgatagaaggagcacaaatggtaggcgctcaattaatgtcatctcacttttgagtcagagaaacatcttcactttgcattactgctgaacagaactgagggccatcaagaccactttgtggaggccataaggaaaagacctagaaacgcatgcttcaga

SEQ ID NO: 49764 - DNA, 971 bp, Homo sapiens
ggtgacaaaaatgttgtaaaattagatagtagtgatggttgcacaatttgtgaatatcctaaaaaccactgaactatacactttgaatgggtaaattacatgaattatatctcaataaagctgtcaaaaatacatgtggaaataaatagtcctcatatgcaaacaagaggagataatgaaagatattatttacaaggattaacttaagacatgtatacaacctatatacagaaaacttttatacattactaaagtacacacaaaaaaagaacacatagaaaacattgtctttgacgggaagactcaaccttgtaaagatgttaattcctcctaagaaatttataaatttaatgtgatcccaatggaaataccaacaggctttttttctggaatcaagaatgttgggtctaaagttcatatggaataacaaacatggagaatagccaggacaaggctgaaggggaagagcaacgagggagaactagtcttttcagatatgaaaagatgatataaatttcaaacattaacaacagatcaacccatggaaaaacatagagtccagaaatagactcccagacctataggaacttagtaaatgataaagtaggggttatgatactatgggaaaaatataaacttttaaacaaataatgttgggacaattgagtattgaaaaaatataaagttgcatccaagcctcagaacatactctaaaacaggggtccccaaccactccccaccccgccctggcccggccgcagactagtaccagttctggcctgttaggaaccaggccacacagcaggaggtgagtggcaggtgagtgagcattaccggctgagctccgcctcctgtcagatcagcagtggcatcagattctcacagaagcatgaaccctactgtgaactgcgcatgcgagggatccagattgtgcgctcattatgagaatctaactaatgcctgatgatctg

SEQ ID NO: 49765 - DNA, 1443 bp, Homo sapiens
gagataattaagcaagattctaaagagttggaagttgaggggtgaaatgcaaagtgatcagtggagtcaagcagaaggtggctttgttggggtgagggatgccagatacaagtacaagaaaaataaagacggccgaaatgaatgcgagctacagatgagtcaccaatccagggctgcgtaagttataacttagatgcattaaaaggaacagtcaattccagaaatatttatgaagcgcctactaggtttaaggaactgcacggctattgtaggggacaaagatgaatcagacatggttcctgccctccaggggttcacgatgatgcaagaaccctgaagtcgtttttctcttatatgcggtactaatgagaacattattaaagagctgtattcagttttaactgccaccatttttttaaatagggagaaactagagagagttcagaagagagaaaggagatgctttcagtgacacaaaaccggctctgtgaggaaaaagctaaagagacccagttattatctttaagtatatgaaaggttttagagaaaggaattgagtaaaagaaaacaagtttgaatgacagcaggcgagatttcagccaggcccaggaatttcttgacaatcaggttaatagaatactggaattggtcactcagggagttccaactgccctttcctggaaaaaataattaaataaataatgaactgacaatttcaagtcacagacattcaccttcctgaagacgggggtgaactatatctgtgtcaaggtcttctgctctggggctctatgcccctgaagctaggtcaggcttttctttttccacaattccctgaatgatctgctctgggtaagtagccactgaatgcttcggagtgacagcccgatctatatccccaccaccaagtgccacacaactacctggaatacaaggtctcagccaggcgaaaaggctgggaatcaattctccaacagccacatatgatgcaagagtccactcgcaacaaagcctacgacacaccaaatatcagaaacgaaagtctctgagaacttgtgcaaataagaaacgtatttgcattggcaaggatataaaatttaagtaacaaatagaagaagacaggatcttctgcaagttacagacagtaatatttatggacatttctaagaaagcttgtaatgagtattttctacactcagaaacacttttttgagtctacgtaaagaaaacacttcaagagagataggaaaatggggtcttcccactctttatttatttattgagaaagactctcgctccattgcccaggctggagtgcaatggcacaatctcagctgactgcaacctccgcctcctgggttcaagcaattctcctgcctcagcctcccaagtagctgggattacaggcaccaccaccacgcccagctattttttttttttttt

SEQ ID NO: 49766 - DNA, 6352 bp, Homo sapiens
aaaaaaaaggagaagaaaaaattccatcttgaatcagacccatggtctagtgagtctatgcttctttcacttcccccaccctgtaaagtcagggacagggattaagattttgtcatttcgacaaacccagaacctgccacagggcctgacacacagcaggtcctgcataaatgtttgctgaatgaatgcgttaaagatgggccctcgtctgtcaagaggtggaacatttgagttcatgtgggtgaagggcgcagggcggtgcacagcacaaagtcaatatggcctaagtcacagtgatcaccgtgaccctcaagcatctgggtttcttttataggaaaaataaagatctgcctatactgtaggtttttcttttcttttttcccccaaaagagaatagctatatgaaatggaactcttgcgagtttgggcctttcaagttcacatcccatcggtggttatataaagtctactgccattattctgaagcccgtctttgacaccaacccaaagtccttgaattgtcatcaataagactaccagaaagcacaggcgaattacacgttcagagaacaataagaaatgctcacatatcacaccctcttgatcatcactactttgctccacacaaacctcaaaggtggttccccaagactggtctctatgggaggaagggagagagagagagatgaagaaatataaaacataaaatacaaagaatctgagcccctgtaacttacagaaagcaccaaattgtcttttgtaggaaaatgatgtttaatgcatggtgaggcagaccctggcttgtggtgggcgaggagcctccccttggaggaggctcttggtgaaccacctctgggtgctcccttgcccagcctgctgccttgtttaggaatggatcttggttaacggcaaaggttatctttcatacttggggatactttccaagaggcacagctgcagcccctgaaactctgccccagcagtttatttccacatttttcaagtagcacagaaagtgccactatagaagagaaattctctacctgaaaccagcagaagctcaatgcaaataaagaatctggaaaggtcacagagggagtaaaaagaaggttctttcttctatggctatagggggtttattgttgctggtgcccaaactggaaagggaatcgcaggagattaataattgaaatgttgctattattggttttcgaaactatttgtgggttattctttccctggagtcatcatgtctgtaagcatctcagaagatagagggatttaacacactctgagaagatgcctactacagccagggactttacgtgcactagtttctaatggagttcctgcacagtccaataaagcccaaagtcgtatcactagattcaaactcaggtttctctgattcaagtatcatagcacattgtctgaaatcaaggataaaattaaggcaccttactcactactcaaatgtggcgagaagaaaagcaacatttatacttactcatttttaaaatataaaacctaaacacaggaacagatattttagggcatgtgtcatcaaactctgctaacccaagatgattcagaatctcatttcttggtagacagcttggtagataggcatcttcaggtccatctgatgatgaattgcagcagacagtttttggaagtctgtgaagtgttcctttacataagccaatagtaatcaacacagcatatctcagggagaggaaaacataaataacttggaatttaggctcctctcattcagaacccataatagagaccttggtggttggcctttgcactagatattgaaaaagcctcgcaaagcaagttgatggaggaaatacaatcacaaggcaaatgtttaaccttctaaagaaaataaacctttttataagaagttcagttccaaaccaccaaaaactaacatgctatttataaacctatccttcaagcaagccctggaagactgattctctttgccacccattaattggtattatcaaataccccttgtttcaaaaacagcatttctgtctaaatctctggcggttcagaacgctccattaatgtatctgggccttcacctggtattccaacttggtgcagcagcaccccattgaaacaattccctctcgtgtcgttatacttttcctgagaagaatcatgcacactctttaggagctcaaaacccacaaggaatccctcttcttatagaaatctacaggaaaagctctgctcgtttagcatgcacacagggagtccatgtgctctgattgagacaggggaaaaatcaggtttcctgaacccagaggatgtcaccacggcaggagaaaggaggtcatcagagtcttggcacactcatcacagtgagtgaatgcgggtcctagcaacctaatccttgattctagaagtcacctgtctgttttagagcatgtccaacaatctctttcaaaaacacccagatctgggcttttggcagactgatgtgggccagttgaggtgggatggggaggaagattagaaaaataattataaaggtgcacagataaacatccggaataaaagggtgcacagcgcaggaacaatgaagagggcacacggacaagatggagggaaactgagggctgaaagaggccaccgcggaggtcacctgagacagggaaggaaggctggcaaataaaaacagttcatgagacttttgagatccatgattattcttaaaccgtaacaccctacacacctgcagttctttatctggcgtaaggaactggaagaacaatgtagcaggaacggggagagccaagtctcagcctcgggggcatggcctaccttccatatggatttaaaatgaaaggagcaggaggagaacagtgcagttcccaagatggctttccacaaagttgacaaaatacaccccaactcacatacccggtccctagtaacagggaaaccagccgtttactatagttctgaattcaatgccaagttccttctctcaactcaccgggagtgtccagcagagggagtctcaaggaggtacttaataaagagaaaattgtttcattttaacactctagacagtgggagcattgactgtagccccctcctgtagacgcagatgaacaatgaacgcccgacatgggttctcccgcatgttcacatgtccaccggcatgttctattctgcgtggtggagtgatcagaaatttcgttttgttttgtcgaatggttaaatggaccttgtgttcttcagaatcaaagaggaaagcccctggaataacatctctctgttgccttctaaacagcccctttgtttctaagagagtctgaaaaaaaaatatttacagtctataggttatttacagcctcgttatccagggcctgactggtaactttattccggccagaaacctaattcatttggagccctgaaactaataacagattttcttttaagtttttttttttttaatcagcctcttataacagagataaaactattaatgccttccctgtctcactggccacaactgttctccggatttacaggaggattacattcccccctcgtgccctcctctgtgccacacaaaccctgtcccctctcatttgcgatttcatccacagaatatctgaacaaaaccgaaagaaagccgggggacccacgctaaaagtatgtgaaggctgcgatttcaatgatttcatgagacaaacatttacacgatgaaacgactgaaaaatcagacacacttgggtttaaaatttctcctactacaagcacacaaaaacacatcgaagtgtaaaaacttagttgattctgggttgctttctggctggaagctgacagaacggactgaagagaaacgaaagacagtgtgcgaggcagacctactgcttttctgccttgcgttcttttctttcttgctaaaggcagtcaaatggggaaaaataccccgatgccaggtgaaggtgcacaacacagatcgacccagaccgagccagaaaaacgtctccgccgctcccccggctggaaaacccaaagtccacgtccccttccacacgctaatgaggggagattttcgcctatttcattgttctgcctggctctgacatggacttttcatctctctcctctctccccacctagccccgtgcattccgattccacagcccccccaaaatcggaggctcgcggagaataaaggagcgtggggtgggcgcggaaagaaatgggaaggggcgcggggcggagagcgaagtggaaaggaggtgctccgaaaggtaatgtgggggggcggtggaagctaagccgcatcaccttcatttatcgcaaataaataaaaagcacagtcaccggtccgccttccccggcgtccctgccctccccgggcagccgcccaccctcgcacacgccccctcccctcctgcgcccccggcccctctccccgccctggaagcaagaccctgccggcgccgggtcccggtcatcttccgggcgagggagggggtcgcggccccctcgggccccgggtgggggctggggcaggcgccgggggctgcgggcgcggggccgcgggcagaacaaagctgcgggggccgcggagggcggcgggcgcggggtcggcggggccgggcgccccttaccttcgtacacgggggccatcggggccggggtgtccgcggttcatggcaacggggacgggaaagcggcgcgcgagctcggcccccccagcctcagtcggaatctgccatcttgagcctgtgtctccgctctcggcgcagccgaggccgcccgcgcccgcatcaccgcctcccgtggccggcgccgggggagggggccgggcgcgccgccgccgccgccgccgccgctgccgcccgggcccggcgcggggggctcggggctcggggctcggggcggccgggcgggcggagcggccgaggccgaggcgccgagcggccgcggcccccgagcggatccgcggaggggcgggagccgggggcagcgcgcggccagggccggcggggctcagctcagcatggctgggcgcgggggctccgcaaaagttgctggcggaggggggcggcgggcgggggcgggggcggggcgcggggccgggagagccacagggagtccgcgcgcaatcgagcgccgatggcacggatgcgaggcggggaaggccgaaccgaagggcagagccgcgccggcggcccgaggggaccgcgctgggaggggctgccgcgcagcgcggggggactgggcgcagggcgggccccgggtagtgggtgagagggccggcctggacccggcgggcgcacggctccgagcccagcgcagccgagccggtctgcagaggggcccccagaactttgtgtgtgtgtgtgcacgcgcgcgcgtgtgtgcccaggtgcgagggttcgcgcgtgtgctggcggggagggaaccgacccgaaagagagccccacgctggcaaagtggctcgcccatctcacagccggttggcgctcgcggaggtaggagtggaatgaatgaatgaaggagtgggcgcgcgccgtgctccggaggagggcgggtgagtggaggagcttcggaaagccacacgaggtcagaggcaccgaagccctgccgtgcacgccgcggaaatgcagcccccggggtggtcgctgggttcctgccggagtctggcttccacgccaccctgatcttctcctcctcgcgtctacactgtcccgagggccgccactccatcacttgaatgggagctcacaactctctgggtcctcgcttttctcagcgctctctcctatcagggcttccgctaaacactctccagactctccccagccgggagcctctccaggtttgcttctccagctgcctcccggatgcttggataggatgccctgccatcccctccaacttaggaagacttgttgagtctcctcttaggcactgtttttaaaactgtgggtcgtgacacagtaatagatcataaaataaatgcagcggaaggcaaccagctttcaaaaagaacgaaatggaatccaatagaaaatattagagtccattgcccttagtaagggcaactattgtttcataaaccttttgtttcgattataggtactggacaagtgtactggaccatgatgtcaattttatttccgtctgtgaatcgtgggtttaaaaaagttgaaaagctatctgtgtaaaataatgatctctaacactgtataactttcttaaaaacaacctcgtgattttctcactacttcttatcctttccggtctccatcctccgttcccatccttcagtccttcccaaaaaaggcaagctctttca

SEQ ID NO: 49767 - DNA, 757 bp, Homo sapiens
taccactttccagcctttgcagccttgctgggctgggcacagcatcatctcccgttgctgtgctgaggggtgttgccacgggatgtggtggcctctttgcctcagagcacaaactgtccaacttgccttgacagtgcacagcaggtcttaccccatgagcatatctgaaccttactcagactcgggtccttcagcccatggggaaagtgtgctgccagcaacatgaccgtgtaatttatcacccaatccagttcccttttgaaagtgaaaggaagtgctattaataattaccccaggataaccttatcacctaagactatcccggatatgctggggcatatggtcaccctagttcttggccgtgtaaagtaatatagcccttctctttattttctgaatttctcctttgtatgctcctttgtttctaaaattccagattctggtgagcaaacccacgttcagaccacttactctattcaagatttaacaggcttgaattgtattgattctcaacatgtgtctttccacactgaagtcctaatcattttagttggttttcacgcagcttctcttcagccactgagcgatttttttgcagcttttcgtagacctctgggtcagcgatcacttttgtaggtgcattaaagttctcctgtgttgccgacgtacattccaatgggctccagtgatttgggggtcctatctccatagtattcatgatgtctgttctcctgatacccatttttgaaagggattg

SEQ ID NO: 49768 - DNA, 2831 bp, Homo sapiens
ccatatcgatggtaaaacaacccttagtgactcaattttttaaaaaacagtctttaaagtgggattttctcacaggtttttgaaagtcaaattaaattgggttctgtggttccctcttatccatatgcttatttatctgctcaaagaactcaaggagattagtgagacgtgatttctccttactgacaccacgttgccttccctctaataggccatgtttacttaagcgttcagcaattcagctttattatacattcactcggtaaacattaaatgcttactccatgcaggctgctaccaaacggtcccttgtgatacagaaaatacctcggcatattagtttgataaattaagtgaaaaggaatttaaataatgcatgctctcattctccaacagggagagcccatgtctgctcacaaattcaggcttgagttacgttgagttttgtccctggacagcctggtggagaagggccctgatttgggaagctggatttagctctgaaatttgacatgagccgtaagcatcccatgagggatccatagagcatattcactggaggtgggggtgatgcaacagggagctccctgacatacaacaacattgaacaaatgtgtgaattcaaatatcatcctgtgaaatattcttttccaaactccagaacactggctggagcagactgtgggttggatccggagcggcagttcttaatgtcatgctttcccattcacagtttttgggcctctggagtctgtgcaatgtctctgcttcatcttgctcattttccacgtggaccttgtaggtctctatcaatgtcctcagtgcttcctgaaactgctccatgatggtgcaaccacagcttatcattaaacccaaatcaatcttcttggcacttatagaagctcagtcgtcctggtacatcaggactcggatgtttctatttagatattttcaatgagctcttctttgctgtcaggtacggtacctaatgaaaccatagggcagctcttttttaaatatctgtggaaaatggagctgagtccacatgactcagcagaaatggtcacaaccagaggcagaacttcttgttcttggcctcctatcaaggcctagagttagggagctgtgggaagggtgataagaggtaagccagtctttggcccatgttagcttggtctggtcagataggcatgtcagggatgtgtcaaaacactaagcctagtgctttggagatgtgggttctggtctggagtggcagtatggagtgccatctctcaggtcctcatgagcaacacagaggtcacctctccaggcacaggtcgagccacaccactgacacacaagagtcacgtccaaagccatgtgatggacgtggtgggtggttttatcccgaaccatcaatacccggcaccctggctgccccaggttcagcctctcaggggctgcttcactcgctctccacacagctgtgaacattgcaggatgagtcactgtgaaaccacaaactccttggcattggtgaagatgactaaagttataggcaaattagtcactggaaaccttcctgtcctctgtatctgcagcagcctcctatcgaaggaagaaaagagtatgttggctcattgcagagctaattggcaaggaaagctcaattcagggctacaggtgagtcagacgcccttgtgcgggggccacagggacccgcctgctggcatccattgaggagagaggggcccttggcagacttgccataaaaccgccccccttgaactcattcctacacctgtaaccactgacagtttttgaaaactgttcacctggagttcctggttctctttctcttaaatcaaacattgagtaaatgaagacactcagatgttcaaacatgtgcatcaagattttacttgtgagagtggttgccatgcatgacctagggaagctctcatggcttcagtcaaaccttgccaactttttttagctgtgcatttcttgagaaaggtcaactcacattacgggtctacagctctgagcaagggagaagttcttcctgaaagcacaaacagactacagagggcagtgaaaccagaaacacaggtgtgcaacctcatttgcctgcccccgtctctattttgaggcctctttgttttatgtgacctccgtctccttctctgccgcaatcttcttcttataacacccactttcttcttttaatttccccctcttctaagccatagcccagtggtatggcgaaaggtctttgctgtgcataggaaaccctccaatctgaactggaagcttcctgttgcaggatgggctgccccattggaattcccaggtgacagtcgcaatgggatgcctgtcccctgcaggtctcccatttcacctgcttttctaatgtctggacatggctaagtcctagaaaagccagatccatggcattacatttaatcagtacaacacactgagcttcgtttccaacatggtagctaagttttaattctaacatctttaaaagtactgagtgtcttgtgatgccttgggaacacaggaatagtgttaagtggtgttgattctcaatgctcaaatgtacttctctctgccttgcagagatttttctaaaatttcaagaccttgttgaaaatgatttcatatttttgtgtcttactagactcttggttcagcaggaagctatctttatatatttttttaacaaaaagaaattagtaaaagcttgctctgatatttatgccatatttccctaacttttgtcgtggcagaagtagaaataagtgtgtaaaccaggagattaatatctacaatttaggcatgag

SEQ ID NO: 49769 - DNA, 1823 bp, Homo sapiens
ctgtttcttggaggggacttgagttctggagaaaactggtgtgagggcgacttatttcttactgagtgtcctttgtacatttttaatttgtatttcaaaataataatgaaactagctaatttgatacttgaaaaaaattaaaattttctaaaattgtgtgcattctttcaggcacatctcaatgccacttctttcccaggctctgcaaaagcacctggtgggggaagtcccatggaggagggtgggagggtgcctgggattgtgtgatcaggtatggggccgagcagacagggcagaagagagtgccaggctgagaggactgagggaacaaggtggggacacccaagcaaggaaactcctctaagtgcaacaaggctgaaaacagccacaccagggactgaagatctcctaacttgtccagtttgaacatggacagctcactaggtcaggaacctcttgaactctctcaagcaggtgtgtacacaacagataattaaagggctgggccaggaaagacaaatagctatggtccaaggtcacaaccaaccagttcctgttccctccctgaaaggcattagaggaaatgatcagggatgagagcagaaggccaccccagggcatcccagtagtcaaatgctatacctacaaaccccaggcacaggtgtactatggacagcctgagacaggatctccctgcaaacaggcacatcctggggaaggtgcactccttagggccctccaggctgatgcttcctcaggaaggacatgggggccaggggaatgcactataatcaaacagcaggcctgaggcttccgttctgaaacaaagctgagctatagaccacactgttcacagctggaaggtgcccaggacaggaggcaccaggtaagccactgcagccacagcagctggtgagagcctagtcccagcacagcggtagagacataaggtcctttcccttgtcctggtcttcctgtcccctttctcaacttcttttcccgccttctaatgttccctacctcacgttggcattccaggggctttctaggacgtgagtcatagaaatcaaatcaatttggcagacaaaacaccacatccaccccagcccttcctccctatagtccttgaaataacaggccagagagaataataaatccaaaagcactggaaaacaataaaaaataccatcaaaagaccagaattattcaagaattgctaaaactatggagcaatgagaatcaaatagatataaaaagaagagagaaaaatgcagacaaaatgtgcagaacataccacagaagtagaaaagatctggggtcatcacagattcagagtcagatgaagccaggagcaagaacgatacccaggccaatcccaatgagaacaatgggagcccctggcagaggcactcccttcccctaacttgcttgtgtgaaggaagcttgctgtgcacttcctagttaaactaagtgtgaatataagggttagagcaagagaaaagcaaatgagacggccaccaaagcccccgtcccagtcctaggctacatgccagcctcccacctcaccaagcaggaccttctgcctcttccccaccatcactagaatgagggcctggaatccaaatcagccccatggaaatcaaccaacaggtatacgggattctcaagcaccaacgtgacagacaaccaagagtcgctcaacacatgaaggaaaacaattcaaagagaggcagcaactcacacagaaacagcgatacctaaggacagaatgatcagagttaagagaacaagtattcacagctagacttcaacctaaaagccta

SEQ ID NO: 49770 - DNA, 4692 bp, Homo sapiens
caagcatttgatgagaatgacaaagaggagttgctgcacagcagtcagtcggtaagcagttagccacaggctgaatcaatgagcatggcatcttatcattataggttacatatgtgcatgcgtgcaggcgtgtatacacacacacacacacacacacacagagccctgaacctagcttttttttttttgctctcttcctccattctttccatccacaagcgtctgataagcaccagggtgagccagacattggcaccatgccctgagaacccaaagataaacctttaaatgactgcctgagtcaccaggacccagaagagtcaggccaacagcatttgtttgactctggcactgccatgcctcctatgccacatctcaggagaatgccaaaccctgatccaccccaaacctgcaccttttacagaatcccccagctcagtaaaaggcaacttccctctcccactgcacagaccaaaaaccctgaagccatccttgcctgctctctttccctcatctagcggaggtgacagacatagaggagactctgatacggagtggaaagtgcaacgtcagctgttgtcagaatctgtcagcgcagagcggaagggcacctgagccagtcagggctgggagagaactggggaagaaatcaggggagcatgctggatggcataaagcctgagtggaatacttaaagggtgaggaggagacagcaagagaaaggaagaacattccagaagaggggcaaataatttggtgctgccagagccaaatatatctaataagtgtaacgatgactgatggtaacaatgataatgactactaaaatttattgagcaactgccaaatatcggggattgccaaaatgttttatgagttaatcattcagtcctcaaccagcctgtgagggtagtaatatcattaactccactttgcagatgagggaactgagacctggaggtaaagtcacttgcccgaagccatcagctagcaaggagcagagcccaggttgaaacaaggtgggctggatcttgggactgtgccctagaccaccaggctcaatgcctcctgagtagaggactaagagtcaggcacccaggactccgtaccagctctgcagcaggactgatgagctatttctaaaagaactgaccctgcggttcaggaagacaagcagagtcacaggggaagcagaaaagtgcagccaaccacacccactctccctaaagtgagtcagaaatggaaggttcaagaaactcacctgtgtaaaccacaaggaaaagagaaaactgaagaaagaagaaaactcaaggtcatctgagccagtaaatatcacactacagatttccgagacaagtcagacctgaccccacattttgggaactagcttaagaacagggctgccatctttattttaccaaatatgaacatgaaacagatctaccagttacccccatgagtggctctatccagccaccatttgctgtgtgccttcctcctcgtgggctgttgttccctgctctcccctggactgcctcatccctgaaggctgatttccccagagttccaccctcagcctcttttcaggcctcagacgctacctcagatctgatccactcctggggctgcaactacaacatacaccgcccaatatctcccaaaccagcccagcgcattggggccctggccttcctcccaagcttctgacctgaacagctgcctcctgggcatgcttccaaactaaaaccctctcttgctctctcagtgaacaacacccaggccaccgcaggaacagagactgaagagtcgtcacctctcacatatcctctcatcacaccgtcaccagctatcccaaatttctcacacacatagcccttggaaagctctaatctagatacttccagacagctgcttcctagaggcatttcccagtcaccctgcatctagacagggtcacgagacagcttctggtcaatgggatgtgggtgaaaggaaatccaccacttctagacctggcccacaaaaacctcccatgcatccctcttttcgatcagccccctcgaacttgataacctaggctggcctcaagagccatgtgctgaggggcacagagcggaggtcagtcagcctgcatccctgaatgactgtatggatcaaggcccccaccccatgctcactactgggcctgacatgagcaagaaatatctactctattaagacaaacatacacacacacacacaaaacagggagcaagcaagaaaggagggagcaggggaggaaggaattctccttgatgactagcttcccagtggttcccccacaacatcctcccttaaattggcacccacaccactaccttagacttcctaaaacgcaaacctgatggttgctctctcctgccattttacccgccccatcacctccagggtgaggcccaaattctttagcataaacctcagcaatcccttccacacatcccactggccacatgctatgcacagaacatggacgctaagtgctggggagacagctggagcctctgccctcagggagtttctattctactggcagctgggtgccatgaggaaaataaacagttccctgtgaccaagagtaaggggaggaaaaatcctcaaatgggatgtgatctttaggttgaggcctgaaggattaacaaatagggccaaccaagagcaagaagggcattccaggcagagcaaagactcccagaaatgcccaggctcccagaaatgcccgggggggggggggtgttccagtcacagaagggtcctgggtgggcagggaccagtgccccaggaccttgtgggcgatggcagggagtctgcattttccagtttgtaagcagattaatagggttgaactgggtttaaagatctctaccagctgctgggcagagaaaaccttcattgtctggcctcaaagctggcaaggggcgacccgcggcgtcgtggagttcccctaagccgccgcctccctccctccccaccccacacggccacacccgggtgttccacccggcactaccatgctctatgtaaatcactctctccccccaggcgtctagaggaccccactcgaccctgagtccctcgcactgtgccaggtactccgcaggtgctcattaaacgctcgctttagtgaatgacggtgcgaggtcagggcagagccaccgaattgtctgctcaaacttcaagtaggacccccaagcgggctggaagtgcgtgagggcgcgcaggacctccgcccgccgtcgctcccggcgcggcgccttacccggctctcaggaacttgcaggcgccgtagaccatgaacctgcagaggtggagctgcgcgcagagccccacgcagcccggcttggagccctggtgcgcgcgacacaggcgcagcggcgaggcggccagcaccacgcgctccggggccgcggctgcgccgcccgcccgcaccgccaccacgaagcgcccacgctgccgcagcagccgctccagcgcgtcggcgctcaagcccatccgcaagcggcgccgcagctcgggcaactccagggcgcccccggccgcgcacagcacctgggtgacctcaccgacgacgccggcctgggccatggccgctgggcctgctcccgtcggaccgcgggtggcgcgacgcggacggcggcggacgctggctggcgggcggctctcgcagggtggagacgccggcgggaaacgaaaccgaaagcggccccgggccggcgaaaaacagaacctgtgcgccctcgccacgcccccggtccgcagctgagcggctgcgccttccgcctcagggcccccagctgtgaggccgccgcccgacggaagctcgggagctcttgagctcgggcgttcggcccggagcgcgggctgtggctgtggcggctcgcgggggtcagtacctagtccctgaaaatggcttccctggatgtttgagggaccaggagcccctaatgccgcgatgctcagcgcgccttcagtcagagggagcctcgagggcggcggcagcgctggcggagccggctggacgccgccggttaaagccgctcagcgtcgcccaggccaagcccgggcttcgtagacggctcacagaaacagggacaactgacgggagctctcacccctcgaacaagtgacaaaagcgatcactccgcatagaagacgcacttaattaaaggttcctttcgcctcggtgcatcaatgagttccttcatttaaacataaaagggtatgtcctttaaaagagcaaatccgtgagccgagattgcgcgactgcactccagcctgggcgacagagcgagactccgtctcaaaaaataaaataaaataaaataaaatccgttactcccagcccctgctaagtaacgattgaacaaatattttagaagacccttcagagcaaaggaccctctcacacgctgagagcaatgcgagttgttagagccctttgaggaggtaatccaggaatagctattaaaattgaaaacgcgtgtgacctttgacccagcaatctttcctctcggaatcttccagaagtaaaaggaacagtaaataagttatgtgtgaaagtgttactgggggaaccctacctgggaggtagggttacgtgggaacagtgtggttgatctttaaagactattacgaaggctgtttaacaagcatgcg

SEQ ID NO: 49771 - DNA, 517 bp, Homo sapiens
cagagcgagactccgtctccaaaaaaaaaaaaaagaaaaagaaaaagaattaaacttaataaaaagatactgcttttgtagggcaggacaatatagctaaattttctaacttttgacatctgaaccacataagtttcaaggattgatggtcaaaaagaccctgggctcaaaaaaacctattttagactcacttccacagatataaagttacacaaatttatgtgtcaaagcagagagggcatatttgttttggccttgctctccctccttcccgtaagccctctgtatttcctatttccctatttacaagtgtatacttacatgtattacaaaattctccatcaaatacctggggcttttcatggttatagtgttaagtgacctaaattaagataaatacaattctagtctaaaatttggtagcctatcaaatccgcattgcataatgagacaagtttcttttttctttttttttgagacggagtctcactctgtcgccaggctggagtgcagtggc

SEQ ID NO: 49772 - DNA, 3127 bp, Homo sapiens
aatagaattggatatacaagactgctaaagattatacgaaacgaggacgctgcctttcttttaaagtgataatttactgtgtcttgttttctgttgtgagaatcggctagcctgaaaactgattaagtaaaactgtacttgaaaattaagtaaaacttaactacacctagcactaaacactgcaaagaacattgtgatttacatggttttctctccctggaccagtagagggagactaagacatctggcctggtcttgtagtgtttctgtaaaattggggagggggggagcggaggctgtatttaaatgtcctgctgtcaatcaaaagacacttcctacaatcacagtcaccatatctgctattactcgtgagcgtgctctcgccaagagacaacaccaaacggggcccgggaaaccggcttcaactaaaggtgaccgcaggctttgccacaacacccaaataaggactttgggagcccaaccccaactagtttctttgtttaaatgcctgtgaatccctcccacgccggagtcaagaggctgtggcgccgccctttattagcctcacactttgattacaaaacacacgagtcggcggcctggctgcggaggcggcccgagctctcaaacgtcaaacccggagcgcggcggcggctgaatcagagggcagcgtccgccgccgccgccagccggccccgcagcgtccgcccggccgactcaagttcgccggcaccggcgcccgggcacagccgcaggcggtcccggtgtcgccagcttcgagcgatggcaactgcactctttgtaaagtttaagccgcggcgcgagggcaacgcagggggtccggagaagcgttcccttcgggccgccgcaacccactccatctgccccagtcccggcgacccgggtgtgtgcgggggcccaggaccgcgacccgggtcaacctgccgcccgccgggggcccggccccaacttccccggcacctttcaagtccccgagagcgagtgcctcatctgttgctctgtttactccgcggagccccgccgagctggctggcgcggtcgcctctccggcccgccgctgcccccgtcccactggcccaggaagtttgataaagacggggaagggggcgcgacagggacccgcggcgcggaggagacgcggggccggggcgaccccatcgccgcccggaaggaaggcaggcgcgtcggccggccgggcagagcggcggggcggccggcgactccggccggagccccgggcgcggcggggcggggcggggcggcggcggcccgggctggcgaggggctgcggacccggccggcgctccgcccgacgcccccgccgcgcccgcccggccgcgtcccctcgccccaggctccccctgccaacttatccgccggccctctttgttcgtgtttgttgtggcgactcttcgcccgggccaggcgagcccaccggctcccctctggagcccgcccggcgaacccggggcaccgcgcgccccactgcccggccggggggctaggcaccggggccccctgaaagctgggcgcggcgcggcggcccggcccgagggaggcgcgggcggccggcggcggcggcggttggtcggtggccggcggtggcggctgcggggctggagggggtttatttacctgccgtggaaccagtccttgcagatatcgcactcgatcatgaagcggttcacgtcgtacggctgccggcacacacagtacacgggcgggggcggcggaggcgccgaggcccggccgggagccgccaccgacacggctgccgcggcggctccagctgctgctcccgcggccaccgccgccgccgctccggccatctttaaaaaacacacacacgctcgctcgctactccgctcgccgactggagcgagcgcagccgccagccagcgccgcctcctgcagcagccgcggcggcggcggcgcctcagtgcgcgcgcgcgaggccgcggcggctggcggagggggaggaggcgcgcgcgacgcgcgaggcccagactcggctgcttccggcgctcggcgcggggccgtgcgtctcgcgcacgtctctggcgccggcgcgcgctccccgctcctctccgcgacggccgggcggagggagctgttgaagggcacgcaggcggctgcgggggcggagggagctgaggccccgtgaggacacgcgcggtggtggcggtggcggcgggcgcgcggccgcagccggaggaggacggcgggagcgtgcgaggagctggctcggttatttcggagcgagagccgaggccgggggaagttcctgcggagtgctcaagggcagaagaggtgccgcgtcccgaagaggggaagcggagaagtttgctgctgcccgggtcgcctcgcgacgctgagagaatcgcccagccctccgcagccgcccagcgagaaccggagctgcggccccgcaccggcgtgagtccagctgagctgacacgccgagccggttgtgcctttccgagggaggaatgtgccgtggaatccaaactttggaaaacgtcccacccgaattcccagcgagcagcaaggagaccagagcgtcgatggagccaccgttagttgcgggagggctgtccccaagaggaattcatcactgtcgtccgctgggagggaccaaccttgaaatggggttggtggagagagggatagagaagagccggcgtgcttataaataacaaaacttagctatgaacccttccgattcccaagtggggaagatggggtaaaattctaagtgacttctcgctccgaagagggataccacaaaaagcggagcgcagggtacttggcgtataataagccatcaataatttatgggtgaaattgagagccaaatataagatgataaactgaagaataaaaacagctgacaaatactgtatagaaaagattgcgttggaatcataactgtggattggaagtgatgttaaggattattggattgagtatttgtagctgaatttctgctggcatttctatcagtggggaaagccctcacagctccataggtaatttttgttaggggaggaagaagtgttgttctgtcacccacccccaggcaaagagtcgctgatctaattctcca

SEQ ID NO: 49773 - DNA, 1147 bp, Homo sapiens
aaaagataacaactgaatgattttgctcaccccaggaaccactcctccctataaactataaacttttcagtaagagttaccacgagatagcctaccatcttacatttcaaaaaaacactaaaaactccggggacacattcccattatctcctgtcaaaactgagaataaacagaacacaccctgcgaagaataaggagggaatgacgaataatttgaccaaattccttgactgagttcatgctagttaccagaaaacaaaaccagtcactcactgagaccacgcttcttctctgacctctatacatcctttccaaagagcttccttccccacctacctgaaaagcatcccctctcccctggtccgaacgacaagcccttttctgatcaagtcagaatctcccagacccacggccggaggacaggcgggcgaggagcacaaaagcctctgccgcatggatcggggccgggccgcagggtcccccgggggtccttctcctccccatccaccccatcgcagcctccccgtgacggccgggaccccaggcccgggcccagggaggagaaggagggggcgagcggccgaccctgcctgggcgccccacccaaggggggccgccacctacatctccccaccgccctcccgacccgggaagcccctcggattggacccgcccccgccccagcaggtcttcggccccacgcatcaccgcttgcgcacccgagatccgcagtggtcgccgctctccagccccggctccgctcgccgggtcagcttggctccgctgcccgcctcccccgccgccagctcacccctggcggtgcgaccagggtttccggacgcccacgtgaccctcccgtcgcggggcacgctgggagttgtagtcccgccacgcggcctcacctgccggcgcggaggagggcgaggagggcggaggctgggagcccacagaactctgctgctgcggacctggccagtaatgttagctgcaaaagacgagaggtagagagaagaaatgatatggggagaactggtgcatcctttttttttttttttttttttttttttcaaaaaagcggtattcggtctttgtttttataaaaagtaacgtgctgctaagtgtgctactgaccggcctaaattttagg

SEQ ID NO: 49774 - DNA, 698 bp, Homo sapiens
tcacccagtacaatatgcacatgtacaactgacccaaacattttgcaaaacagtcgctgttactacatgagatacattctgaaattgtttcctaacaagggacaccaggacaaattgagagcaaaggacgcaaaagcccacaagacaaggtaaagtagaagaaaggagcaggggcagtgtcgtatgggccagcactggtttaattcactggctgttccttcctgtgagggctttccgctaggccggcgaaggctggtgagaaagccggctctgcgccctgccctgtgctggccgccctcacctggcgctttgtaccctgaggcagctccggactcagggcaggtgggagggattgcactttcctttcactttctcaggacgccaaacccgacacctggggccagaactacacttcccaccaagcagcgaggcaggaggaagaagggggcactggggggctgaaaagcaaacccagaagaaagcgaaaacattacctgctgaccagcagaggtgagagagcgagacaggtaagcgacaggtgaaccaggaaggcgaaggctgcgggatgccggcgggaggacatcatcggggtggacgctgcctgtgcctcccagcaaggcttgtaggctcaatgaaagggggctttagtggaaaccctgaggactcctgagggtggggggagacatggaagtaaagtc

SEQ ID NO: 49775 - DNA, 1719 bp, Homo sapiens
ggaatcatttttacatacttgcatataaattataccacccaggtgaaaaccggcatttcagttgatttattcaactgatagaaaaagaaaagcttacagtcgctactgatcactatttaaaaaccggaaaataaaaaacgtacaattaaatgccctcttctgcgtagagctaggtagttttttacaaccatacacatccatacaaccgccatcccttaatttttctaatattttcgtctcgcatatcaaaccaaaaccaaacctctctctcttccgggagcgaagagccctttcactcccttcggaagatgcgtaaatttcaaaagaggaacatagcgctgggggagggtaataatctgcagctcaaaaaaaccgcgggtggagaagacgaccccggcccccgaacgcctgcttctaagacaaagctcagcaccgccaacctcgacaaacatacaaagaagaaatacaaaagcttcttctcacagttgggcggaggatggggggcggagggacggagggacgtgaaaagacgttacaaacggatggcacggagagaggagagggccgggagccaggcaagctcgctggggccctcggcggggtgtctaggcccggagaggatcgctgggagaccggcctcaagtgaccacctcccgagccccgggagccggaggcagcggcgggggcatccttccagcggcaggggaggagccagcccacctctccccgatgcgctcgcagccagctcaggcagcgctcagggaagtgtaagcggcggtgcagccccgcggctccgcagtaatcgcgcaccgccaggcctccgcggacagcgctgagggctccgcggcccagcgggggttgacgcagtgactgggggaacgcggcggcagcgggggccgcgagggctgcagagatcgagacaacgccggtccccgccctcccgcgcctctagccgcaggccggccgccctcctccctcccgcgccgcaggcttggcccgcggccccctccccgcgcccggcgctccgccgcgcaacgtcctacctgcaggtgacctgtttagtccagccgccgccgctgccgtcgctgccgccgccccctccgcccgcccccagggacggggcggtgactgtggggatcggggtgggggaggctgctgccgccgtcgccgctgccgctcctgctcctgatgttgtggctgttgttccgggagttgcagcctccgccattactgtttatcccacacagcaaaggccccggaacttccgggatcacatagttccggtccggctgcggggagaggacggcgaggccaggcgaggggaggggaaggacactgaggcacccgttcggtccccgcctgctacgcgtcgcgtatctgagcgctctcgccacttcaactgcgggcccagagcatgcgcgcccgcggcccgcccacggcgccgctcattggtggaggggacgtctcctccggaaaggggcggggcaaacgggggtctgtacaggtgtgtcctaggctcgaaaccccggcgacgaaagtccatagttagcggctttcttcctagcagaggctgatatagtggagctggggctggggactagggacttgcagtcggaagacctgggtttgaatctgcactttcccatttctctagtaatatttgagctaggtacttgttctatctgagcctccgtttcagcctctctcgaataaggatga

SEQ ID NO: 49776 - DNA, 898 bp, Homo sapiens
ttcttgtgcaaagacacaaccacaaagtactcgaagagctgcctctcctggtactcgatgagttcccgggcaagtgatgggtaccgaggcgcctgcttcagccgggacttcacgttgaccaggcgctggctgtgagctgggtgagggagggagagagaaagagagaaagagagagagagagagagagagagagagagagagagagagacagagtgagcaaagagcctgaaatgaccatgagtccatgtggaattgtgccgagctgcaataggttatgtaattatcagctcaagtacttttttctaatccccaaagtgtttctgtgtctaacaaattagtaggaaactctttatttgggatctctgccaaagttctgggagaaccaacattcagttggctaccaaaccaatcagggtgcaggagcctggctctgctctgccatggttttgctgtctggactctgggcagaggctgaagatgtccttgccttcatctgtctgatgagatggggacagtgactcctcccctcacccatttccctcgtcttttggttggtgtgatgtgacagaatccagactatagggcttttggagctgggagctttgtaaacatcccttgtgactcaactggcagagatcccactaactcaggaactcctgtccacctcccctcctgccactaactctgcaatgaaatggccttgcttcattctagaggtgagtccgggagcagctgggtgtcagaggtgaatgcagcagggtcactgagtggacaggtccctgtcacctcgttcagcaatctggacttgctttcttttttttgagatagagtctcactctgttgcccaggctggagtgcaatggcgcaatctcagctcactgcaacctccgcctcccgg

SEQ ID NO: 49777 - DNA, 865 bp, Homo sapiens
gagtttcactcttgtcctccaggctggagtggttcaagcaattttcctgccttggcctcctgagtagctggaactacaggcgtgtaccaccatgcccaactaatttttgtatttttagtagagatggggtttcaccatgttggccaggcttgtctcgaacttgacctcaagtgatctgacagcttcggcctcccaaagtgctgggattacaggtgtaagccactgtgcctggccagcatacattaattcttaatgaattagtaataacagtaccatgtcctcaactcacctgcagggctgcttacacagcctcatttgtttgcaagtgtgggtaagctctaaactactctccaacatacaagtgctgttataatctgtaaaagctggttttggaattagaaggtgacctgatccccttccctttgcagcagaagtcagggtgcacagtgacctgttagtcctcagttgcactggctatggtgccaactgtgaaagtaaggcggaggtcgccctcagaccagcgcagcttgctctgcctgacctgagaccctacttctgtttgtttcctatctgtgcctggtgttttgtactcagaagttgtgcaatgcctggaaatgtgctcatttttatttagctaactttcaagatacgggaaatcccctttggcctaaaatttctttctttttttttttttttttttttgaggtggagtcttgctctgtcacccaggctggagtgcagtggcgcgatctcagctcacggtaacctctgcctcccaggttcaaggcattctcctgcctcagcctccctagtagctggaactacaggcatgcgccaccacgcccggccaatttttttgtatttt

SEQ ID NO: 49778 - DNA, 1259 bp, Homo sapiens
gttatcatctttgttttaaactataaagtataaactaagttcctcccaaagttagttcagccaacgcccaggaatgaacaaggacagcttggaggttagaagcaagatggagttggttaggtcagatctctttcattatctgttataattttgcaatggcggtttcaacctagtggccgaacccgtcccatccatctcccgcgcccctccgctccaccacagccctcggtgcctcggttccctgcacctgcactcccgcccgcccccgacgctccgcccccgacgctccgcccgccctccacgctccgccccgccctcccggcccccgcctgcgcccgcgccctgggctggtgcccgccaccccagcgatctcatactggcccctgggcgcacggtgaccctgcggctgcccggcccctgcctccgcccgcgcggccccctcgctcaggtcgcgggcgcccggggcctggcttcgcgtgggtcctggctcctcccgttccgcagttggtgccgtctgacagccccttccgcgcggcgcggcgcggcgcggcgggtgtcgggcggggcgcgggcctccggcctgaggcccggcgaggtgctggagggagcggggcgcggatccggcccagatgggcagctccgtccgcggggtcagggccgggcttcggcttcaccgcagcctcgcctgagcgggcgcctctgaagtggagggcgggccgcctgggccgcgggcctcgggaggatggtggcgccctggcgcgtctccgtcagggtttgcctgtcgcacctgaggtgcttcgagctcagacagggactcagcctcctgaggccctccgagtgccctcgcgatgccaggctctgctggcttctgctgggcactttgcccaaggtcgtctccctgtgcggggacgtgggtgagggggcccctgacgttctgagtcggcgaagggtccgctgcagcggggcggctggcgcggggcccgcggagagcctcccccgagcgggacctctgggcggcgtcttcctgcatctccgcctctggcttcgcgccggcgctctgttggtgaaattcttccccctcctactcctctaccccctcacctacctggctcccagcgtctccaccctctggctccacctgcttctgaaagccaccgagacctcaggcccaacctacatcaaactgggccagtgggccagcacccggcgcgatctgttttcggaggctttctgtgcccaattttccaagctgcatgtcc

SEQ ID NO: 49779 - DNA, 2057 bp, Homo sapiens
ccatttgtggcattatctattgctgcgtacgaacttagcctggcacaatgcctgtaatcccagctactcgggaagttgaggcaggagaatcgcttgagcctgggaggcagaggttgcagtgagccgagatggtgtcactgcactccagcctgggtgacagagcaaggccttgtctcaaaaagaaaaaaaaaaaaaaaaaagaattatacaccactcagttttaggaggggcagaacacggggagagccctacaggatcagaggggcaaccaacaagctgtttcagaaggcatggggcagctcagcaaccataagttatgcgtgggctttgctctcgggagagaggtttcctgcagccgaaggactcacagctaatctgggtcaggagcggctgccggctcccccactcctggagatgagcgactctgtgacgtcacgggaggcgcgggcggagcgccggggaagcgaagtaggcaggggcgaggcggctggggaccgcggggcggacgggagcgagtatgtccgctctgactcggctggcgtctttcgctcgcgttggaggccgccttttcagaagcggctgcgcacggactgctggagatggtggagtccgtcagtgagtgtggggctggggatgggggcctcgccggcctgtagcggacagcgcgggtccctgggacgctctcaccttgactggggcgcctgaagaggccgcgtcccgaggcatgctgggacctgtagtccgcgtgtctcctgaagccgcgactcgaggagagggaccccgctggccggagggagagggagagacttcgctgggcagatgggacaccgtgtgcagggccgtcatggtagtaggggccgcctgccctcgggagacgcacgcgtgaatgcggagcgggctgagccagtcggcgccggcgcgggcggtccaggcggaggaagcagcgtgcgcggcgggtgtggacgctcctggagcgaggcggggggcggcggcggtgaggcctagggagggcgcggtccagggtcccggtgcctggctgcggaatttagggtagagtctgttcggcagcctttaatcggagacgtcacgtggccgctttttaatgctgaaaaatcactctggctgcagggagtggaggctgtcgcccagagagagcgccgtcgggtgagaggagcagaaagccggaagccaacgctggggcagccgtggcgtttaggagagtgacaggcagagccgcccgcgaggtggcccgagacgcagaccggagggcggagggctgggggtgcgaggtagggagcgggtgcgaggtagggagcagctgccgaagccgagttagtggtgtgcagagattccgtaagagcaggactggaaaagagtcatggatgattccaggtcccttagatcatcagctacactttaccaagaggcagtgtggggtcgtgattccaagcgggattctggccgcacagtggctgggttcaaatcccacctctgccacactccagctgtgggaccttggaaaagtttcttattctcttaatgcctcagtttcctcacccatttggcgtccatttgcaaggaactaaatgagttactgttatctaaagcgtgtttgtgtgttttaggagatggggtctaactctgtcaggcaggctggagtgcagtggcgcgatcctagctcactgcagcctctaactcctgggctcaagtgattctccagcctcggcctcccaaagtgttgggaatacaggcgagccactgcgcttggtctcactaaagtgtttaaaacaattgctggtgcctgctaaggaccgtacaagtattctttaactgttgttgttattaaggaactgaggcccaggaaatgaaaggagtgacttgcctgaagtcccacatggatgaagaatctggagctggggcaggtgtggggtgggcagaaggcaaagccctgtgtgacttgggcaaagacagtgatggagagccatgagcgacagcccttggtcctgcatgaggagatgggggaatgccgatcttccctgaggtgctggcttgttcgt

SEQ ID NO: 49780 - DNA, 447 bp, Homo sapiens
tccctatttaaattgctacctacccccatcccagccctaaactgtttaactttcattgctccacagcacttattacctttgaacatactacataatttcctttctgtatgtctaaggtttctcagccccatcccccaatacacacacacccctccactggacagcagctacataagggtagagacctttgttttgttttcaagtgtactactaagcacctagatcactacctggcatatagtaggcactcaaatatttactgaatacatgaatacctgttgccctaagaaatgactcaatacaaaagtcaccaatgtagttttggatgaatgacaaagcaaatgttaatcacagcttttttttttttttttttttttttttttttgtgagacagagtctcgctctgtagccaggctggagtgcagtggcgcgatcttggctcactgc

SEQ ID NO: 49781 - DNA, 2579 bp, Homo sapiens
agaacacattttgggcatgtaacaaagatgatataaagagtagaaaacaaacattatcataaacaagctgatgctgaataaagcaagcatattggatgaatttccaaagatgatgatgcaaaaaaaaaattgcagagagaatgagatgttatgagaattgagaaattagatgttaatagtaagtagcaaagagaacttcgagcaaagtcaacagagtaagtcacattacctaatcaataactgtaaaccacaattattataccatatcttatttgtaaagcataataaagtattattttctgtaataaaataccaaatatttgtaataaattttatgtaataaaaaaacgtaaataatttgacacagtgctaagaggctgactaatgcaaaaacaggctgagagaagcaaggactggagaggaaaaaggaaaaggaaaaaaataggacaaaaaggaggacaacactaagaaatcaatcagacctataaaaatgggtaggaataaagaggtgtgaatgcacaatggacgactagccaaaaagtgccagtagtgcaagcgcgaaaagagccaagtgaaacctgatggaatcttgacagcttctgggctcagaaaacaagtagctccaaagtgtccaggaggatttgtgaagataacaacagacaacaatgttagggagtggtgagatcaagtacagagcctcaagaggaccagggtaagagaagtgcaaaaatgctcttaagtgggagctggggttagaaggcaggcaggtccgacaactggaaaatgagcgggcggtagatgggaatagaatgggggttaccaatcagcgacagagcgctgacaaacattaggaacagaggaccagagaccagaaaaggcatcggaaactgcgatttaggattgaaaaagtaaagactaaatcaaaataatttgctgggtaaaacaggtgaagagaaatccccaaatagaaaagtgaaaaagggcagcggactgagaaggggggcagtccgggagaggagagaggaaatgatgagccccatcatccccacgaccatgtaagaattacacgcgacagtaactcgggctgttgtctcagccccagcaactaacctatatcctccacgtcgaggccgccgccgcccccaccccacagagatgcagagctggatacttcagccaatcgtgaccttctcggaccaaccctgagtttcgccccctattgatagcctcccgctcaaccaccgctgccccaatccccacatctggggtgggggccagggaaaccccccgggccattgtgtgtgtttacgtaggaaggcgctgcatgacggagagggacacgggggcgatgcccacctcccagcccgcggagctggcccgagaaggtggctgagggcatcaagcccccaccgccgcctctttccaaaataaacaccagccagccgccgagcccggagtcgggagggcggcagggtggcgccagcactcacctcctccggaatggcagggtccgcagccgaagaggccgcggcgccggcgccggcgccggcctcgggctccatgtccccgttgaacagagcctggcccggctccgcgccgccaccaccgccaccgctcagcgccgccatcttataaccgagagccggggcccgagcggccgctgtcgggcggggagggggaagggaggcggagagctgggggaggcggaggcggaggcggaggcggaggagcggggggcgcggggggcgcggggaggagcggcccgggcggcgccgcgggcggagggcgcctgggccacctcaggtaccggcccgcggccccgggcgcagccgagcctgaggggattgggggaaggacgctaggcgggggtgcgggggggagcgggggaagggggcggagacgacgagaagtcgccgcggcaacggcgtcacccgcgtgtcacggtcgtgacgtcaccccggtgcgtgacgtaatctgaggcgcgccttcgcgccgtcgtccggggagggttttttcccttctaaccacccgcgctctcacactttgcctccgctccgccgtttccatggctccggtttcctactttcctcttgtctcctccgtcctcagcctgttctgtaatgtgggatttactagaagagcagggctggtgttcgaggaggagaagttgaaatcctagagggaggaaggcggggaagccaatactacttgctatttccactgcaatgaacgtctctgtgtcatcaaaataagaacttcaaccccaaggttgaaacagccaagcagaatttgatggaaatatatttaggaacagctaaattagcagtgcgacgcgtgttttcttttcattgaagaattcagccagttaaaacgagtctaaatggaagtctgaaagctttttcttcattgttgaggaataaaatatttcgtgtatttttcgttttccagattcattcatttaacaaatatcagttgagcactttccatgccgtagggcctgtacaaggcacatagcattctagacatctgaagcatcaaaactaatcatttttattttgaagaaaatcactcaaaatatt

SEQ ID NO: 49782 - DNA, 758 bp, Homo sapiens
gagtagatgctcagtggtcacaggttgaatgaatggattcatttactcaataatatgtgacaagcccagtgttctgtactgggatataaagaagaaagacaaggtccctgcctctccaacagctgctggtcccttcgtggctgacggaccaatgaactgacaactgccatgcagtgtgaaaagcactttagtaaggtacgtctaagttgtttcaggaacacagaagagaagtatgtaatctagcctgggtgaaagcagggggaatgagggagctcagagacagtgtccaggagaagtgttgcttgaattaagtgtttaaggacaagtaaaaattatcctggtcagaggagtaaagtagaagcaattgcatggtcaaaaggaaagaggccaaagggcatgtttgtgtatcagtactgttctaaggcggtgagtctaagaggtgccctgggggtgtgtactttgtgtgtgtgtgtgtgtgtgtgtgtgtgtgtgtgtgtgtgtgtgtgtgtgtgtgttaggctggaaaggttaactggtgcttattcacttccctcccatggttcttccaaagacccgccaccctattttcaaataatgggctgaaacagaatgtttaacccctgtctcctccattcccacccattctcctaaatcatctgattgtccttgatgctggtatctacctggtcatgactccttttctttcctctccctatgtgggtgtgaccttctcatttgcatggatcacaatccttggt

SEQ ID NO: 49783 - DNA, 1224 bp, Homo sapiens
aggacagtcatactatctgcgatgtgaagctaatatgcaaaattcacggcacagtgcccaccctaataaccatcaggatccaaggaattcacatacagtgtacacacgttgtcatagaaacaatctaaacataaaaacaatctcaacagaatgcttaaaaacaaaaaaacccggtaccgattattttacggagtcatagaggcatcaacggcactgaaaatgtattagctgcattcagttcatcaagaacaatcttcaactccctccacctgactcgatcatgcctgactgtgatggaaactgtagtattgtcaagtcaaccgatgtttgactcgggagcgcatttcgcaaatatttttcttaaatatcaccttaccgtatttttcttaaggtggttacaaaattaatctgcagcccaccacccaaagctacagtgccgaaggccgtgtgatgagcagagaaactgagccttctactgttaaccaatatggaagagagtaattgcgcctgagaggaaattacggcagcggaaacgcgggtattctacgtttaagaaatcccccaactgaggcagaaaaaggccaagttatttgtgtgatgcacgtgaaccgcccgagctggtcactaatgaagtggattcgccctattcctggcgactctacaaggttggagacccccgtagacttcgcagccatcgccccttgctgcagacccccaaagtcaccgacagccttacctagacctgaccttcctcacccacgcgccctcgtcccggaaggcccgccctctacccggctccaagctcgcgcaggcaactattacggggagcagtagagaaacggaagcttggcagctagagcggagccctagtgaacgacccggagttactggctccccctcctgaggcctccgaggtgtacctggcgcctgcgcagtaaggctagcgccgccgcctgtgcggaggacccggggaggtggtgggctggggagagttagaaaggtctggctctcctggaagggcatgcacggttcggtagtatgttttggtgggaatggctacagacctgcctccaaaagctctgaagcaatggcgatgcgtgtgccgtgtggtctttctgaccgacttgcggcgccatccccctccccttccatctatctgctcatcttctaatagttaattaggatccctagctgcaagccttccttgctactgggttaggagcg

SEQ ID NO: 49784 - DNA, 1165 bp, Homo sapiens
aacaacaccaagagtgaaccctaatgcaaactctggactctgggtgataataatgtgtccatgcagcttcatcagttgtaacaaatgtcccaggctggtggggggtgttaataatgggggaggctgtgcactgggggactggggacatgtgacaactctttatactttctgctcaattttgctgtgaacctaaagctgctctaaaatataaagtgtatttttaaaagtacaagtattattttgaaaaaaacaaaagtaaagacaaaaacccccagcttattcgggaccttgtaatgaagtgctgatgagtgacattatcatggtactttggcctaaggactcatgaatataaagatctgggctgacgtggcctactcccaaacctgaactcaaatcttggaacttacaatttggacagagcagaaagtcaccttccaataccaaagggaaaggatccagacaaagatgttgatgtcatagaggtcattggaaaatacatccccatcggtatccagaaatcctagcatttagatcacttgggcaggaggcagtgtctgagagattaacacagcctagcatagccaatggaccacgtagaagaactctcgtttaagggggcacaatactatttgtaaattacaggcacacatgcttgtgttagactggctgcttctctcagcttggtctttggttgtttacctatctcatgactagagtgaattttgcaatcctgggagaggcatgttttctcttggctcccaggagcagcattttttttttttttaaaaggtctttggagtcagacagaactatgtgtgaatcctatctttcctaccaatgacgcttagatattcttccttattaataaaacaggttggtcacagctacttagcaaagcaattgtaaaattaataagcatgatatgtgaactacctggtgtgtgtttgccattagtcattcctttcagtttaaagttgaacctgccctcctaggagttaccagaaacttagtatctctggacttggtcaacagaaatttcataaattaggctgggcgcagtggctcacgcctataatcccagcactttgggaggccgaggtggatggatcacctgaggccaggagttcgagactagcccggccaacatggggaaatcccgtctcta

SEQ ID NO: 49785 - DNA, 1474 bp, Homo sapiens
acagttagtgctatatacatatgtagtaaatacaagatatttaatttgtaaatttttagtaccgaattccgggtgtgtatgtcctcattatgtaaatatattactatatggtgagcatagacatcttgaggttgcataaaccatggattaattgtattgtaacaaatagagtttgaaagtttaaggaagagaaatatgaaaaccaaatttatgtagttataataataactaacatttattcattacttgttacagatcagttaatgattcaaatacttgacgtaaattatctcatttaattacaccataagcctttgaggtaggagctattattatccttattttatagatgaggaaaatgaggcgcagagagaccatgtaacttgcctgaggtcgcagagtagagccaaggtttaaactctgagcctgacctcattgccttggcatgtcctcatcatgctccatggcctttttgatatgggaaaaatgtgctctgcaggtcatgggcttagtccagtgccctggacactttttgagtcatcaacccctttgagatggggtggaccctcctcagaaaaaaatgcacacacttaggttagtgtttatcttctacatagtctaatgctagttcaaaaattccagtagcataaatcaagttttttttcccccaaaatatattgcaccgtttattccaacatgtgtttaaaagcacaaaaatagcctgggcaacatggtgagactttgtctctacaaaaacttagccagccatggtggcttgcacctgtggtctcagctgctcgagaggctgaggtgggagaattgtttgagcctgggtggctgaggctgcagtgagctgtgattgcaccactgccctccagcctgggcaacagagcaagaccctgtctcgaaaaaaaaaaaaaaagcacaaaaacgaatacctaaaaaatgcaggcactcctggttctgctaattacacaaaaataaacagattaaggaataaatttggatatactgaaggctggctcaatgaaaaataaggtcattaattcagacacaacactgagctggtggtgtggtttctctgacaattacattaatggttaaacttccaaaggcagataggcaacagatactacagaagttttaggatgtttttcttggggagtcatggagcagctatgcttcaccacagttgctggaacacttgtgttggccagagtcctgggactttcccttgctttccaaacagggagagtttgacactgcacctacacttgcttaggatctggcgttcatctattgaagccacagattccttcgattttatcttaagcaactgtattagtctgttttcacactgctgataaagacatatctgagactgggcaatttacaaaagaaagaggtttattggagttacagttccatgtggctggggaggcctcacaatcatggctgaaggcaaggaggagca

SEQ ID NO: 49786 - DNA, 568 bp, Homo sapiens
acttttttttttaaaaaaaagacctattaattggtcagacaattaatatatccactaaaagaaaagtgctctgtggaacaaggaggactagataattttatgatgaaagtgtcaaatctaagaatcatcactctgtgggggcatttggtgctttgaggtcagcatcataactttgctggcattctggctgaaggactggcttagggcctggaatctggacatccatgactaattgggaaagcatctgtgagttcccccacctcagctgggcagagatgcaatgagcagtttgaaagttacaggagaagtggaaaggaaaccacccgggctgtagccatttctcctggagcgacagagacactcaggggtcagtgcatgtcatccagatacagcacacctctggctggccatctggaaaagtgctcatgaggtcagatatggccggaaccatggcaaagggaaattgtttgagcaggtatagcaaaggctgggaagataaagacgggtctgtcctctggagacagagcaggccgagagctcccatgccagtggattctggaaaattggc

SEQ ID NO: 49787 - DNA, 715 bp, Homo sapiens
aataaagatgtagtttcttaagtgatactacctagtataatttcctctcattattattcttttccagtctcatctctctttctctctgtctctccgcgccgacgtgtgtgtgtgtgtgtgtgtgtgtgtgtgtgtgtgtgtgtgtatgtgtgtgtgtttatgtagaggagaaagaaaataaatatcaccatagagaaggtaaaattctgttgatctctttggctctgcctttctctcaaagcagcaactccttgcagggtttctgggcttctccagctgtttaaaatggctggcctcctgtgtgcttccttgtttgtatgtctgagcaaagtggaaaattcaaaggaaggtgttttgctttttccctgagcaagaatgccgagcagggaagcacctccaccccgcgttcctaatggagcttgctctctgcagactggctgtgagcccaggtttacagaagttcacttcagacaaatacattctgccactttcactcttgggaacagacatggcagaatcccagtgggtcattccttctgtcccctggagccgggattacttcctaccttatagccacaatgactttttcaacacaacttttaaataagccataaaatggaaatatgcctggcaagtggggaaatattctattgcttgaaaaggcccatagaatcaaacagcttggagagaaacaaataaagagaacaatataaaa

SEQ ID NO: 49788 - DNA, 649 bp, Homo sapiens
ctcagagatgggagttgcgaggtgatgttgtggatgtgattcctgaaagagcttcaggaggggacagtcatcaaaggaagcatgtgtgtctacatagcccattccccacctcggccatgccttcccactcacaggtgtttacagacggggacactggagctcaggggtctgcagggtgctgctgcttatgtgtcagcaggtcttaacagcacagctctcagcctgcagctacttggggtggtgccatcccttcttctaagtggactcctgaactctgagccaatgccagtgagagtcctggcacagaaagggtaattagttttcgtttctcattccaaccagctgcgactggctggctccagctagctgcctggaggactgggttgagtaggagtctgaggtcccttccagaaccagcaggaagagggttgagatcaatttgctgtttctgccaacagcatggccttgccacccacagagcagccactggactttgccatccaaaggacagttcctccaatgacataccttagctccccttgcagatggacaaagccggtgattttcaaaaatatttatgtcactggaattctgtcttccaatgaaatttcacatggaaacagatcaaatcaaagctattctggccaaa

SEQ ID NO: 49789 - DNA, 1285 bp, Homo sapiens
ctctccagcttcctcgcttggcctgtctccttagctctctctgtctcacccacactggcctgcaactcgccagagtgccccaggcttttcagcttttgcacgggcccttccctctccaggctctctcccctggatctttgcttcagctgctccttcttgacatccaggtctcagaccaatggccccttactcagaaggcctagcgcaggccgcctaatttcacacagttctcccccttcccgcactgccttccatcacctcgtttcattttcttcgtggcacggagcaccatctccaatggccttgttcatttagttaatttattttccgacttagttccaggtgctaaaacagtgttaccttggcaggcttcccatcaaatattgttgcgcaaaggatggatggatgaaaggaagagtgagccaataaacgagggaacgccgggaaaggcagcctcaagccggtgggccctgccacccccaccgtccctgagcatccgagccggttcccgcccccggcccgaactggcccgcgcgcgctcgcagccccgcggcggaacccgagggcggcggcagcggtttcccttgaacgagccggggaatctggagggagcacacaggaaaggcagagccgcgagctggaccagccgtggtgagtgcagcggcgcccaggcggggagcgcagtgcgggtcgctgggactgagcgcgcgagcggggtgggagtcgggatgggggcccggggcgctgggcggagcctctggagtcgcgctgggccgagagccgcggggacccaagcatcaggggtcgtgggtgcaggcggcggcgcggcttgagggtagggggtgcgggcctggccggcgcggcaggggagggcctcgcgcggatcccgtggtcacggcgggagtcagctgtcctgggttcgagtcccagagctgtcgctaacttgtggacccccctcacttcgtcccttgggcttcagcatagccctttgcaaaatggggccaatagtatcagatccattgatgggttggttggttcattcattctggcgctttactaggttctggtgctgcagatggatagacgaacttgcccatgaggggttcactatctagtaagaaaaacatttccacctggatactccacaggcgtgtcaaattcagtatctcctaaaccgcactacttttctccacaaacctaccactcaaatctaaatgactgaaatcactattcaaccagtcacccaagcacaaaaacctggcttggttcctcctctctcacttac

SEQ ID NO: 49790 - DNA, 1659 bp, Homo sapiens
acacttttaagattcatttttgtctttgctcccatttctttcattcctattgctccatgggcaaccatgggcacagccactggcaatatcatgattaattattctaggaagcctggataagttgaagtggttgttataaacgtctaaacttgaaatctattttttttaaagcaaagactgtgtttgcatgcaccaagggaaaagctggtggtagaaattgctgtacaatttgcctctagactgtagttggaaatattctttttgggaaataggacagatcaaggtggtttttctctccatgtaaagttgctattggaataacaacttgtcttattttacagtcctaaagtaataaataaaacatttatgacttggaataaattgagagcatcccattacctatagtagcaggcatgttcttattcttttcaagcctcaggcagagtgacatcagcagatttttttcattttctaatccagagccttctaatttctttctgtcaaagaacctgcattttaatactgagcagatctgcagggaccctttttgatatgactacgttttgtagcacctcttttaaattgtatttaacttcagttctcagaagacagcatggtgtagtggaaagaacatgggcttagaatttatagagtgtacttttttttttggttggcttggaaatgaggtcttcagttcacattcagattcttgactcattagtaatctggaattttctgatgaccacactcagagttcttctagctacagggccacttcttgtggtgcttgtggtgtgtcaaaaggaactccccgcttagcctctttagagggtacttcttccattacactctacacacccacacaccctgggagcttcttgatctggtaacgtttttgtgcgtttggaattttttagtttttcatcctgtactacaccataatgactcttacccttgccctttggtgattatcacattggagaaacatccccgctcatctgtgctttcagaatgccaaatcctcatacaaagaataaccttcagtttctcctgcaggacaaagcatgcctgtctgagcacagtgagtcaatctctcctgttcaaacatttgccacttatttattaaacaagtatttaccaagtaccctctatctacgagtgtgtgctgtgggctgtggatgagaaaatggtgaattatccatgatttcaagaagtctataatctaggaaggaaaataagaaaagcagtttttgtgtggtggggtaagggcatgggttgtattgtgcttggccttttttaaaaaggaagggataaaatgatccaatccttgaagatgtaaagttcgttgtgtctcttaagaacagcaaaacatgcagtttgccaagagcagaagcagcatcaagggggaatggtggaagataaggaaaatttttcctcagttatctacctgatttttcctttgactttcaaatgaagtacagggtcattttatttgagattcatttggtattctctgtcaactgtccatgatcagggtatctcttcctcctacttttcaccctactcgtatagatcatcatatccactctcattccttctatcaacatgtagctaagattgctatacagaacttcagacctgcatttccagctgtggcct

SEQ ID NO: 49791 - DNA, 2050 bp, Homo sapiens
caaatacatcaagggacaaagaccacacagactttctgaacagtccatcccaatgtttccagagctcagcctactcctagtgatacaactcccatgaccaagcccagaggaccagcagctctgggagaaagtggcagattccaatatcctaacatggcaggacacaaaaccaaggtgatctcaccttatctctagggaaaagggcagaaaggaaattgcaaaaattatgtttgttggaaagtataaacaatattcctttgtgtcaacttaataaaaaatgaggccctctggggccctggggtgaactccgggctgctgacatcccacgtgaagtggctcccagtcctgttggctcctcctacgggcaacaggggttgtcgataaccagcatgacatcaatgccataggcctccagcaggtccaggagaaagctccggtctccttgggggtctaggcccatgccccgggcatgctctgctgtcagagttttgtcttgactggcagacacctccaacaaagtctgaaatatccggttgttttgttctaggaaaaacctgcatttggaagacaagacacaggaaaggaagcgggggggaataaaaagctcaccagataatccacatatggggaaccaaaactatactgttttgtttaatgtacttttcagtggattcgcaggtatcttttaaaaaaagaaaagagtaaaagttaattattcaagtgctactaaggttagcaaagaaaccatttggcattaattatggtgtgattagggaaatctctaagcaagatggcctgtcaaaatccattttcctgttgagggaagtgacctgggtttaaacacagcctgagaagaggcccccaaacactgcttttctctctttctgcttagtcataggaggaagcaaaaattcaacaacaacaacaaaatgaacgtgagccaacgttacccttgggtgtttgctctcccttgatgactctttgggaggagtgagattatgcacagatcaagatttaaaagtcactgctttagagtgctttatgaacaaacaagctctgttcaggacagggttcactgcctagttagactagacagtccagccccatacagctctcaggttggcaaagtgcctggtgcctgaagcggccctcggtgctcaggaatttcagacacagtggcacatgtcatacctggatgagactatggctgtgctcaagtctcagatactttccacctaaacaggatgtaggttttagaagtccactattagaatcaaggtgctacacctttgtagaaatgcccacattaagttttcagcatcaaaccacaacctcacccctggaagaccaaacaggaagctgggagaattcagttgatgccacagaaggctacttcacccagctgtctaggaatgaaatcagtactgtgaggtggaaaggccctggcttctgcacctacggggcaaagagatttcatttgattcaagaattaaaatttcagattatcccataatattcagcgcaaggaactactctattcaaaggaggcaatggaaatgagaagtccctgagtcctgagggacagacagagcttccaggcagtggacatcctcgatgtaaaagcccaacaaggaaagaaacactaagactcctgttttctcttaagggacctgcttctttccctaagtcttctgggttccccctaatggcatttcagggctcaggtttgcctctgtaaggagcccggctctaagtgcccttggcagcaataaacggcatccctggcccgcagtgaatgacatgggagggatgcaggtcactcagtgccgaagggatcctcagggagactccacatccacggccccaggactcacagcacgaagaggtcctcttcacaagggttgtagtcttcttctacttcctgggagtacaacagcatctgcctgttgggaagatcaccgtgagactctggtgcaggtaccaggaccgcagtcacaggtgaggcctcagccaggcatcttcaatgggccaccacctcccaggaagcagc

SEQ ID NO: 49792 - DNA, 747 bp, Homo sapiens
gtaggagggagagaggatgcccacagacttcatccgcgcgccacgttccagctcgctctccacgggcatgttggcaaagcaggccaggccgaagaagggcccctttcggaaatagctagaagagaccaaatacgtagtgtggctcaagatcagagaggaattttgagatgcaatcctaaacaaaacaaatgaactgtgttcggggctgtcaatgacaaagctcagcctcaagaaaacaagcgggccaagccacatgacctcactgatgagcttgaagagattacataacttgccaagggtcacttggctggagctgggacttagtccgtggcaagcctgccgctcagctgcccacaatcatggacacatctcttctctcctgcaccacgactaatgacttggatgggtgaagcagaaccaacattcctcttcaggctcctctggaacttggactctctttcgtagcataaaccacagtgattcttcccttacttcctgaggctctgatatttttcactgagctgccattttatttcctcctcttctcacacttgtatcaatcatgaattaagccccatgaggagattaaagccacttcattacccttaagctctttccattgttccttctcgcaaaactctctgaatgccccactacacaggactaaaaaatggccttacttaaagctgaaatttcaaggttgaacacatagatatcctcagttaactcacacggggctgaaactgt

SEQ ID NO: 49793 - DNA, 1018 bp, Homo sapiens
ctcatcctgactgctacttatcccaggctcagtcttcacattccatgcttttaggttttccagatatcctcactgtattaagaactcagccagggagctggggcctggaagattcaacaaaagaggtcatctcatggctagtccatcaaagagaggaggtgccagtgacaagtgcctttttctcccctaacttgctctctttccatctctgtgtcctttctcatcttggaccatgacttggacctattacaggtacttacaggcacttcctagcctctactgcaaagacaacttctgaggagggattcacatgaccacgggaggcacaaatgtggcaatatgcattgtgtacattcagctggtcattgaacaaatattggtggagcacaacttggcagcacggtgcctgccaggtgctgagctcatgcaaaggcaaatatgtctctgtttaaaggaacttggactaaccgactacgaggctggcagctcagttacccaggcaaagccagaaggtcagtgtcgcgcctggctgaggatgtacagatggtctgaaccctgccacttcacagctccaaaggtcagcctgacagctctgtgcaccagggcctcccagagctggggttttataagcccatgggctaggccagaggtaggctgtcctatctaggttgaccactgcctctgtcttccaaaactagttctgtttaaatgagaaatgaccaaacccccagctgtcttaaaattcatcactatttcctagggagattggacattaactgcagtaactgctgtctgctagaaagttcacctcaaaatatttaaaatagagaaagcaatgatcttgaaccaaaacaatctctttttaataggaaatatgtgaatttcttcttcctcctctgttagatggttcccaagcaagcacttcctcctgagctcttcatttcctatccagagactgcctcagctggagatcctcttccagctcctctgacctcaggagtggaactcccaccccagc

SEQ ID NO: 49794 - DNA, 1422 bp, Homo sapiens
agctagggcgagcggggagcgggggacggggtggggggcgagcggggagcgggggacggggtggggggcgagcggggagcgggggacgggatggggggcgagcggggagctcagggcgctcgcccggggggtttcctccgcacaacgtgaaaaatcttctagcccccaagaaaagaaaacaaaacccaacgtggccacaaaccggatgccctgtcactgaagtgcgaacaccactgtggggctgggactcagaggagaggaggggaggggagaggaggtcggcggggctggaacaaagccctcggggccgctccgagaggccgcgcgccagcacccagctgcgccccgagggagagagctgaggactggccgacccccgcccttccccaagcccgggagcccggggccggccctggtgcggggtgcggggccgggagggcaggtgcgcgcgcagcgagcccctcccccgcgcccccaaagctcgggggcaccccgaccctccccacgcgcctggccccggcgcggccctcacccgagcgggggtcgaaggtgaccacgaacacggccaccacctggtcctcctccacgtcgcccagctccaggcgcccgggctgcagcagcacctccggggcggccggctcctcgggctcccgcctccggggcggctccgcggccggccgggcgcccccgccgccgccccggccccagcctcccgcctgcggctgcggggcctgcggcagggagacggcggggccctcggcccagcgcagcagcggcgccgcgtctccctgctccaccatggctaggcgaggcggagccgcgggcgcgaggggcggggcgggcgggctgcgggaacccccctcgcctggccgcgccaacgccgccgccgcccgccgggtctggcgctgcccggggccccgccgcggaggcgcctttcccacggagccagagcaggcgtccgcggagccggcttcgggaaccgcgagcctattcggaggcgcccgtgtgcacgtccgtgtgtgggacgcgtgcggccggaacgttcatccttgcgtccatacacctgtgtgcgggtggaggtgccttctcacctagggttccgtggtatagctaccactgtgagtttttatgtcaccattattttttaaagtccgctggtcctgtggaccgtgacagatatgtattacataatcctggatgtgtggcagaagctgcttctaagcagaggagtgaagcagaggtgctctggctacccaggtgtttgcaatatactcatcaataaacactgaaaaggccatagggttaaagtttgggaattttgttcttccttttatattacaaactgattaggatggagattatgagtttatttcctggtatatatacaacttgagggtattaaattaggaggtgctggagcat

SEQ ID NO: 49795 - DNA, 2159 bp, Homo sapiens
ccaccactcactcatttactcacccacagcaacttccagttccgcaagctccattcatggtaagcgccccatacaggtgtgccatttttatcttttataccgcatttgtactgtaccttttccatgtttacatatgtttagacacacagatacttaccatgaattacaatggtctgcggtattcagtacagccccatgctgtcaggtttgcagcctggaagcagcaggccacaccacagagccgaggtgtgtccaggctccaccatctaggtcgtcaaagtacattctgtggtgttcgtacagcaacaaaatcgcctaatgacgcaatcctcagaccttaccctgttgttaaggtacacatgactcttattttgttcctcccggatttcctgcattaatttttactttttaaaatattacattaatatattatttgattgccagtttttctggtgctcccttaaattgcacagcctgccagcccttccctggctcccctttctttttctgcttttcttagtgcttcaacagacctgggacgttctttttctttctttttttttttaattttcttctttttttctttttcttgttttgttttgttttgttttgagatagagttcgctctgttgcccaggctggaatgcagtggtgcgttcacggctcaatgcagcaacgacctccagggctcaggcgatcccccgacctcagcctccggagaagcttggaccacaggcgcgcgccaccacgcccagctaattatatattttttgtagagacaggtctcactatgtcgcctaggctggtcacaaatgttgcttttttttccctccaggcagagctagtctctgttttgcctacctcgccccctcctgggcccagttagaaacctcatcacataatttcatttctttccaaacttgaaaccttctaaacttgaaaccttctaaacttgaaaccttccaaactcaccacttggcggcgttgatccatccgcccgcgcacaaagagaagatcgcggaacttcagagttaaggggagccgtttcccgcagcgctagccggcagtatttccaaggcgcaagttgcggagtttctgtttcctttttcctctggcgagctttgcgttccctgtgcgccggaagtgatcccctgcgtggctgggctgctcgggttagatcgtcaggtgagggaggaagggatagccagcgcgaaggaagtgctggagtcgtgtgttttggctgcgcgtgatcctgcgtgggtcgggaggtgtttctgtgtaggtgtctggccctttcatcagtcgtgcggaggaccgcgtgatttccttccagttctcctcggttttcaggtggtggcgccatcttcggtaaagggtgtccacctctccctatggtgtggctggctagcccgggggtctctacgctgcttggtctttgttaacggagatgaaggcagtaatttttcagtaacaggtttcagatataagtcccttggtgatgctaatatttatggaggccttactatgcattaagaacttttttagaagtttagaaaatggcagtgaataaagcagatacaaatctctgctctaagggagcttgcatagtaatgaaatttgagaagacagtggattggaagtgggattaactcagaatcaaaattttgtcgatgggttggaggaagaggaagttatttgggaccaaaaagacatacaggtgtgagtttatttgggagggaggaaggaatcctcatcagatgtgcaggaatgttggtacgttgtggtcacaaaattggagtgcataaaaattatgaatatagttaggaatttaggactggtgagttgtacttttgccataagaggtaatgtttttttcttattttgtttttttccttcaggaaaagcctaaagattagactgtaagaaaagaaaatagaagccatgtttcgaagacctgtattacaggtagtcacttgtctgtattaatactgagatgtattactatcagccacagtgatcagaagacttctttaggcttttaactacaggggcaaaagacctttgagctcacccacccacctctatactcatttgatatggaggattggggacgattttgccagtgtaaattatgttcactaaaacaaaaaaaaagttca

SEQ ID NO: 49796 - DNA, 1096 bp, Homo sapiens
taatatcaaacctcattcccttaaaataccttgcttagatgtttccaatgactagagaaatggacataccaatatatgtttattaagagcaaaatatattccacctgttgtaatgggcattgaggacacactggtaaacaaaggcgtattagaggaactgaaagagcacagccttaaagccataaagcttaaagtaagccataccttactttagaggaaaaacaccactagatgacttcagatagcggagtgaactgaaagaaacaatgttgggggagagacaacggacaggaaacatacaattggggtagtgtcaataggaaacactggcagtggccatcatcaacagcactcaaaacagatgaaatggcacccaggaagtcgatgaggcaggaaggagctcggtgctttcacggggagaggggaggcccgcgtggctggcttgtagccacaggtgaggctggagggcgacttcttccactaccgtgtgattacaatataaagtaactagtgattggctatctcccattcttcccccgtgattggctatctcctgttctccccctgccggaattcctaggacagcgagacaggtgggaaacaacagacctaggaggagtctctgcacctccaatctccccaaataatcgggcaaagcaatggactccagcttttccaggaagctccagctccccagcaaccgagtcctcccccatcgctatttaacagctcccaccaggtggcgccagaacactgcgaggcctggaattcctggcaggctcgcagtgcatcctcacctcagccgtttaaatctagcaataatggggttccgtatctcacgcaactgaaattttagactccacttactgcgttatgataggctgaatttccttgaatctcacagttgccctgcgaagaatgtagtgatatttccattgtactgatgagaaagtggtttcaggaaagttaaatagttaaatatcttggccaaggtaagtaacctagtgagcagctgggattccaaccgcaggtattctgatttcacctttggcgtttcttcctctgagcctaactcccaatctagagtacgggctgg

SEQ ID NO: 49797 - DNA, 1104 bp, Homo sapiens
ttaggtggatatgtctgattgtcttaggggtttgtcataattggtgttgcttgcttgattggtttttaatgccagagtgccaggcaaggattggatgatgcagttaacctgatggcagggagggggccaagccctagggaaccaaccagtcgtgtgtttttgaaatcaacattggaaaagaagtactcagatgccaggaactgattaagaactctatttagagcccagaacagagttgtttatcctgaataataacagtgaaaatttgatttcattttactatggaaattcctaggtgctaattgtggactttgtatattctttcaggatgttcagcatgctgatattgattatatggatgagagaagggacttcacttatgattcagtggattttaaaggcttccctgaatttgtcaacgagttacacaataatggacagaagcttgtcatcattgtggtatgtactgccctctttccaccaaattaggtatttgctcctccgtatcatacacccatctctcctgctttctcccccagttcccagtctcctttcagtgcctccggtttccagctagtttgttcattgtattcttcctatttttaggatccagccatctccaacaactcttcctcaagtaaaccctatggcccatatgacaggggttcagatatgaagatatgggtgaatagttcagatggagtgactccactcattggggaggtaacttaatgggaaggctggaggctggtggaggggctgcataggggtgtttgaatgtgtctgtgtgtgtgtgtgtgtgtgtgcatgtaattgttttattgtacattttcagtatatttatatatgctggggataaattctcctctgccctttcatgcccaagtgcaagccggccatcgtagctttttgattcccttcacagccaagtaagtccctttaaacaacagctcacacactgagtgtccactttctcacctcccacacactctgcagctgactgtggtctccttccttcccccctcacttccctgataccgctctggcaaaaagcacccgttactttctcactggtaagtccagcggaactgtttcatacctctt

SEQ ID NO: 49798 - DNA, 963 bp, Homo sapiens
ctgccaggaattgaagggacaaagaagctgacttgtgcagtcagcaatgcggtatatgttgtagtgtctagatactctctcaggatcaagtattaatcagacaaatatccatgttgtgggcacaaatcccagcagctgtaattctgttagcagccactcagaagtccaggggcaaagacctcttttgggagttctttctacgtaatgtaagattgtatcccatggacagaggtgcaggagaaacattgatcaccaggaatgtgactggtgatcaccaggaatattggagttaggccaaatattcatgccttatccagataagctggttttcagggcaagtggtgagtcctagagggaaaggcagatattagacagaaccacacaatctggagccagggactgaggcctggcacagctctgatagggtagggagaacagatggtactgcaaacacgtgatgcatacttctctgttgtcagtctctggcctcctggatcccagagccagttggcagcagtagcactattgatttaaaatgagacacacttggcaccaggctgcttggctattggactgcatgtctttatttactgtcagtagatgcagtaaaacaaaacaaacaaaacagaagctggggctggttttgaagattggcaagaacgagtcagactcagttcaaggctgttttccttatgtctactactgaacaagtatctatctatctatctatgtatatccatgtacccatctatgtatgtatgtatgtatgtatgtacgtatctatctatctacctatctcagtctatcatatctatgtatctaccgatcaatgtattaattcatccacccactctatctatccatccatcctctatctatctatctatcatctacctcatctatctatatctatctatctatctatccactctatctactcaggttatatctatctttctatct

SEQ ID NO: 49799 - DNA, 569 bp, Homo sapiens
ataatgccagcatctgtgcatgctataaaagaacgcaaaattaggaaacagaataaggaaaatacaggaagtcatctatacagaggcccagcatgaggatgataaatacatgaggactcactcgctaccaggatacaaagggacacacagagggtccaggagtccatggcagagtgagaacagatgtggcacattccagaccagcgcccttatgaacataagcaagaaaagatactttgggacattttacccccacaagatgcatctgttagtgacaacactgaatggcccaccacccccaacttgaaagctcctttaagcggaggctacatttttgggagatgaatcaggcagactacatttttgggagatgaatcaggcaggactgaagtcaactataattgatctgagatacagatgcacacttgcagaggatccctgtagatttgctttgatattatcaattcatagcaccttctccataacatgccttacctaggagcctgccaactatatccatctgcacctcaaactccaagtatttaaagatgaactcattgccttattgc

SEQ ID NO: 49800 - DNA, 1126 bp, Homo sapiens
cgggtgcttgtgctccctagaaaaaccagcaggtggtagcaacacttcgtggcaaggccccagcccagctctgtaggacccaaacaatagaccccaaatccccgtcctcggctagagaaggggttagaggtgggcggaaacacttttcctcgcggcgccccctcggttcctcaaccctgcctccaggcgccagctgagagcaccttgcaccgcccctcctcactgcagggaggttctctccggagcgcgggcgagggaggaggcacccagaggtgcagcgacttgcccaagccatgtcagagccaggcgtacagcagcgcttccccttttcaacccgactgccctgccccttggggagggtagatggagggaggttcgactcagaagccccaacgttgaccaagatccagacacgaaaagagaaaagagttcccggctagcacggcgacgctttcataccgagacgcccccctctcccgctgcctcggctccccctaccaccgcccgtactctcccagatttctcagtttgtctttccctccaccccctgcttttccttccttctctcttgctcagctcacgcccaccttagttcaaagctgagtaggagccccactgttttagttcctagagttaaagccgaagaggagggaggcgcgagggggtgtgtgcagggctctgccctgccctgaactgccacggtccgccagttgcgcttcgctccgcgggtgtccgacccaagccgagcccgagcccgagcccaggcaggagctttacagacagcctcttcccttcccacttcctgcaggcgccccacgcgtgcgatcctcccggccaagacccgcgggaggaggccgcccccttcccggcgcacaggcggggccccgggcgcgccccgcgtctcccccgcgcgccggggcggaggagcgggcgccgcgcactcaccgcctaggccgggagggcgggctcggctccccggaagaagggagtgggaaggcggccaaaggggctgaaggggcgggccgggccggcttgggaggggacgcggagggggcgggccgggctgcgttcgctccagccgcggctctacagcagcgggcggcgggacccgggacccagcttggcg

SEQ ID NO: 49801 - DNA, 1008 bp, Homo sapiens
cacgacctggaaggaggcaggagatacaggaagaactctgaaagagccatgaggttcaaagaggcactgaggccactgataaagggaaccaaaggcaatctgtgagataggacactagaggtcagtggtgagaacagccacctattcaccccacagcctgtgccaggcaccatgcaaccagcttcactcatcaagaaatgagagaggattttttgtgagtgttttgaataaaatagttgcccttacattactattcactcatggagaatgagtcactccaaactaatctcaacttctttttcatataaaagccacagaccaattatctcgatttaaataaaatgattaaagagaatctctacgatcttggggatgaattgatactgttactgttcagggaattttcagcaaattaaatatccacatcttaggaaggaaaagggttgattaatgactgcaagttggcagggaaatttctggtagcaagtccaccacacgttctgtcctttgctcagccctcattaattacttagatgaaacatggaaaacaagcttatcaaatatgcctgtgacacaaaactgggagggatatgtaatatgtggggcaacagaagcaatataaaattatctcgctagattggaatgctggtgtaaaatcattaacaagaaatttaagtaaaccaaatctaaggtcctatatttacatttaggaagcttagataagtgagtcatagaacaaaggtgtgggagtgctagctgatcacaagcttaataagggccatttgtatatttgctaaaagacctgactcagctttaggtacccttagcattatgtccaagtaaggaaaggcatagtcccgctttgtaccgcattgccctaatcatactggggactattctagtttcaaagaaaccatgatctattagagcatggacaaaagggtgcaatcagaatagatcagaaccaggaaggcttcctaattgaaggagtgcaatcttcaaaatagc

SEQ ID NO: 49802 - DNA, 1352 bp, Homo sapiens
atgtatttgttctctgaattttagagatcaaatacagaataaataaaacaggacctacttaaaatttcttgaaataggcaatgcaattttgcccatctcaagaaattttaagtaggtcctgttttatttagcttcagttcctctaaaaaaatagttctgcttgttttttctgactcatctgtttctttgccatttttaatatgcactttgcaactgagcctctgtaaccattttgttttctttcctcataaagcagttgagcaactgcatactctttggtaagtctctcttcattttgggaagttctacattagtcataaaatacctatttctgatctagtacaaaatatcagaagaaaagtcttaaggtctctttattttattttttacaaaaaccaggttttcagtactttccaaatctcttttccagctttccaaaaaaaaaaaaaaaaaaaagcttatgagtatgtctcttatttcttagtccttctcaccctgcaaaccagctctctctaggaggtggagcggggagaaaaacaaagcccagatgtgtagaattttctggttttcatagtgtaaatactcccaccatgacagaattgaaactaccagtgtgatgtcactgaatgtggctttggaaagaatgcacaccatccactctctctagctggtaggagacaatcctagcataccgccctctttttcttgcagtcataatagcaaatagtttgagtatattgattctcgagtcacacagtccagatttcaaaacagtattagctctatgactttggcaaactgcttaactcctctaagtttcaatttcatcatctttaaaatgggggggtaataataagctatgtttcacggtgttactgttgtaatgtgtaaaattcttagaatagtgggtagcctatagtaagtaccctaagggtgtcctattactcaggactagagctccagtggtgctatgtagacttagagccactagatggcgggctcctcatttctgcagcacaaaccttttccgctgcgctatttgcaacttaacattcaacaaactgctaattcgattatatgaattcactgacagcattttttctactgccatctcctagtttaagctacatatttgaccttgaaattccactgggaatccagctactggccctcacgtgcagccacttctaaagctctatgcaggagttattctcaatcaggacttgctaatcttagtgagttattgtaagaattaaaaccaaagccacagttgtccctgttacagaagggagtcaattccctggcctttctctccacctctgtcttttctcactcaaaagaagacaagatgg

SEQ ID NO: 49803 - DNA, 1079 bp, Homo sapiens
ttcacacatttacagaatatttccaacttttaagataataatatgcatcattttacatcttgcttttttcacttattaatatatggaatatcattaaatagtaatagaaaagagcttccaaattctttttaaagatgcaagatattctaaatattgatgtattgaattactcccataacaatgaacattaggtgctttccaatctgttgctattacaaaaagtgttgtaatttataacttcataggaagggaagttcatgcccccacatatttgcagagcagagcatttggctgcacccaactcttgtggtcaagcaatgacccttccctgcttcacagcccaacctgaggttcttccaggcctggggagggaggaaagcttgaaactgtgcatatctgtagagcatagcctctggctttgcccatcccaagtgggcaagcagtgacctcagagactcatccagccctaaggctaaggcccagcctgtagccctgtccagccagattccaaacagcataccactaacctatgaaaaagagcctgcaaatctgctcaatcagacatgattgcagagcctagccacaagttctacctaaacacaaagcccagccagtgctcttactagagtacagagtacagccagcagctccagctgacctttgagcttaggcagcagctcagcccaactaaagaacccaagagcaaggtctgcctgcatagggtcactaccagctgacccgttcagaaacacaggccaggctaaatagcgaagctccatccccagtgcagaacaccagcaaaaaccagacaaggtaggtgattcctcaaatgtgcagacactgacacaaagacacagaattacaaaaaaacagagaaatatgacaccaccaaagaaattaataatgctccaataatggaccctaaaaaaatgaagaactataaaatttcaaatagcagtaccactcatttaggaaacagaccctagatgactgataaaaacttcagaaaaaaatcctcttcaagaagctcagggaactacaagaaaacatgaatagaaaattaaataaaatttaaaata

SEQ ID NO: 49804 - DNA, 798 bp, Homo sapiens
atgtagataataccattggctcatctacgaaagatgagaatttggatcgcatacaccacctctcctctgcctcctccaatgtttgataattatatcatgttttgttcctctacttagtgcttttcccacttcaaataacttacttataccactatttcttgtttcaatagctctaatcagtatctagagtaaaattaagtaagcaggaggctattgacctgagacagtctccatgctttgaattcctatgaaacaaaatgcaacctaacttagtatgtaaacaaactgaaacttaacttaggagtttcatttttataacagataaccaggtctttgccaatcacaagcagccaagcttcagctaagtgcaagcagccaacggactggctcatgtctaaatcaagcaaaacacttagctgcaacaaatcaaactatttatgtactttaccttcctgttctgcttataaatactcattgcttacagttgcagagctctcggaacctcttctggttctgagtactgcctgattcaagaatcattctttactcaaataaactccattaaatttaaattgtctgaggtttttcttttaacactaaatacccctctcagcaataggaagatgatagcccatagaagtgaatatatttttctttttgttgtctctactccattttatccacaacagggcccaacctaaaaataataataataacaacagtaatagtatgtggagatagactgtaaggactcagatcaatgttttattattctgtgattcttaaagtaaatataca

SEQ ID NO: 49805 - DNA, 726 bp, Homo sapiens
tccaattaataaatgaaaaaaactaaggaaatagagaatcaccattagaacaccacagtaacaactgctgcaggcaagatccactgatgaataataaaactgatgggtgacagtttagggagcaactggatatttgcatagcctcaaagtatctcccccaaatatttattagttaccatggtagtgttaacgtatatccacaacttctttaatattcttccctccagtggatggacttaatctactcaaccctcactcccaggatgggctgcacttactgactcccttccaaaaactagggtttggatagggaaaaatggtgactttacagtgcagaaattttccagttgctccgccttaaccaggtgaccaaggtaaacaccaccagtgatgagtcatgttgatatccctgtacctcatgacatgattcaagaagggcaccttacctctgtggtaatcttcccaaaagtccacaaccttagtcttactctgaggaaatatcagacaaacccaaatgaagggacatgccacaaaatagctgatcaatactcttcacaagtgtcaaagtcatgaaacactagaaaaggccaagaaactctcatagatatgggaagaataaagagacatgacaacaaaattctgtatgtatgctggactggatcctggaacagaaaaagaacactaatgaaaaaactggtgaaatctgagcaaaacctgcagttcagt

SEQ ID NO: 49806 - DNA, 1529 bp, Homo sapiens
acttgtggacttttattagttttataaaactggtttagtttggggaagggctattatcatttaaactataaactaaatttctccctatattagctcgtcccatgctcaggaatgaccaagggcagtttggaggttaaaggcacgatggagttggtgagttcagatctgtttcaccttcgtaattttctcactgttaaaatttttgcaaaggcgattgcagcgccccttgtccacacctgcgcgctccccaaggggtccctacccaccccgcccctggctgggggccgtaggctggccctgccccgctgcgccggaggtggacctctaccagggcagtttctctctgaggctgcgcgctaaggcggtgggcggtcccaggcaggcccagaagctgggcagcctctgccgggttccgggaaaaggagctcctgctgccactgctcttccggagcctgcagcatggggcccctgccgcgcaccgtggagctcttctatgacgtgctgtccccctactcctggctgggcttcgaggtgacgctgggaggggtcgcctcggcagtgtctggggagtgagggcggagggaagagtgagcgcagggctccgggacagaggtctcgtgtaactcctggcgccgcccaaggggttaaggcaagcagggagagctccggggctgaaggtcactttgtgcttttaaacggaatagagtcgctggctccaacccgagcctttatatcccgactgcagtttcccacggtggtggaaagaggggcggctccaaacattcagggagaaatgcagaacacggccacctcttagcccaacgatggcagttttggggaaaactggccacaggagcgaagatcctggaatagatttctagtagtgaggagagttttgccaatttcaaaccaaacaatgtagggtgtccgcataacccctgctctgcacttagcgcctcccttccctttccctcggctctttcacttttccatcttgcacactggcaatcgttcttgacctctgcccgcagatcctgtgccggtatcagaatatctggaacatcaacctgcagttgcggcccagcctcataacagggatcatgaaagacagtggtaggaagggagggtcggggcaggggtgatctcagtggcccaagagagccgaccccagcgggtccttatattggcactggcagccagaaagctgccctctgccccgtctctactaaaaatacaaaattagccgggcgtggtagtgcatgcctgtataccacagctactcgggaggctgaggcgggagaatcgcttgaacccaggaggcggaggttgcggtgagctgagatcgcaccattgcactccagcctgggcaacaagagcgaaacaacaagagaaaaaaaaggaagctgccctctgcccaaaacccacgtcgaggtccccaaacctgggacccttaggtcttttctcacttagcgtgcccaaccttctcctggcaggaaacaagcctccaggtctgcttccccgcaaaggac

SEQ ID NO: 49807 - DNA, 1487 bp, Homo sapiens
tgacaggtctgcagaatacagggagtccataaaaatagcacttgggtaatggaagcaggacacaccattccatgcccacagcattactttctgtgtgcagtgcactgtgtgatgatctacagagattaaataagccgaggtctccgcttccagtcacttgggagagacgcacaaggtaaattacccaaatagaaggcaaactgcccagggctgtaattaacatacaatatgcgccgagagggaaaggttaatgctaactccggtcctaagtacaaagatcattgggagtcaggggtgcactctcattagggtacagcatgggtgggtggagagagtaaaaaccagaacaaatcaaggttcagcagttggaagtcagccttagggagaaaaggggcggagactgactgggccagaacagggattgggacagaaaaagagggtggggccagtgggctccacctacccgctccggcccttcccaccaccccccaccccatctactttctacagtctgtggagacaggtgagcgacgaacttctgagacaggtgtgggtgcgagggtcgggagggtcatgggattgggaccgaggtgtgaggagggaatctgcaattccttgctacacagagcgctggcaacttctgacaggctgtttctggggtatgggctgcctcgggttgttgctgttacaaggaaagaaaagagttcccctgcccaccgcctcccagccactgggctacctcctggcaggaaatttgcaaactgagtttaacaagttaggatcagcagagggtagaggagggccctggcagatgtggggtctagaagaggacaggagttatcagggcctccggccattgtgctgggcctttgcctgtacaattgtttctcaagcagttgtgtccctgtggctttggtgcgcctgtgtgcactttctccctccacctggagcatgggctaacaccggaggaaaggaaaagacagagtcagacagggtaagtggggctccctcccctcttctctctaacggggctggattgagggcctctggctggggaggtgggggtggagatccagtaggagcaataacagaggaagggcagggcctgccccatcacctgaattccagagatgccagtgtgcactgaagccccaggcagggcgtgcccaggaccggatcctggatggtggtaagggacaaagctggaagggagactacagggaaggagaaaggaaagaaggcagagccatgacacagtcaacttacagaatggctgggagtcaaagctcctgggctggtttcctggctattccacacactccaagacatagagagaatttcggaactggaggggactctacagatgatttatttgagattgaagaacctagaaaccaaacaaagaaatatcatatggttactttggtatctgacacagccatgacaccaattgctagtgtagacacaatagctgtgtgtctttttgc

SEQ ID NO: 49808 - DNA, 1589 bp, Homo sapiens
agagtctctaacagcttctgcctcactcctaagctctgaccgctaggctttcaccccagccgccggtcctgattcctgagatcccaatattgagcaccaggtttcctggaattgtgtgctgcggctgtgatgtaggtttcggtcgctggaagctgctaaaccatagctgacgccccctcctaagccagccttccttccccgcgcgggcatctgtccagggccttgtcgcgctctcagtctccttcgcagcctggccccaaccgttcaacttcaataaagcaaaactccagccacgcccgtctccgtgaagttatcgccataggccggccagggggcgcgagaggcaccggggtgatttccgcgggaatcgataaccaatcggattcccaggccgaacggagcacacccgcccgccctcgctctttccccgccctttgccccgccccgctccttcccctccttttgtctgtccgccgagcaccccacttcaccccattggaccgcgcggccgccgctagagctctgcgcctgcgcacgcaccgggccggggactgggtggcctggtgtgtgggcgcggcagggcgcaggcgcaggcgcagtgtgcgtccgcgtctgaggggagggatgtgggggaagcgacggcccccggtttgtttgggctgtgggcggtgcgcagcggagagcccgggaaaagcgggaaatggcggcgccgagcgcggggtcttggtccaccttccagcacaaggagctgatggccgctgacaggggacgcaggtaagtagggaacggtcttagggctccttaggggagcccagggaaggggagcgtggcccccaggcgtgcggccctgcagccccctcccctcggagccccggaaagcagccgtgtccgcgcttcctgccaagggtgggacgcccgcccgagccgctccgagcctgactccgcgcaagggcccgcgggcggacctcttggccttgtctctcgtgggaaaagactgccccagcctccctttgttcaacccacgagggttctaaaggggaggtctttgcagtcctgcccgctcttgggttctcttgaagattcttcatcctttcctctggctcccttatgagggaaactataaaaagaccatactctgtctccttaaaaatcgacgagaccttctgcagacctcggtgctctgcctgatgtgcatttgatttgtatcgattgtatcatgatctgcatggctttgcatagaatgaccagattttcaaagaagtcaatacagggtttggaaattgagtacttttggcagaacaagggggttcctgtggctccgagtgtccatgcctctgccccggtcattccatttcatggcagtcatcacccaggagaacattgtaatgcctcctgctcgagactgaagattaaggtcttcgcaaagggaacctgcagaaggacacagaattaagacgtaggaactccgtggtgcccttcgcccctcctccccttccagttgtgtcctgaaattctaaatgattggaaacttttataatgttcacgtttaagactctcatactacagagtagaggaaggagcgggtgtgc

SEQ ID NO: 49809 - DNA, 787 bp, Homo sapiens
cccatctcaggctcctaaagtgctggggttacaggggtgagccactgagccttgcttccaccttggaatactttttaacaaatcccagacattgtatcacttgtagacttgagttttgacttctcccttgccctcccctcaccctgccctgcatgggaccagccagaacagatctggccctttaagtgttttcccagcccaggtatgatgatatgaagcaacccccttccttgtctccactggcctggggccttgaggagctgagacagcctcagctgtctgacttccactgggaagtatgttctctctctgggtcccacgcagggtttggaaggaaacactgcctccctcggtcactgacccagaagacaaacagccatgagcagggcaattcatgtgcgtgcttgttcaggactgcggtgtaaaatgctgctcatattgtgaaatcagatctcttctactcaggctctcccagaatccagcaacatggcctggcctgaccctggccccagaggacagttagtgtagtgggagtggggcaggctaaaagtggttggagctcttgtataccccacacagacacacgtgctctgcctcaggatggaagcggagggccaccagacctgggggagctgctctgtcctcttcacatgtggggcaggtaggggtctaattatctagctgtgggaagaagtagatggacctgccttttcgggctagttcttgtgtgtgcatacaagcactgggagatgaagtggatggtcttgaagcttgatagaggacctga

SEQ ID NO: 49810 - DNA, 3691 bp, Homo sapiens
ggtggtgacaaagacaatgagatgccagagaaaaagatcagtggggtttgcaaaagtgattaagatgtcgtcctaggtataattaaagacttaataaggttgaaggaaagagaggacattgcacataccgaggcccctgagagatctgcctggcaacccagaaagggacatatgggggaaaacgccttagtgtaaccaggtcagaattttcattctgggcagaactggaatttgaataataatactgagtcatatagcgcatacagctatgacatttcatttatttctctatataatgcaataaagtagatggattaaccgtgacgtttacagatggagcaggggagaatgaagaggcgtcagtttgggcatcaggctggatcttcacactctgacctcactctgctctatcctgcccagtgttgcttcacctgatatcaggggtgcaaggcaaccagatctgacaccagtttcagtttagatcctgcctttacctgggtgtgacccgggtccatctcttcagctcggcctctgctttctcttcataaacttttggggttagtcctcggatgatctctaaaacatggcccaggtgctccttgccagtagagtgtagccggatttggagggactggacactcagtgtgaacaagacgaaggcctcaggaggcagtaaaagctgacaagaggagagaaaatgaagcgcctacgggtgcatactggactagcgggcgaaaggccatgactccttagtttggagaaagaactggggccgagattggggaagtttcccagtgcaattaaaaaaaaaaaaaaaaagaactagaagaattacccaggtctggcttctttcgtgtagcctggggctgagtcgcaggctgagaaatccagtctggccagtagggggctccaccaagcgcagtctcagaatgcccaagagctccaccgtcgcccggggtctccaccaagcgcagtctcagaatgcccaagagccccaccgtcgcccggggtctccaagaggagtgggtcgtggtgggcgttgaagggccgtaaaagacgagcagcccgcgtccgcgtccgtcctcccgggtctccagtccgcaggcggccgccgcctcggccccgccctcccacctccattcccggccccgcggacccgaacggtccctctcgcaaccgatctgctggctggggcgctggggatgcgaattcctagaagccttaagaggctgcccagcgttggaagttcgtatccccaagaatgctggaggttccggctcacacaccccctccgggcacagagtcagctggggggtgctgggagggagaacgccccgctcctcaccccccatccccgtgcaccctggagcccagctccatacgttcggccaccccaggcggactcggggtggccgggtagcgggtggtggcaggaggggaccgggtaacggcaggcccgagaggaggtcgctgggccgggccggaggcgcacaggggctgcgtggctacctcggcggcacccgccccacctccgccggctaagcccggagggggacggtgagtcagatctcgggcacccgcgggtcgggcggggagggggaggcaggtcaggaaatgacatcagaggcctgtgctcagggagtgggggtctgagccgggctggggcggcgggggcggcagtgagtggggtgggggcgagcggacctcggcggagcctccggcctgaggcaggatcagggccccttcctgggggagtttcctgcctggtccgcccttccccgctctccccgccccctctccgggccgctccttgtatggtctgggcgccgctctctccccgccccctctcttctccctccctcctccttccgtgtgtccctccccgcccggctggaggctgctccggaccgggacgcagagtctgcggacccggcgccgaggcggccacccgagacgcggcgcgcacgctccggcctgcggtgaggcgcggggagcggcagggcggccccacggggagggggcgcggggcgccgggagggggcgagtgggggtcaccaaggggagctgggaccgcctggggctcctgagcccggctccgcgctgcgtaacccggcgacccaccccagcagcccggcccggccatggcggccccccgcccgtctcccgcgatctccgtttcggtctcggctccggctttttacgccccgcagaagaagttcggccctgtggtggccccaaagcccaaagtgaatcccttccggcccggggacagcgagcctcccccggcacccggggcccagcgcgcacagatgggccgggtgggcgagattcccccgccgcccccggaaggtatgcggcggggcttggggaatgtaccccggcaggagccggggtggggggcagtcgtttcgggaatttggggatgtctggaaaggttgttgccgagggggctgggcgcagccaccctgtcccgagcagatgttcttacctcatcgtggagctcgtggctgggagccagggctcctgggaccgttccaagtcccccgcctgggagtgggagtcgggaatgtggggcacgaatcttcccctccgggtccgttttccgaagtgtaacgggagctgcaccactcctcggcagtgcgcccggcctttcctgacctggtactcccagggcgccctgcgcccctcctttgcttccccacacgctctgggacccctgagagagttcttgggttaggggttagagcggttaactgaggggagcttgggtgaggggtagagggaccccggccgacgtctttctccttcctaccccagactttcccctgcctccacctccccttgctggggatggcgacgatgcagagggtgctctgggaggtgccttcccgccgccccctcccccgatcgaggaatcatttccccctgcgcctctggaggaggagatcttcccttccccgccgcctcctccggaggaggagggagggcctgaggcccccataccgcccccaccacaggtacggaggcctgggaggggcggctgcactggacacccccaaggagaggagaagagggccctttcttcttacctcccctgcacctctgccttgggggtggggggatagaggcatggaataggtgctctgacctctgaccctctagcccagggagaaggtgagcagtattgatttggagatcgactctctgtcctcactgctggatgacatgaccaagaatgatcctttcaaagcccgggtaagggaccggagagtaggaaaagcagggctcagggccagagagactgggcatagaactaaggaggatggtgtcctcctgactgcatctctcttccctctcccaccccttgcaggtgtcatctggatatgtgcccccaccagtggccactccattcagttccaagtccagtaccaagcctgcagccgggggcacagcacccctgcctccttggaagtccccttccagctcccagcctctgccccaggttccggctccggctcagagccagacacagttccatgttcagccccagccccagcccaagcctcaggtccaactccatgtccagtcccagacccagcctgtgtctttggctaacacccagccccgagggcccccagcctcatctccggctccagcccctaagttttctccagtgactcctaagtttact

SEQ ID NO: 49811 - DNA, 869 bp, Homo sapiens
ccccacctcccttttaaaacaaagaggttttctggggtgcagagcagggttctcctgaaagtgggcagaagcagcaccgatagcctagtctggcaggttgtgggaaggggcgcagggagtgaccatgagcgaccttggccccgtccttgctccttgcaccctgattgggcatggggtgagaggagggatcagtccttgaatccctgaatactgcaaagaatgcgcttctggtgcccgggcagtgtgattcccatctgcgtcaggtccctgtgggcaaggaagggtgggggcatgagtccggaggctccacccccgcagccctcccctgcccagacagctccagctccttactcagcggtcagctccagcacacactccatggtgtccagcccagccgagtggaagtgcaggatgtagcgtttcatgcgtatggactcgagccactcagagacggttcgatatgggatcccatctgagccactcaggctgggcaggcgaagagtcatcctgtgggacatgggcatgtcagtcacagcgggtacatgggctgatctggttggccttggcctctgagcatcagcagccagcactgaagttcggtgtctgggcacagagatcatctagactgtggattgaccccaccattatctctgagcccacttcctggcctgtttcctggtgtgctcacaacagtggactggctgacagtcctgctatgtcgacaggcctataggaagggactgtcctgggaagccccaacagaaggggatcaccagccggtctcctgctggagtggccggttctgggcacctgactgagggctggttaagacatggaagtctcctgtctgagaggaagctgaaagtagg

SEQ ID NO: 49812 - DNA, 973 bp, Homo sapiens
gaagccttcccaaaccctgcaaggctgctgctacctaccccaccccagcctggctgcccaagctccctggagcttgggtaataagtgcagctgtatctccaatgtccagcaaacagcttgcaccagtaggtcctccaaaacttcatgaatggatgaccctttccttcacatgcagaaatatttctatggggaaggggatgcatcccaagaatgggccacagtacaacacagtgggattggcaaggatggctccgggagtgtcttaggtgaggctgcctgagaagagaaaagatgggccccccacccccaagcccaggtgaagtgagggaactggggcccagccataactgattttctgcaaatatgcataatctaaagctgacctcttggactctccccaagggcacgtcttgcctcatacactggacttggtccagagctccccaggcccagcgctcaaagaagattggctgaatgcccatttccactctcctagcgctgcctctgggttccctagtccttcccctgcatggttacctggggtcaaagttggcaatggtccgcagggagtgggggttggcaagcagttgctccagatgtgcctgaagcttctggaagtgtggccggcgggcacggtcatatgcccagcagttcttcatgagctcatacagaggggcagggcagtccacaggagggggcaaccggtacccatcctcaatgctcttcataacctgcacggcgggacaggaggatgctctagagtagcaagctaacctggaggcccatgagaaaccgacggtcacacaagataattgcagtggagatcctaggatgggaggaggtgggaggaccagggtgggacgatcacagtgggaggatcagggtgggaggagtaaagagagcagggcatgaggtgaagaaccagaggagccaggagtacagaaaaactgaaggtcatgaataaataaagata

SEQ ID NO: 49813 - DNA, 2373 bp, Homo sapiens
caggaaggcatccagggctccattctccataaattctgtgatgatcatgatcggctttcctgagacacagacacacatatcacactcagaaccgggcttcctgcccttggccacacatcctccctccacttccagtggtttcacccctctttcctgcatttcccgcccccagctgagggagaccactcatcgtacgctttgtgacgacgccttccagatgcagaatatgcgggtggctaaactggcccatgatagttgcctctcgaaggaagttccaccactggccacctggggatgtgtcttttaaggtcttaatggccacagtcttgcagtcctggctggggagcctcagggtccctcgatacacttccccaaactctcctgggtagaaagaaaacaggctgtggcccgatgcactgcagggctcctccaggggacaggcagcaacccctccagtcctccggcccttttcttttctggagaatcagaagcgtggagtgcccttcctgggacagggcgtgggctgtccttcctggggaaggtcagagtctggagctggagtgcaatgccgtgacctattcaccactgtctcccagtgtttgcacagttcttggctcacaataggcgctcggcaactgcagggtgaatgaaccctgtggagcgggactgggccgtgctcatgaagagcaagctagtgcggcactagtacccaagtggcagggacgctggctatggccgcctctcttctgtgagctcctctggtcccagcttgcctggctcagctgcacaattggcaaggacaccaccaagctttgttctccactgagatccatttcctctggtgacccaagggaacagggcagcccaaggacactgggcctctgatggggtggaatgccaggctagggagggaatgagtcctacatttgggcatcatcacagaacatctggaccctcagcacagcagcacctctgtggatgaaaacagtgtatttaatgccctttatcagaaactccaaaaccacagaagcaagtgtgtaggagacaggggttgctccagggcacctgatgaggggtttttaacaagaacgcaatggttcaaagaggatacagagcagagcagagtgagtacctctggaaactcttggaccagagaagccagctgggctgcccagggaagcgctggaaggaaggggcctgctggtggctctgtgctgccccacatggcggggggcctgctgcggtgcacagcaggactcaccttctcctatgacagtgtccaccatcagccacgctggatcaagctcccgggtaaagtccagggctccctgtgcagggtcctcgtatgcctggaggtccacataaggcttcagccacagcttgtcctctatgggcagaacatgaggttggggagtaccaacatcagggctcaggagtatgggggtcaggagaagggccagcagcggaccacacacttctccacacctccctgtttcccaaggtgactcctgtttgggctgaggtgggagaaagtctccatttagcaactaggcctttcttctccctgtctatgctccaagctccgctgtcctcactccacaaggtccggggcggtggccaggatccacacccgcagagcatatttgctgcctgagttgcccaatcttctcagcggccagtccccacactgctctggtcagtcacacctcgttcacattcccagacagagccgcgcatggctcccaccccagctgcccggatggacccctcactctcccctttgtgggtcacctaatgaggtgacaagcaagaagctcataagcctcggaggacgtcaatcctcctcccgcctggcctcggcccacagccctggcctccaggatggggagggctgtccagagcccagggtgacaagacagcggcaccagcagtgaacggacactaacagataattgcatcagagccactggggggctaccagtacatagttaattaaccaaagttaattaggtagcaaaacacaagagccctggggacaacaaaccccacatgtgcccccagagttggcctagcaaatgtgtcccttgatcccttcccagtggcatctcccaacacacacacacacgcacacacaggtgtgcacacgcatgtggggacacacgcaggtgcacccgactcacctcgatccacatcggtggcgcggtcacgctgcctctgctgcctctgccgctgggctctcctgtgggggttggggaccagctccttcagggccccaggaccacctcaggggtccgagggactctggctgaatcttccccagaaacgggctgggagtgcaggatgggttttgatactaggggatgggagggtcgt

SEQ ID NO: 49814 - DNA, 591 bp, Homo sapiens
tcatcttgcttatggtatcttttggtggcagactatgaatgggacatgggacccccataagatatatctagtgaagcactgagagatggataaacaggtgcctgcgggaaaggtactctttcagccttcttatagaagagtattgaaacaggagaaaatgtttactttctagagctatcaactgtagaaaggaaaagtcctggggaagacttgttctggcaaagtgcacgctttggcacctctgcagagaacatgaagtttgcccgcaaacattagatgtctacttggttacacgtgaccgcaacagggcgtgtgtaccatggcctcagctcgcttcttgatgacatcatgaatctgggctccggccaaaggattttgagacgagccaaaatgctgtggagcatgcagaagccactcattgctgttgtcttcaagaagccagaggaagacatgcaaagaattaaagaaagacgctgaagctgtgttacaaaacagttgatcaggttgaattatccgctctctaacaatcttttgagagttcaataaaaactagcagctcttcaattagccgggcgtggtggcgggcgcctg

SEQ ID NO: 49815 - DNA, 2017 bp, Homo sapiens
gcagggtggtttttactattatatattcagtattgttataggacagggctcactccacataaagcaaaacttccctgtggcccagctttgccctgagctcctcttgtcattccaccaactcttgcttcccccagctcctatggtgatgtcccctctgggtcagtttcccttctctgtctttctcgtcttctcattatgatttatctactctctctcatttcctcagaggcttcttaggaactgattacttttggttgatcaagcactctggagccaaggggataacagttaacagatgatggtaacatatcagagaaatccacattttaactggagattccatgaactccaatatggagcttgacagtgaaattttaggcagcatgagaggccagtggttagggggccttttcttggtaatgtgaagccttgtgcatgcgaatgatttttctgttccacccattcgggaagtgagctaaggcagtgtatagaggctactgaataaaatattaaggcaggacgtgaagggaaggtttttggtttggggagggcaataagagtaacaatgtcttttaaagaagagttaggaaagaaatagtacagttaagacatcatgtacaaaatgtgggtattttcagtcaccccagcagcctctattctgttaatgtttctctgcatctggctctgagaaaggacaggcaaatacaggttatgcaaatagagatggtgtcattgagctgggagtgatttgcatgccaaaggagattgcagaaattatcttttcaaattctggggactgggggtgtttgctggtggctgggattttctatgaatccagggacaagggcttctgagtctctggtgtcaacaaggtggcttgactcagccagagaggctgtttttccctgaagatgtgtcccagccctctgcagtaggagctgagacttagcagaacctccctggagaagatgccctccttgcccacgttgatcttcatagccatcttttgcctggagtcattggctgcaatgctgcagaatggattcttggtcacaatgctgggcagggagtgggtaaggtgccggatgctgtccacaagtgacatgattgtggcctgtctcgctgcctcccgtttctgcctgcatggggtagccatggtgaacaacctcctggcctccttagatttttcgcgtgcagttccctatatgaacatcttctgggaccttttcaatgccctcactttgtggtttactgccttgcttgctgctttctactgtgtgaagatctcatctttctcccaccccaccttcgcctggctgaagtggaggaactctcggttagtgcccaagctgatcaagggctccctgatcatctgtggcctggaagtcatctcatcagccactgggaacatcctgtttggtcagaggaaggtctccctgagttcctacagaaacgaaactctagtttatagagtgcaggcttcatttcagctctactttttcctttatgaagggtttgtgtggtcgattctgttcctcctgttcctagtgtccactgtcttgctcatagtctcactgtgctggcagttggggtagatgagggacctcaggcccggcccctgtgatcccagcacccaggcttacactatggctttaaagtcactcaccttttccctcatcttctgtacattgtacttcctgtccttgtttgcttctgctttgaaaatcataaactttcagaatcactggcactgggcctggtaagtgctaatctatgccaacatctgtctgcactctaccgtcctggtgctgaggagccccaaactgaaaaagggcctgaagacatggcctcagctccagtgcccacgtgctgctggctcacagggctttggaaggtgctggccatagggtggttctgctcctgagttatctgtgtcagtaaccagtcctgggatgaatgatcctggtaggaatgtataaggtttgggtactgtctttctctttccagtttcttcttt

SEQ ID NO: 49816 - DNA, 800 bp, Homo sapiens
ttgttttcttttgtggtcaagacaaaccagagattcataatatttagttaaggagatgttttagtctgatttttaaaagattattttaaacatttttcagaataaaatcatcatggctttgctttatgatctaggattttagagctcaaaaatttgtgtattaaaagagtggaacaaaactatccccaatgaggaagccggattctttctttgctgaatcccatggctcactctaatcgtgcatagcatggtctcccagtcaggatgagctctgagcacagccctcaatgttcacaagaggatattcttagacctgattgcatacaagatgtttgtttgaggtcccgcatatctgactttctggccagcaatttgccaccactgcaaatttgaaagggaaacaagcagagggacgctcatgtgactggcacacagcccagtcacactcatcagagctgagagatcattactgtgactttggctccaaacccatgggtgaatcccccaccctagtgagctgggctggaccatgtgtgagttactagggtggcctttgcacctcttacctaaggcctgtttgatcctatgggcacagcgaattttgtaacttaaagcttttttccctccttttctcacttactacagaaacatatatttaaatatttttaccaagaaatagactttcttggaatacattttgtgcactgccctgacttctaatttaatctttcttcctaattcatatacactggtatatcttttctcctccctccccctttctttcatttaagaaaatgaat

SEQ ID NO: 49817 - DNA, 562 bp, Homo sapiens
acatgctctgcacacagtgtgaacttagtactattttattccaatacattttggtgatgtttttagatgatgaaaaactatttttattgatagatggcctcgttcttagctttttgggacagagaattttattccacttttctcaccttggtaaacatgtactgagcactgttcagcgcctggtccagtggaaggtattgggataacaaatcaatcagtctggtctcctgcttaggaactcagcctgcagggagaatagaaagagtgagtcatcatgaccttatcaggggagttttcagaggaagcttgatgaagacatctggtaagaggagacatagagtctggctatgtaatcagctcagcagatctgtagaaataataaagtagaaacaaaaaacaaaacaaaacaaaaacaagaaatagtgctcttgcctcttaaaaaagtagatgaggtttaaggtatgctaagattcatataaggaggcctgggcttcaagctgtatcaggaaaccatctacgtatccattgggtacattgctacattttaaagccacagtttctt

SEQ ID NO: 49818 - DNA, 641 bp, Homo sapiens
aacatgctttgtgggagggcttccctgggtgcatcaggaacaatatgtccctaacatttttattaatgctttgtcaacgtgagaaaagggacgtgtatttgttctaacttgacttttagttagcagtacattccaaatttgccatcagaacacagtttcgttctaagcattatacggtgactcatttgcaagtaacatttggaaaacagtgacagtgtgcaggtcagctgcatttctcataatcctttgggatggaagaaccaggaggtggaaagagatttgaggtcatgcaagctggaggaggaggtttaatttttccaatcgatattaatgagctctctcttttattaatttttaattttaaatgtaagctcaactatttgctcttaaaatcactgttaatcaatgttggaagtggaatttcttcatagttgttatatcctagagtaaaagagcaataaacctgggtcaaagggcaacaggaaaatcagatgaaagaactggaaggaatgcaaagagttgggcttttgctaatacttttttttttttttttttttttgagacaaggtctcagactgctgcccagtctggagtgcaatggcaccatgatggctcactgcagcttcgaaccccccagctaa

SEQ ID NO: 49819 - DNA, 1475 bp, Homo sapiens
gatgacataattgaggagcacaagcccaggagtgagaagacctgggtattattacctttttaaatgtgggcgctgcctaccccccagctgttgatctgcgtgcctcagggagtattctatcaaatgcacagtgtgtgagaagggatgttctaaactcccagaggctgtcagcactcagcttggagtctggcggggctccactctcttctttcctcccaggcccaaagccagtctgcaaagagcacaacggtgacgtctgagaagggagggggctggggagtggggggcagccggcagggaggaggggagctcctccatgcgcgtaaacacacacacacacacacacacacacgaacgctcactcaagtctccaggggccagtgccagtgggagatagagctcagtcccaaagccagtgttcacaaagatcaaagggcagtaggacagtaggccacaagtaatgctctgtcaccagctacccgcgaccctgctcaagccccgggccttctcatccgacaaagcagcggattagacgcggttctctaggtcaggccctcaggtaactcaaccacacaaagcaagcacacacaaacatcagatgtcagaacctggagaggaggagcaatgcggcagggggatgcgggacccaagcgcagaggaaaatcaccagcagaaatacggacacaaaggggattctctgtccccgatgatttctgatttcggcacacccagacccacggcgcacccatcgcgccccgcacccccgccccggcctcccgccctgccctcccccccgcagcacccaggccgagtccaccgttgctggccccttctccagcctgccaggcttttggagagggccactcaccaggtcaccctgcgatttccacgggggcaggtgggagcgggcagagcctggcgcagagaggaatgcacagggaagaggcttccctgtaccagtgactgggcgaccgagccgggatttgggagcggggaggaggctggagctggaggagaggaggggtttccacgggagtcccctcctccccacttcctcccaggctggagtgggagctccagggggcggcgcttggcgggggacagcgcttctttgtgtcgccggccctggtggcttggcattgctgtggcttagggacgcctggagaccccatcctggcagtgtggacggctgtttcattaaagatacaaacttctctgactctacattagtaagggaaaggctgagcaaattgtgggacaaacattctgcttagtattattcagttcttaggaagagcttgaatctccatttagtcggtgaatataccgtgatatattgccaaggggaaaatacaaattgtagaaattgttgaatatgcttttgtttttataggaaaaacaaaccccgtatatatttgtattatggtggggagaagggaaggctacatttctacccattaatattgtttaacttg

SEQ ID NO: 49820 - DNA, 3017 bp, Homo sapiens
ttaaattcaaaacttagattcattgatagaaacagagaaagaaacagatataaagacatagagagaaagaaaacctcaaaagcaaattggaaagatgtctgtggcatatatagctaacaattactgcttcgtacccagattatataaagaaagcattccaatgagtcaataaaaaaggtaaacaaacaatccaatacaaaaatgaaagagacaggaatcagaatttcacaaagagaaagcactgatcaacatataaaaagtcaatctcattagttatggaaaatgctagttaaaatcacagttaaatgctatttcatacctgccagactgacaaaaaatgtaattttacaagactaagctgtggcaagcatgtagagcaacaagaatgctcatccactgctggagggagtgcaaactggtttaacactttggaaagtttagaaatgacccaataaaattgaatacacataaatcttataactccgcaattctactcccagctatatactctagggaagctcccacacaagtgtacttgaatattagaggacatgggcaggctttaaagtggccccgataatccctgcctccaggtgttcatgtccttgtgtcacccccttcccttcagtgtgagttgggcctagggactcacttctaatgaatataaaatggcaaaaataatgggatgtcgcttctgaggttacagaaagaatctgacttctgtctttctctttttctctgtgggagccttctctctggggggagtaagctgccatgttgcaaccattctttatacagaggcccatgtggcaaagaactgatgtgtacagccagggtcagtgaggccaatcggcctgccagcagtcatgtgagtaagcctgggagaggtcctcgaccctacgcctagccttgagatgactgaggcccagtcaataccttgattgttgatacagcttgtgagagaccctgagtcagagactcccagctaagcccctcctggattcctgatcacagaaactgtaagataggaggtaacaggacttgttttgtttgttcgctttggtttgaagctgctaggtgttggggtaatttgttacatagcttatagataaatcatacacctccaaaagtagaaacaatccaatgtccatcagcagtagaatggataaattatgtacatttacaccttaaatgacgaaaacgaaaatggaaggaagcatgaaagatgaatctataaaacttaagaatacgtacaggataatgtcattaatataatgtcattataatgagaaagccaatacatatgttttaggaatacacacacaaatatggtaaaactaaaaagaaaagcaagggattcattaaattaagacaaaaatcacgaaagatgtcacatctcagagaatggaggagaatggaccatgggcatcagttgggactcatgggcttctaaggtactgtgacgccctatttcttgacccaaggagatggtcaggcattcgtttcattattttttagaccattctgagatatttcatttactttttattcaacattttaaaacaaagtattgaaaccaattcatcaacaaatcactagtttggaggatgaaagtgatggaccgatggttggctggtcagctagacagacacattctgtcctttacgtctagttcgagctgtacttcttctaaatttccatgattatccaattggcaaagatctttttctcctgtacttaaggccttcttccgttgcaggttgggccaaactagcggccagctctcggctgtttaccagggaactgtatcacccagcacttgctgcttcaggccaaatgcattccagactaacattcagcctgaatccccgcgccgctctcaccgccacccctccccaggtcccttcccccaccacaaacccacactgcgcccgtgggcgcctagagcactggggtggatgagaacttccacctgggcttaacggagacaagctagcctagaagaatgcaagcccccagctggcgagatcaaatcgcctcgagggttcctgctagctcagatcttaatggctccttgcggagcaaaaaacaaatcctacgaaaatagggggggtcatcgcctcctgcccagcagagggcataacaatgcggcgagaatgaaataggcaccgagctgcagagaaaaatcatcaacggggtagagacgaaggaagggatcctcggtggaacggctctatcacctgggggcgcgcgcagaggccgcaatccacgcccggccctccccagacgctaaacgtcgcaccccgcccaccgctccccgccccggacactaacccggggcccaggcctcggtcaccgcgggcctctcctggtccagagtctacgctgaaccccactcactgtttgccccgctgttccctgcagcgcgggttcggggcagtagcaacctgctaggagcgggaggcggttgttcccaggaggaagcagcttctccgcccaggaggcaaagggcagcgggctcgaaactacaggacttggaaagtcttaggcggagactgcgggggtggggggtggtgaggaggggccttccagggagctgattggtcgacgcggacgggggcgggacttggccggcgccgtccctcccctagacctcagaggccctgcccgcagatgtggcgccaaatcccggatgcaggcctaggcgccagcccaggaatatagggagcaaattgttaagaacaaaacaaaacaaaacaaaagtgagaatacttctgaacaagtgacggccttgataaatagcgagagatgtttatataaaataatacaggactatttttaaggacgagtgaaatctatcggttctagctatagtttttaattaaaaaagcaagttgtattaaaatggagagtaggatctctctttccccctcccctcccctcccctcccctcccctcccctcccctcccctccagggggagggtctgcttctgccacccaggctggagtgcagtgg

SEQ ID NO: 49821 - DNA, 440 bp, Homo sapiens
cccagcttctcttgaataaattggaaactgagcatcagagggcctgcattctcaaagcatgacaatctaaagtccccctttagaagactgttctgctgcctagactgcgcttttaccttcccaacatcctgtaccaggcccacttttccccttcacattactgcctgacctttgtaggcagtgggacttgtaatcaggtcctgaatgtttcccaacaatgccctttcactgcgtagtactccctgcggtgggtcaaagggattcctgcagtgttgcaacctgagtaggaaaagcggatgcagccccgcaaggtgacctgacaggcctttgggaatgctccagaagaaaaggttcacttgaattcaataaggaaaccaaggaattgctcaggtaagtggttctccacaatatgaacatttgaaatattgttaagtgttctg

SEQ ID NO: 49822 - DNA, 3015 bp, Homo sapiens
cagtgcatatttgtatcaggcctttcatgactaggaaatttcctgactcatatgtctctagaacaaatactttttatgctagtataaaatggggcagaacaaaaagaaattgatgtacaaatagatatagcacaacagaaaattacaagaaaggaaacaaaataattaacaatgttattatttttagttatggggattaaaatctgttaactctgaacattcgagcaaaatattgctcttaattataaattacctatttgtgatattttgaatccttttatcttttcacaccatgaacaaccttacacctttaagcattgtgcatttttttccccagtcttatagctgagcattaattgtctgatgattttgggatggatgactgaaaactctcagtgcaaggtattgaatgtggtgcctcatgttaagtgatcattttcacgaatttttatttgacacccagtttctgaaagctctatgtttttaataaattccttggtgtctcggaccctattaaacaaacaatactaaatcctgaatattttatgagcaaccatctgaatattgctgtctgcataataatgaactttaaagtacccgtatcccctgtgttataagtcatgtgatctctgacagtcatttcaatagtttttaggctgagactagaacctttcaataaattcaactgtggtatgctgtcccttatggttacatcatgactagggtagagccattggaatgccaaccaaattttggtgtaaatcctttatgtacttttgcaagattctctccaagacctcataccctgtctaaattctttggttatgaatcacttccttcagtaactaagcaaatatttaaaaagttttgatttggtgttcaaagaactactactaatgtgaggtgatatcttcttgtgatttttcttagcatttctctggtaattagtgatgcttaacattttttcatatacctgttggccatttgtatgtcttccttggaaaaatatctatttagttcctttgcccatttttaaccttttttgggctgagctgtgggaatttcctgtatattttgaatattaatcccttaccagatacatggtctgaaaatactttatcccattctgtaggttgccttttcatttcattgattgtttcctttgctgtgcagaagctcaaaaaagtagttttttaaaaaaaaaaaaaaaactactacctatgtcactatgttctagaattaaagccttatcttctatctttctatcttcactggtgagaactgatccattttctacaagaaatgaataaactatcctatccctgagaaaacatcaatattgagtaataatctgacgtcactaaccacttcattaagttcaccttgtgggggataagagattaattttagcaattttgtatatcttatcttcgtgcaacacctgatccctggaagttggccaccttgtgttggtcttggcttactgggccccttgcatgagataggcagggaggaagcatttccacttgacactctaaaggcaaaagggcaaattacagaaaacaaactcaaaattgttcagttataaaatgtctatgaagactattcaaaatgttcaagatctcatggatgcattccactgaggagaggtgagtagagttgtgtctgagatgtccagaggaaaaacccaataaacaaaaagaagttagatggtggtgaacagcagtcagaactcagacatatatttcatatggataaaaaaactttctcatttcttctgtaaaaactactaaactgaataagactttaagtctaaatactgcattaatttccttcccctatttaagagcagatgtttgggagaagaaattatattccaataaactgaattttaagaatgtaacttcttttttccttgatttccctgcacagctgggtcccactgtggtcctcatgcctggatgcattgttcaagcagagtttggatggtgatttggctgagacattctaggtggactttatgttcagatgggtgggttctccatatgccctacgaatcatcttctaatccttcatttccatgactggttatttctacatctttagtgtggtccttggaagctcatgggtcaggaaaataaaaaccagacatgggtgagtgagttcattctgctggggatttccagtgattggggcattcaggtatccctcttcgccctgatcctggccatgtatttggtgactattttaggaaacaccctcattcttcttctgatcagactggacaacaggcttcatacccccatgtacttctcccttagtgttctgtcatttgtggacttttgttatacaaagagtattgtcccacaaatgctgtcccacttgctctcagcccgaaagtccatcccattctacagttgtgtgctccagctctatgtttctctggcattgtgtgggtctgagttcttcctgctgggggccatggcctatgaccgctacgtggccgtgtgccacccactgcactacacggtcatcatgcatggagggctgtgcctggggctggcggccagccgcctggtggctggcttctcaaattccctgatggaaacaattatcaccttccagcttcctgtgtcacggtgttatcaatcactttgtctgtgagaccttagcagtgctacagctagcctgtgtggatgtccccttcaacaaggtcatggtggccatctcagggtttctggtgatcttgcttccctgttccctggttctattctcctatgcttgcatagttgccaccattttgtgcattcgttctacccaggtacgctgcaaagcctttgggacctgtgcctctcacctcattgtggtttgcatgtgctttggggctaccatctgcacctacctggggccacagttggcctcctcagcagaggaagagaagatgattgctctcttctatggagtggtgtcacccatgttgaaccccttgatctacagcttgaggaataaggaagt

SEQ ID NO: 49823 - DNA, 1982 bp, Homo sapiens
attcaggcgactactgaattctcctccacctggagattacttcaaggctgcagttaatttgcaacccagttatactcaggcgccagcccattcaccagatgaggcaaaaacccaagataaatatctgagcaagtcacgtagactggggcccccgagccccaataccaagcgcccctttataagctcttacattttgtccaaatttgaaatggtttcgttaaggcagaagcttggactacttccccattgctagctttggaaagtagtcactttcctttccgggcccttcgtccttgttgattggctctgcaagcagcgagcagcccagcctgaactcggttacacagtaatttcaaatcttagaagaataaaatatcctgagtgttatatagatttaaaacacttgatataatcatttgccaatcttttattagataagctcggggcactttcaatggattaaaaatgcatcacggtcaggcaacgatgaccgtccttaatgcctgcaatgtctaatgttccgctatgttccagatttgttcgcgctgttggtggaggcgcaacagccgggaagcgcttactgggctccacacggactacacacactgtatcttgtcatttcgtcctcacagcaaggactgatacgtaagctcatttttcagatgaggaaaatgagaccggcgagaggctgatatgcttagcggtacagagctaggaaatcagggacagaacccaggctggaagtcacgctggctctagagccccgtcctttcgacctgttcccgtcgctggggaggggcacgtcagtgacactaaaccgtggaaagaaatacagtaccagtggaaagcaggggctccaacggggtaaaggcatgctccataacggattattggcctctgcattaaaaaaaaaaaagtgaagttagactctcagttttaattaaacatcgcgcagaaccaacagcacgggagccgcctgaacctggcactcggcagcggcgcgctccgggacccaggagccagctgagctgcggcgcagcacccggcgctggggacccgccacggctcgcctacagcaccgccgcgggcgggggcccccggagaccggccgcgcgggccgctatgaggtccgaggggttgcccctgccgcctctctccgcgaacccatcaccatccgggaacctggggagcgagaggcggccgcccccttccgcggcccgcgcgcccggcagcagtcgcacttacacaatggctggtaggagccacagactggagatcgcaggctgcgggagctacggcgatcgaccgctcggcgctcggctgaggagccttggcgcgcggtcctcgctcgcaggttttagcccccgggacgcgaggtggccccgcccgcttccgggagccggaggcaagtgggagccgcgccctgtgctctgcgtccggcactacccacctcaagtctccaaggcttcgttttctgggctggttctgctagctgtagtactgctgccgggccctctgcactcagctttaacaaggaggccatttgcttcaaactaagtggcgaattccctatcacccatgcttgacctagcttccaagccaaacttactttccactgtgctgcttctagtcctgctaccggtgtcctccctgagccgtcgggttaaaagctttccttcctggccgggtgcggtgactcacgcctgtaatcccagcagtttgggaggccgaggcggacggatcatgaggtcagaagttcgagaccagcctggccagcatggtgaaacctcgtctctactaaaaatacaaaaaattagccgggcatggtggcgcgcgcctgtaggcccagctactcgggaggccgaggcaggagaatcgcttgaacccgggaggccggaggttgcagtgagccaagatcacaccagtgcactccagtctgggcgacaaagcgagactccatctcaaagaaaaaaaaaaagctt

SEQ ID NO: 49824 - DNA, 706 bp, Homo sapiens
aaaaaagcacttgctggtatttgtctgaaaagtgcaggaaacttttcccattttttgatccaaaatgagtgtccagcatatgacgagctccctggatggcccagcagaagcacttaagccacatgttgatctgaagcctcagccagcccaggtgttcggacctgggctgtccgtgggccagatttttcttaggcggtggagaaagcaaacaagctcatggtcattgtctaagcatgaacaatgccaggctggattgagcaaagccagctttggcagagacatacaaggagtttggagccctgacagctgatagcagcggcaggagtgggagaaggcaagatatctgctgggcccccagcctgggaggctggctgccagcccagggcatggccaggagctggcaagcaaacaccactgcggggagccaagcaggctgttcaggtcagggagctaggacagggttagcatgcagcaagctagacactagccagagcatgcaactgctcttggcagtcattaagggaggagatcagagttacaagatctggaggccatttcagacagcttcaggaagaagtcaagctcctaagtggctccttgacagaggctaggtcatcttaactcatgacaaatgtccgtgctcaatttacttggctctggcctcttctgatatctctctagaggttaaagggaaccatctcttttg

SEQ ID NO: 49825 - DNA, 792 bp, Homo sapiens
ctagactggcctgcaggggactgaccctggtggacgcctgagtctatgtgccaccatctaccctgtgataagtgtagctccgacatgatgtacctttgcctgttgatttccaaggacaattattttagcatttcaaaattcagctcaagtgctggacgacttctccctgagttttgctgtttgccagcagcctcctcttggcatgctccctttccaacatcctcactgaacttgttactattaccaccatgtacttagagaatgcaactatcaagtgctattgaacacaccttgttttgtaaaaaccctgttgtaaattgcctccttattcctctgttccatggccagtcaaatcacaccctcatgtaaatagtgacaaagacatattacccaacttcaaattccagacacctgagtcacaggtgttgttaccactaccccaaaccacaaagtgggattatgtgtctcctagaaccgtattataatagacactcactgtcttgcaaattgctcctaacttgggtagaatattttgtatttattacttttgaaaatctatgggtttctattgcctggaaactcaaggattacagcagaattagagaatctggtctctggatcacagatccccccactgccctgcaccgcccccacccctttctcatggagacctaatcatctccacactggatccactcacatggatcttctgaccttgatccagagtttacaggtaaaatgtccacctgaggacactggtttctgttttgacaaaggtagttagggccttgg

SEQ ID NO: 49826 - DNA, 720 bp, Homo sapiens
tcagagccctccttgtaggtcaacagtatcaaaggtgcttaacgcagatacaccaggaggctcaaagcccaaacatcgaaaaaaaaaaaaagacccactcttgtgctgtgtgtattgcccacgggtgggaggatgcaagtacaattacgttttttaaaactccagtccagatattggcttttccttggatacttttgtgtggctctcccagtacagtcagatccgccgccgcagcctagcgctccaccccgggttttgcgtcctcccctcacctgcctttcagtggtgcggggtttgatcccgagagcggtggactcaaagctgcccgccgggactcgggctgccggccgacaaaggacggtcctcgggggttctgaagtctgacccggccagtgggaaagccacctgcatcacaaagcgaggggcacacctgaaccggggctggcgggaagaggcaagtattgcgcgcgggctggctcccacatggagctgcctcccggtgcaagtgttgcaagggtgcgctgctccagcccggggagcgcgggaggcggcggagagagcgtccgggtgatgagcggggcactgtaactggattttaacacctctgcaagcagcgcttttggtcaaaaaatttccgattcttgatcttctctctgcaaggtcgggggttctttggggagtaaatcacagcgtttgggtttgcattcgaagcactaccaa

SEQ ID NO: 49827 - DNA, 2003 bp, Homo sapiens
aatgaaacacaatctcaaagcagttttaacaaccatttacattttttctgaaaacctcactctaccgtttctatggggtccctgactagaaatatcaaaagtctacatgaatataaaacaatatagtctatttttcaaagagaaattgagactgatgcaaaatatttgacttcttttttttttatatgaaacataaatgtttattcattggcaaagccttaacttctctaagcctcgtttccctcatctgtcacttggcgggtaatcctatttagctcagagggttaccaggagacttaatgggatactgcataataagtactaagcacagtgccccccatcatgtactgcccttggtctgtgctctaatattgaagcaggatgcttccctgaccgctttgtgggacttgcaacaggggtgccctcaattacccagcccacagctttcaactcctcatgggaggaagcacgcatgtgaatgaggcaggaactggagtgcatgaatgctgaaaccagccagccacttaggtactgccaggagcaaacgccactcacttggacccactgtgctccaccccttgcaggggtaagcacgcgggtgagtgggtgcaggagccagggtgagcgcttttgagcgccaacaggagtgaactctgtgcaggctccgtggcagcatctaggggtggtgcctgcaacccctgaagccccagagggcatgttacagtgcttttagttctgctgtccccagacagcctaagtatcaacagctcagtggcttttcacgtaagctggctgccttctgccagtgagtacaaagggcaagtgtgacagccttttgtagccacactagcagcatccgagctcttgtcccacatccaggagaaatgacatcacacaaattgaaggatgacaaatgtaggggatttttattgccgatgaaagtggctctcagcaggaagggaagttgaaaaggggatggagagggaaggtaatcttctcctgaagtccagccatctctggccagattcttctctgatgttacgtgtcaagctgtccctctgaagtgaagctgcttctctccaatgtctaaccatagtcaccaacgtccagctgcttctcttctctctgccagctgagtatggggtttttataggcacaggatgtcagggggcaggcccatgggtggttttggaaaaggcaacatttgagctggaaaacagggatgtaagttctcactttgggctgcagtttctggcttgagggtgagggtttgacagggacccgcccctttctgcctagattttctctgccacctttctctaccattgtatcaatattattatcacatggccctgagttggaaccatcaggtcctgcaaactccagagcatctacttactgcacattggcccccccccaggggaattggtcccagccaagggtctctaggaaagaggcacatcaactagatgtggaacacactccggttttggaagtactggttctgttctccagggcatcagaatcctcctttttgtgaccctgctgccttacaggaaagaaacaacagttgaaacactgggaattttccccaatagggagaaggcacagaaaggagaaagctaaagaagagagtgaaagaggcccaaagagaatggaaaagtgagagcaggccatttgccagggctcattcctgccatccagccccagcttctggctgctcagtggacgcttctgccaatgctcacagccccacaggcctgggcccgggagcctctgctgccacccgtggtttctctccctgttccaccatcggaaccccgtgccccaggctctctcccttgaggccacctcagaaggagataccaaggggaagacagctctttaagaagtgtagactccatgttaaattgagaccccgcagacagatacggctttgaaacaattgattttctgtggtgtcatagggaaacctgccctcctcaaagttgcgaaaactgtca

SEQ ID NO: 49828 - DNA, 455 bp, Homo sapiens
agccgagatcacgccactgcactccaacctgggtgacagagcgaaattccatctcaaaaaaaaaaaaaaaaaaaaaaagacccatcagtgtgctgtattcaggagacccatctcatgcaaagaaaaacataggctcaaaataaagggatagaggaatatttaccaagcaaatggaaagcaaacaagcaggatttgcaatcctagtctctgtttaaacagactttaaaccaacaaagatcaaaagagacgaagaagggcattacacataacggtaatgggatcaatgaaacaagaagagctaactatcctaaatacatatgcacccaatacaggagcacgcagattcataaagcaagttcttagaggcctacaaaaacacttagactcccacacagtaatattgggagactttagcaccccactgtcaatattagatcaatgagacagaaaattaa

SEQ ID NO: 49829 - DNA, 693 bp, Homo sapiens
ggctggtcttgaactcctgacctcaagtgatccgcccgcctcggcctcccaaagtgctaggattaaaggcgtgagccaccgggcctggccggagcaagtattttggggcatcagagatgcccagactcctcagtttatacttgggaaaatgttgatttggccaaaaggcaagtttttgagtcaggctgagttttaactctgccctttggcagctgttcattgtcgggcaaggtacaaggctgtttccttatcggtgagacctagaataatattgccaacatttagtgtgcagtaaggagcagctgatattcaagacatctaaaattcctggcacacaatacatttccagtaaatgacagcttttttttattatttctcagaagaaacagcaccagcatagctctggacaactccaagtccctccccttagtgcacctcaaacctctccctcaacactctaactgcccttagtcaatatattattaatgactccaattctgtcccttccggggatgaggatgtagtgaaagaattggccaaggtgattaataaaaaaccatccgactctccggttctctggacaacagtttaggcaaggcagacccagcccgaaggcccaggtgctgggtggtcctagcaatgcccttgggacccagccagaagcacagaggggtcggagaaataggattgagg

SEQ ID NO: 49830 - DNA, 1335 bp, Homo sapiens
ggagggtcagaatcttgtagcctccagctctgtgactcctaaatcataatttctaaccttgtggctaacttattagtcctacaaaagcagtctagtacttaggcagaaaggggatctgttttgggaaagggctgttagtgtctttgtttcaaagttaaactataaactaagttctttgcaaagtttggcctatgcccaggaatgagcaagggcagcttggaggttaaaagcaagatggagttggttgggtcagatctctttcactgtgataattttctcagttataattttgcaacagtggtttcattattatttctacaaaccaagaaaaaatttattttaaaagtcaatgtcattccactccaactacactaactgagccataacagagctctctaaattagtcatctgtgtacacgtggactttggtttttaacgcatattggaaatgtcatttcctttattcatcttatgaactgaccccataaaattcttcatatcaaacagttctcaaccacgtgggctaacaaagcagaaagtaaaataatagtcacgttcaatcatttatttggcccatgtgattaaaataaacattgtaaggcctggatttatatagcctttaaacttttagacagaactttcacatacattttcctgtaagcttattggacaggtattgctattctggttggaaaggttcagaaacaaggcacaaataagtaaatattttagatcaaacagtatcagaaaggatttgtgtttaattttcaaaaacaagtacagttgattctcacaattcatggtagttatgttctataaagtcaccacaaacactgaattagcaaatacttctcttaggggaaacacagagttataggttcctgcaagacccggtcaagtttttatcaactaatcactatataaccttgtttttttgtgtgtttctgtataaagacactttatttcttatttaacatacattgttgatttatcaacattgaactcatggttagtagcactgtagctcatgcataaacaaagcttatctaacacccatattttccctggaagttacgtcacacagcctttttgtgcctaggaacactgaacagcacccagcactctgcttggagccattttatacagtaaaatcaccaacaaaaagcacaacagtgcaacaacaacaacaaaaaaaaagtgacacaaaaaggactttgtttatgttatgagagctggctatgttctgaatgtttgtgtccctccaaaattcatacattgaaaacctaaccccgaaggagatggcattaggaaggggggggcctttgggaagtgtat

SEQ ID NO: 49831 - DNA, 1034 bp, Homo sapiens
acgtgtccagtctaaaatatcagtcatgctgatgctgagatattctggcctccaatgctgacagaaaatgaaagtttgacaatttgggaccacatgcctgagccccaggccagctgggcctggagaacactgaattccctcttgagcagctgagagccaagcccaagcttgcatggagtatttggaatcagctgaggcatttgaccattttgcaaattcaaccaatgtttattaagagagtgattgggttatttccaggcaaactctcctccttttttaaaatttgaagtttgatctaaaagtgaaagtagcacaatacaggagaaagggcccgatcctgacagccagttgaaactgagtctgaatttcagagtcatcattttctcaataatacgtcttcaggcgggttacttacactttccaagtctctgtttcctcccctaagaaatggaggtgatcttgccttgtcttaatagtgttgttgtgagagttaaaacaaagcaataagtaaacagaagaagaacactggaccacataggcactgaatggatgagagctactttgaatttaatcattctgttaggaactggtcaaataaacctttggcctccagcatcctgccaaccatctggtcattagtctcgtgcccaggcttggggggaagttcataagggtgcatgaacttcaacttaccaaggagaactgcatcccaaaaatctcatattacactactctgatttctggcagaaaagaaaatggagcacatagtaaagaagacagagtacacacacacacacacacacacacaaggtcacagaggtcccccctgccgccaccccacaacttctggatgggctgtagtgaagccgtagcatagggaagcccctggccagggcagaaggaacagctgtcacacggctgagatgatgctgtcttctaacaaggaagccctggcacagccagatcaaaggagacattcttgtcctgatgaaagcccgacgaagcctgacaggtaaactttggctcttccagct

SEQ ID NO: 49832 - DNA, 772 bp, Homo sapiens
ccagccgacagcaatcttttattgaaccagagctgctctttgtggatgaggtctaactcctatacagcgtgctcagagtagcagatcatgggatgttggcagctgtacttatgcccacttttaattacatgcaaattaaagggtggattattcagaaatctctagaaaaggggcggtaacttctgggtcattgccctggcatttgcaaacagtcatgatgctagtgggagtgtcttatgctaatgagcagcaagggcaatgagtggttgccttcagtgccgcctgctggttcctacttcacttcagttgggcgccatctgctggttgttgccagtttctttacttcatcctgtcagacccgctagtctcctacctcatattgattgatgtctgcctgtaacctctgtccccttaaaatgcataaaatcgaactgtaacccaaacaccttgggcatatgttctcgggacctcctggggctgtgtcatgggtcatggtcctcacatttggctaggaatcaattttttcaaatattttacaaagtttggcttttttcatcaacaatttttattttaatcccttttgaatcatcgatccattcttgtgcatagaggatatgacataacagcaattttgaaaaattcaactttaacaaacaatgatgtgtaaactatacagaaagatatcggaggcaaactgcctcctattaagtaatgctaactgacatgagctgaccaacaggttccttgcaccgcgtggtcagcccctccgtcc

SEQ ID NO: 49833 - DNA, 1025 bp, Homo sapiens
ttcatattgattattaaccttgtcttggatctcattgagcttcctcgtaattcatgctttgaatttattagctatttcttcatttccattttagttagggaccatcgctggaaagctagtgtgatcctttggtggtgtcaccacattcggatttttgatggtgccagaatttttatattgattccttatctagagatgctggcacttctaatttttgtaattattttcatgaaggtaggattttttttcttttttcccccataatgttatttttttgttgttactactcttttctttctttctcccccaccctccactctttagtgggtgtgactatagagaatgcttggtgaggtcatttggctttgcttctacagccctatgcacttctgtcagcaggttttatattggactatgcagtttgacctacaagctgtagatggcacttataggtaagagcctgctgctgccaacatgactgggtatatacttgatccttgtttactgggagaagtttctctgttgcctcaggtaatgcgctgatttgtggagtgcacaatggtctgactccctgctcagccccttcatgggcgggggtagggagccaacactggtgaagccagaccaggcaggtccacctacggtccctgatggcaggcacaagcaccagtgctaactgagaatccagtaagctgttgccaagtgcccaaaggcttgcctaggcagggagttgggaaacttccttgaccccaagttctctgcacagagatggaggcagcctaaattcctaatccaggagagtaggtgctccagatgcctggagatctgcctgggtgtggaacagagagggcccccttgtaccagggtttctgcccatgaaggatatggctcaggctgatccagacaagcaagtgctccgagtgcctggatttctgcctaggggtgaagcaaagagggccccactgcaccatgatctcaaaggagcagttggggcacacagtaatggcacacacagaccaccaagg

SEQ ID NO: 49834 - DNA, 1594 bp, Homo sapiens
aaagacagggtttcaccatgttggccaggctggtctcaaactcttgaccttaggtgttccgcccatcttgacctcccaaagtgctgggattacaggtgtaagccactgcacccaggcagtgactactatttataatgcagtaacttggatgggatcttggaacagagaaaggacattaggaaatctgaataaagtatgggctttagttaataataatatatcaatgttcgtcagttgtgacaaatgcaccatattaacataagcttaataataggaaaaagtggggatgaggcaagtagcaaccctctgtaccataagagttaaagaaaaaggaaagaaacatgaaacgtgcttaacagtcaaagataggtttatttttgtggaaaaaaacctgagaggggcttctggccaatttcagtcaggagcaccctctcttacagactaagagtatatattggttttagggtgagggggtttatcacaagcttggaatatgttcgtgtaggggagaagtttatggcagggttggaatgcctctgggtggaggggaggttatctttggggctgacatctttctggccagtgggaaggttgtctcagggctggcacatctctggtcagggagggatttggaatgtttctggtcagagatgtcatttgtggtttacagtcataggctgatcccctttggatttaggcagtttttgatcaacgtgaacttaaaatgacagtgcttgtccaagatggcaatactcctgctctgtcatgtattatcttcacaaattttgtaaatctaaaactgttttagatttacaaaaaaaaaaaaaaaaaactgctttaaagttttaaagattttatttttaaaaaaatgaaaaaaatgttagcataagagccctaggttatacaaaacaagttaatatcctgcaacgcactaaagcagtaattataaccttttaggttatcttttctaccagacagaattgatttgcatcactgccagacaaatacctcacgataacatgtaacttcacagacctcggccctttaatcattaatagatcgcgggacaaacaagaacattgccctaaatatttaaataatcttcagatagacctattcaacaatgctccaaaatgacattggaaggacacgccttcctccttgagccttatttctaagttttgaatataaaatgagcttaaaaaaaatcttccaatagtttgccttctgaatatatttagacattctaaaatagcagacaattcaactttaacctaactttttctacatagtgagatattgctgaagcctggggagcaggattttcaataggggtgccaggtttagcaaataaaaacaaaagacgctctggtaaattcggatttcagataaagaacaaataatataatgtaaatgtaataaacaataatttttagtgtaagtggatcccaaatatcacatggcttcatattattatttctttgggctcgtccagtactaatactctatgaaacatttccttagcaacaaatcacaaagatagcagacacatttttttctacatgcactttgaatccattcatattttcagctt

SEQ ID NO: 49835 - DNA, 954 bp, Homo sapiens
ttgattttgttaggaactggtgggagctggtagagatagcgattttttttaatactttttaaaatttttatctatttacttattttgagaccaggttataagactggctaatttttatatttttggtagagaaggggttttgccatgctgcccaggctggtctcaaactcctgggctcaagcgatccacccaccttggcctctcaaagtgctgggattacaggcatgagccaccatgccaggctgagacagtgttttaaactgtgctattgatgttctagggaaaaggtaaatcatcctgagataacagaagtcttcgtaatccacatgtaggtacgtgggcatgaagtaagaaagctccagaattctgttgaggccacaaggatttccagaactgacagcagttaagaattttgcagaatctaagagtcacatctctaaatttgtgtagattgtgaaatctcttcttgcaagaaaaaagagaaatagctgaagttctggaaataacagttgatgaaaacttggtaatctgaagtctgaactttgaacaccagcagacaggctgagaattctctttgatcatgagcccaagttccacgtgtacctgcaggaatctgtgtggcatttgtgcactggtgtggggcccaggagaggaccacggagtgacaagccaccaggttctaaagggagacgaagatccccagaggacctggatagagatgtttccctgaccattgtctgctgtgtgctcccgatgatgagactctagagtttacaactgaaacacactgtcatttatgatattatttgtaatatctggtatgtctaagtaaaacatgcattcagtaaaactcgcgatgaaacttatctcattgtgtggatttcattcttctcaattcttttatgttttctggggttttttctagatggagtttcactcttgtcgcccaggctg

SEQ ID NO: 49836 - DNA, 2036 bp, Homo sapiens
atcccagctactcaggaggctgaggcaagagaattgcttgaactcggagggcggaggttgcagtgagccgagatcatgccactgcactccatcctgggcgacagagtgaggagaaaaaaaaaaaaaagaagcagctcctattctatcccctgaacccagcaaaagcttctgtttctcagaatgtgccattaacgatttccatgagtcctagatttcgggattctccagttcctctgatattacaatctggcaagaggtttggacaaataggacatatttttggttaagtatctgttgacggttctatagaagtttgttctaccattcttgaagcttttctgtaggtttgaaatttttcaaaataaaaacttagtaaatgagtaatccaagactctgtccatattctttttcaaaccaaatcagcctggggcactatttccccagatgaagattcttgacacctctcaaggagagggagacattccttggagccatcagtggcacccaggaacaaaaccaaactcagccctaggatcccccttagagaaacaaactgcgcatgccaggagacagaaggctccttggtggatgggctgtgatcagcatccgcccttccagctgcccctttgactcaagcacaagcacttcatctttttgctgtctcccgtgaaaccccactgccacaatagttagcttctgctctagtaagaaatgtcagcagaggcttcctggctgggatgactaagagttaatttagcgttcagctgggcgttgcccagtccccttgtctggttctcacctctgttgtgtgtccagtctgctagctgttcactcaccttcctgctgacttactgccttgcctcatctggccttgccctttagttcctggaaagtccctggctcctgactgttatctgaccttcgacctactgcctctcttgattaaccttcagatttctgcctgcctgatttcaaccacttccttgaactatgcacatattcctgatattaaagcactgaccatgacattcacccatttcttagggtctgaccaaccctcagcacctccttgagttatgtgcacccagcctctctccagtcttgttaaatgtggcattcacagattgtccagccctgcagagctcacttaagctatcatgtatgtttgtaacatcggcattagaacaaacccgacattcacaaatttggtcctgaaactccctgacctttatctcacatctggttctgtatacatcttttgtgacttcatgtgctgcgacacctggcatttttatcctcctcccattgttcagactttccagccccagccccccacctcctaagaggaaagggggactagaggttacactggtcactagtggccaatgacttaatcaatcatgcctatgtaatgaagtttccgtaaaatcccaaaagaagagaaagtaaaagtaaaataattttttaaaaagaatataaaaattaaaaaaaaaaaaggacaggttgatagagcttccagatggccaaacatatggaggttcctgtgtaactgcccaacaggttcaccttgcccactcactgcctagacagagccaatttctcaagacaggggaattacaatagagaaggaggaattcatacagagccagctgtgtgcaagagcagttttattattactcaaatcagtctccacatctggtgtcagaagtgatctgtgttgtgagagcatagtaggagaaactgcttttgttttctcctctatcttgtcaggagcgtaggaatggagtacattttctatttcccaggccaggggttaagctcactaacacacaatgagcagctacaaaatgattttttaaaaatcaacaacccaataaaaaagttggcaaagtataggtaggaatgaacgatttacaaaaaacaaaatacaaacggctctaaaacatataaaagatactcaacctcagccggacgtggtggcccatgcctgtaatcccagcactttgggaggctgaggcatgaggttaggagatcaa

SEQ ID NO: 49837 - DNA, 1795 bp, Homo sapiens
cccactactagcaatttattttatgaatattcccatgtaagtgtgaaatgatcagggataaggttatctattccaatattattagaggatattctgagtatattcaatatttgataaagtaaattttaaaataatttaataaaaaccattttattaaaatattttattgtggtaagaacacctaacgtgagctctaccctcttaacaaatgttttaagtgcattacgcattattgttgactagaagaaaactctgtttttgaaataataaaggaaataaattgttagaaatacccaagaggaagattctgagagtgaatcctgaaaacactgtcattttgtaactccggctctccatctgggtctgcagagttttaaaatgcattccccacaaaagcctgagggctgaatgagaagctacttctccaaaagcctgtatccctcaacaaacaagctcgcccctgtggcaaagcacaccctctggttttactgcttacgcagagccgttgcttaattgacagatggtgccgctgtgaaaatacagccatgtgggagagaaataaatcaataagaaagaagactgaaacactctctccagattcttttttattctagtgaatgtgaatcaggattttctaataaaaatcaagttaaaaaaatttatggcaggtgtgctacatattgagcggtttcaggacaatatcagaactggctgtggctacaatgaaaaacattttacaggctgtttgtaaaagctggtcaccccccagcctggccaacacagtgaaaccctgtctctaccaaaaaaatacaaaaattagccaggcttggtggtgcgcagcctgtaatcccagctactcaggaggctgaggcaggagaatcacttgaacctgggaggtggaggttgcagtgagccgagatggcaccactgcactccagcctgggtgacaaagtgagtctctgtttcaaaaaaaaaaaaaaatgctggtcacctcgatctttatcgcaatgaagaaaagacaacacatgttttaacagccttcatccccctaattagcttatttttttagcatgcagttaatttgaaaactttatttaaacgtaaattgagtggatcagtgtggaaaggtaagtcgatacacagcagattaaagataacaaaaagaaacaagtgacctatattttcagaacttttccagaatgatcgtttgttttgtttgatcagtgctagagaaagaagtggctggaagttggcaaaagaacaagtgggaaactgtaaaacggcctgtctgaaatctgttcttttttgtggttatttgggccaggctgactcctcattgccagcacttctcacatcaagcacccggtccaccacaaatatgcacatctcgtcacatgccggtgacattacatgccctccagtgggtaagctttcttcactttgtctaaatcttttggaattacagcaaccaattgactggatgtgatggtttctataatttttcatctagtgactgagaaaaaaaaaaccctgacgtttgaaaagagccactttaaaaagttgtaaacaagcatgaagaggctttcctgggtcattagctgatttttattttgcaaaatgcattccctggagactttctaagaaactactgtgcttaataccaaactcataaaaagctagaaattagctttaattgtttaaaaatggccatcaatcatctaaagccaggattgctgtaatttatgaaaatatctttataaagtatttaagatattgtggaataatatatagttat

SEQ ID NO: 49838 - DNA, 3339 bp, Homo sapiens
cgtggtattaatcagccacccctcactaggtgttggggttccaccacgcttcctccaccccccgtcaccacagcagcgggtagtatttaggttgaatattccaaatagtcaattatgacagttaatttcaaatgagatgacttcgaagtacacgtgaaaacaatactattttatatcacgactcatgccatccgtatgtgtaatcaaagccttctaagtcttgatatgtccttacaaagacgaaggatagagtgaatgtcaaaatttgccaaacaggagttactgaaagtctgaaggggaaagcctagttaggttttatcttagaagtgatttttaaaacgaaacacgcagataagctcgagctttctggagccgattcctaaggccttgcaggtggtaagggggtcgagaattggctgaggttcctcggaagtccgcgccgattcggagggccacctctgactttctgatctggggtgcaacccccagtccctgtcccggtcgacaaaggtgtggagtcaggttccaggcaagctgggggtgggggtgcgcacaagggaggggcaggggactgggaccccctcttcttcggggtgcttcgggccgtttctccagaggctggtggtgtccccgacccaagcagctcagccccgctcgcgaggtccgaagtggcgggaacgggtcctccgcggcggtcccaaggcgagggaggctgtaaaacctggcagagaatccggcgcgccgggtcggggatgtctcgggtgccgggggcaggggccgcaggctcgcaggtagaagcttccccacgcgagcgggggcctcggccgcggaaggggcgcccccggggccgccggcagcggcgagcgggcgggagggagctttccgggcccctcccgcgcctcgggctggcggggcgatggcgacgacggtttcccggctcccccgccccggacgccgatggcggtgcgttccggccctcccccaacagcttctcccccgcggtcgccggagccggtgaggccgagagggcggggagccgcgcagggaaggcgagagggcggaggttgcgtggtgcaggcggcggcggcgggaggaggagggccgggcgggcaggggaggaggaggaggcgggcgccgtgtcgcacgcagctccaggcggggcagccccggtagctgagggacgcagctagaccttggcgggacggggctttcgccggggcccaggcccagggaccaggcggaggcgtcgcgggagcctttggggcaccacagagatgcgggtgagtgtcggcagccgccggggccgagaggaggtggcggcggcggcggcggcgcaggcccggccccgagccgcggtgtcgcagtgactcgggccgcgacggccgaaaccaggcgcctggcgaggcctgagccgccgaaacgcggccgggcagaatggcggccgggccgggggactcgtgggcggaggacgccgaaggtggcagaggagcgagcggggccgggccctgagtcaccccggacgggccggggcggccaggcctggactacgcactgggaaaaagcacgattcatcgcgcctggaggcggcggcctggtggcgccggcccctttccccgccgcgaccgggctgggttctcggagggtgggccgacgtgtggcccggggcggctcgggcgtccgcgcctcgcctggtgaggcgacctccgcgggacgccgggacccgtgcccttgccccctcgcgcccacgcttcttcccggcgctgctttccggccgacgcgtgttcccctgtgagctctgggctcaagcgcaggagcagccgcggagccgggctctctcgctttccggttccctgcccgcggctctcgggttccccgcctgcattgttgcgaacgtgcagggcgctattattgggtaacagtcgcccttttgccccgttctcctgggagagcgggccggggcatgcgcgcagggatgctagcccggcggccgaaccggacagagccccccggcgcccgcctatcgctcgctagtcgggccgggccctgcgctgcggcctcggcgcgcccccggtcccaacgggagcgcgcgccctgaccctgagggtagccgtgcgcccgccaggccgctgggacttggggtccccagactcgggggtcgtcgcttttttttcccttaagatctgaaagacccccgtttctgccacccgtgcagtattgtgtagcgcagacataagataagaaagagaggaatgcttgtagacattccttgaaatgaatccccaaagttagggttttctccctggctggctttgccaaaaagaggattctcttttccgattgggtcactcttggttgcttctggttcgtagtaggggttagtggtaagtgcgcaaatactgaattgcagtctacttaaatatttgtttgctctgtgtaattgctctttcctgtagtagcattaaaatcgtcaaaagttctgagtggagtaaacgatcacactttttggaatgcacttaacgaagcggcagaagaggaactagattccttttttacttcaagccatgagcttctaggacctaagcatagcttaacgcctcgcagaagtgtgtgcagttttaagtttaacacttcatttcatggtgcacccgaaaatgtacccgattttctgaaatcctggagagtgtattacgtagtaaaatatgtaatgatgtttaaaatgtaaaaccagtcattctgtttgaaaaagatatttggagatgagatttttctttgtttaaagaaggtttgtttttggatattgaaaaatgttttacttgaaggttctatttgttgttttccatggtgagtcgaaatagttgcgttacatttcaaattccaaagcatgcaaacacaagactggctcgctttaactctattaatgcccatttttggaggtttcaggagagtgttccttaagcttgagagggatggctgaattgctttctaaatatgttaaactttttttctcattggcttcatcttttaaaaacgattttgtcaaaaaacaaaccaaatttagatatgctagggtttttcaccaatttataaaagcctccctccctgagagccacatgctcaggtccttatagccagccccaccccccactcctaatgtgtgtaccacatcagaagacagacacgcatgcctgagctgattctgcatggtttccttagatattacagttcattagactcttgccacttactgaatattatcttctagctgtaattaactacatgacagccttatttcccatacatttccgattgtgaattcctccagcgcaggagatattcctt

SEQ ID NO: 49839 - DNA, 2629 bp, Homo sapiens
cctacttctaccacctcatcctcattcaacccgtcgggatttggggaataatctggctgaatgacagttgatttcgttagcacctgtcgccattctcagatgtatcacacaagttggccaaaacagcttgtaatgtttaaggattacgattctttagaaagtggcaactcactaggcgttcaccaagttttccaaaagatcgtgcttctcgattcctcccgctttcaaaaagtaaccctgtggcacagatttttggggggaacggaaggggatgtacacaatgaagtgggaattcaacaggacgccctccagaaacacaatcaatagagagcagagcagctcgactcttccctcaaacttagcataaagccagaccaggcggcgagggcagcccgcgaccgccggagctcagggggatttcggggtgcgtcgtggggaaacgtcagaggcgaagctactccgagttccccgccgcgaacgtcgtcccgcgagcgccgcggccccagcccggggtcggcgcgcccgggaccgggggcgtgcgcgaggcgagggccgagccctgcccaccccggcagcggcccgcgcctccccacgcccctctcccgcccgccggcgggcccgggtgtcatgccccttcccctcgcgccgagccctccggagacacagtccgtcctttgtctgagtgcggactcggcggctgggtcccaccaacttgtgtctgtcccgtcccacccgggcgctcccgccgcggccgcgccacacaaaggagacttgaggctcgagctgccaccctggaccgggcaccggaacgccccgaccccggccccggcgccccggccaggacaagcaccgggaaaggagccccccacacgccccccgccccgcagctccaggggtgtgcgctgcctcactcgcagggtcccgcgggccagcccgaagctcacagctccttccggggaggggggctctcccctcaccctccaccccccgcacgcctacaaacgcggcgccccggtgagccccgctcggcgatacccgggaccggcacagcagtggcggggaggtcctggcgccgccgccgccgcccggttcgcactcccggagccccgccggccgggccgcccgcagcggcgcgttaccttcgtcccgcgcgccgactcgcgttgttcccgcgcgtcgcccccgcgcgccgccgccgccgccgccggggctccactgccttctgagtcccaccgggtgtcggacgcgaccggaccgagcgccaaacgcggcagcccaatcgccatcgcttttatttggcccccccagcccaatcaagcgccgccccgattggcgggacgcgaggcgggcgcccgtccaatcacagggcccgccgggctcggaggcgccgagccagccccacgcagagtgcgctcagggctcgtgggcgggcgggcactggcagcgcgtgcgcgcgcgggcggcggcggggttcgctgtaagggacgccactggccgtgtggaagcgccgccgccgtctctttgttctttcgctgaacacacggcgcctctcaggaaggcggtgtgcaggcacgcggggaccgggagacatcgcgggggcccggagcccgccgcggacgggaggcggggaggataggtggcgggaaccggccgaagggcgggacgaagcgccggcggctcttggcgggaaccggcgccgcagagttcccgggcgggggaggggcggggcgggtgctggaagccaagtttgaaccagttcaaaactcgggggtggtaacggttttaaccgccgcgctcgtttccccgcgcgcggagccgaggcccgggctggccgctcctagtggtgcccggggaggggagggcgcgggccccggaggtcggctcagctgtggcgccgcgtttgccgggagacgctcgcccggcccgcgcgctgccgccggacccgttactacttttttttttttctcctgagacggagtttcgctctggttgtccaggctggagtgcaatggcgcgatctcgactcaccgcaacctccgccttccgggttcaagcgattctcatgcctcagcctcccgagtagctggattacaggcatgcgccaccacgcccggctaattttctatttttagtagagacgggtcttggtcaggctggtctcgaactcccgacttctggtgatccgcccgcctcggcctcccaaagtgctgggattacaggcgtgagccaccgccgccgacccgggccctgtttgattatgtctgctgctgccttggccgttttttcccccaccgctggactttggctggccgagcttgcagtgcttatcgccctagaaacctgtgaaagggcgacattgctgccatttcagacccttccactgttcgtagttctaagcacgtgtcagtgttaaaaatcctttatcaagatgagcactgttcacttgccgcctctgcaaagtgtgaggatatttgcaaggcgcggtggctcacgcctgtaatcccagcactttgggaggccgaggcgggcggatcataaggtcaggagatcgagaccatcctggctaataacggtgaaaccccgtctctactaaaaatacaaaaaattagccgggcgtggtggcgggcgc

SEQ ID NO: 49840 - DNA, 2544 bp, Homo sapiens
tcactgtcagctctcttaatctttagaaatttttaagcttttagtaccatcgttttctctaggacaatttttaaacattttaatatcttaaatttgaggttttcttcattttcctgaaattatcaaatcaaccccgaaatccccaatatccaaactttttctcactaatcactataggttatgaggaaatcaccttgggcctttttctgaacaatttcctaggtttgtctttacaggaagaaagaagagtaagttctaggaaaaccctaagaaatattttgaataaaatgctttattttgcctaagtgcagaaaatctatacaagtttccccaaaaggaagtttttaataaaccaaaaaaggcaaaaatatccttagaaataattcagatgaggctgatattccaaagggcttaattatggaatctatttcatattttagtttcagagcgtaattcatatgacatataaaacacaaggttcggcctacgtcctcagacgaaatcttctccctgaaggaatataaattcatatttttgctagcatttttaaggtgcaaaatacttaagtgtgggtaatctcctctgtccttagccctttcgttataaacatttaaaacttctaaaggtcaccaatggcttgcactttcccaatcaattactgaaaagaaatgtgccaggctcacggtggattgagaaaatatgagtaattcatgggcgatttaaactgccgaagaactcccagaataggatttttagcacacacgggtgttactgggtggtatctacaagtattgggggaaaagagggtagacttatgggggtcacgtgttggactcctgttgactcactctcaatctctgatcagtagagacctgggtgtagacgatcgggatttctgggcaaaggggctcctgatgatgaaacaaagccgacaggtggtacctgcaaatccccggagagggacaggccggccggcgccctctccctccccagagcccagcatctgagccctcggcgtccgcaaagtccagacgctgccactcagccctgaaactgacacgaaacggacaagacaagctgccgcgcttcagccacaggcacgcgagtgacgggatttcctggatcattgacccgcggcccagccctggtccggcaggtcgcgggctctcagctccggcgaagctgtccacccagactaaagcgcaattgcccggagcccgcgtggctgcgaaccacgcgccgggtttactttcatatttagctaggcgctacccacaatgcatttgtaaaagtgaaatgcagaaaaaccttggttgattaacataattcttacaaactctcttaagagagagcatttggttttgttttcattgtgtttaatcaaaaagttttacacattttatttttacgatcatggcataggctctgaaaagtctccttacctagaaaagaccctaagtaggcactataaataacaagagactcacaggataacacagttggtccgagtgttgtgggttattgttaagttgatttaacattgtctccccccacaaccgcgcttgactagcttgctgttttgcactaataacagtagtagacaacgtttacataaatcaataaaaacgcatataaaagtaacctttagttgacggtttgaacgaaagagtagcttttagttgatttgaaaaactttcaaggaagcctattggttataagcttcttttagtaagattaacttcccagcagcgttgaagtattaaccttcaaaatgcctgagaagaaaatttacacgaaaggaataattttgttttaattacctttgaatgtattaaatattgtattcggtttttaataaaccttataatcaaggttacttttctatatatgtgaaaatatatatatatatatacacgcatacatacacatatacacacacatacatatatgtatgtatactttcccccccaccaccccgagacagagtcttgctttgtcgccaggctggagtgcaatggcgcggtttcggctcactgaaacctccacctcctggtggctcacgcctgtaatcccagtactttgggagggcgaggtgggagtgggaggggatcgcttgagttcaggagtttgagaccagcttgggcagcatggcgaaacccctgtctcaaaaatgaaaaataaaaaagttataaacagtttgttgctataaattcaataattgtgtaggtgtgagtgagcagataatgtacattttttgcataagtttgttcgtttgtttcacatataaaatatataggttttacaatctgaaagctataagaaaaaaaaatttaagaatatataggttcacagattcggatcaatatccaatttataaccagctaagaatggaggtgttcatcggtttcacctccctggcaaggcttcctcgctggcattcatccagcctttccgtctgcagttgtcagccagcagttgcttagagttgacactcagattcaatcaaaaaagtccaacacactggctttcttcattagcaaataa

SEQ ID NO: 49841 - DNA, 2626 bp, Homo sapiens
aactcgggaagcagaggttgtggtgagctgagatcgcgtcactgcactccagcctgggcgacagagccagaaaaaaaaaacagccaggcgtgttggcaagcacctacagtcccagctcctcgggaggctgaggcaggaggatcccatgagcccaggagtttgaggcttaagtaagccatgatcaggacagtgcactcaagcctgggcaacaatgcgtaaccttatctaggaaaaaaaaaaaaaaaaacggagctagaagtcccaggaggcctgcccttggccatgatgacccctgggattcctaggctcaccctaggagcaactgcttcccagggactcttctgtgttaaagacctctgaccggaaggataaacttgctggtcctaacagctcctaaagccactctcccaggcctctcaagaatccccccaaaaacagaatcactggatcaaaaccaagacagtgctatatgcttttccgctatgttccaaaaagcatcttccacccacactggtcctcaactttcactgtgcctcccgaagttaattctatgtctcaagggaaaactgacttaaaacgcagattccggggcccacccctgcattctgcttcagtgtattttgggtatctgtatttaaataaacactatttaaacaaacatgatttgggtaaaggtctcaagacacaatttgtaagcagtcccgctatcggattcctttcggcaggtgtttttctcgccgagtgtgggtttttacttccttttctatttgggcaaagactctttttgaatcagtgacccacgcagaagttactcaatctgtttgaaagagtataaagttcacgatttccctacacactaacattatcaaagagtgtatatttatattagaacaaactcagaaggttaaaaagctagtgattaaaagtaagggcagagaggaagaaggtaaagaccagtacctggatgccttattctctaggaataacaacttttccttaattagcacttcctaatcttcagagttcttatgtctgcagctagctcacttcgaagaaaaatgcagggaccatgaagtagttgttactattcctactggagtacgcgcttcatgggcagggaccacactcacaatcttttcctcccagaacccagtacagggactggcacacagtaaatgctaaatgcagaaggaatggtatctctagtttctcaaaggtgcaaaccaagccatccctttctccagaatctatggattaatcatttccaaatctacagaccacattttgaaaaggaatgcttgctgttccaaagaactcgcacttgtttcttcacgccctcgccccttctctccagtggctctccctctcccttcccactgcctgggcgcgttcgcctggagttagcctggacctgacgaaaatctgtaaattaaggcgaaggacccagctgcaaaaaaggcgctctgcagccctctcccagcctcgggtgacaggggtcttccagggcgtcggagcccaagagaccccggccaccttcctctcccgggaaccccaaatcgatcctgccactgccacagccaccgcccccgccccttcaactccgccaagtttaccccgggctcggcgcccatcactagttctggagctgaccgcgcggaagcccgcccgccggggtcgcagggcccaggcccccgcacagctctgcagcccccgcaagcacagcccgacccgcggcgcgcttgccgctcaccctcgtccgggccctcggcacccgccacggccagcagctgcaccagccccaagagcagcaggagcaggaaggctttccggggcctcatggtagcgggggcggagcgcggcctcctagcgtcggcggccgctgagcgcaccgagaactcggggtctggccgacagcccgtcgctccttagcgacgcgggggagccggaaaaacccacggaagtcgtccccggcgattggcagggggcggaggaagtcgcgggccggccaatcccagactgacgccggcacggaccgcgcgcgcctcggccgcgacgagtcggctccgccgccctaggccctccctactcctgcgcgcggccctcggctgcgcgtttaaaactccgagccctaacgtgaggtgcccccttctgattggctgcgccacaaccaccaatcagcggctgccactcggtttgccgggagcgcacaggccaagagggagagcgggggagaacaaaggcggcgggccgggcacggggagtgcgggacctggctacgcctcggggcgctattggcaatcggtgccgggggcggggcaggagaggcggagcctgggaaatgtggagcggggcggggctcggctcagcatcctgcggccgaacttggcagtaagaacacgtgtcggtaccggagcggtggggagcagtggcgagcagggcggtcctcgcaacccgccggggctctgggaagctggagaccaacgcgggcggaggagcacgagcctgtttgttgctagaaaggggctccaagtccgctgcatgttcgtggccttcttaatttctttttctgctcgagcaaataaaagtttcatttctctccggagtattgagctagagagcggggaag

SEQ ID NO: 49842 - DNA, 1356 bp, Homo sapiens
gcacgcctgtaatcccagctacacacacacacacacacacacacacacacacactagccgggcgtggtggcgcacgcctgtaatcccagctgcttgggaagctgaggcacgagaatcgcttgaacccgggaggcggaggttgcagtcggctgacatggcaccactgcactccagcctgggtgacagagcgagactccgtcttaaataaataaataaaaagaaaatggaagtgcctaatattgcaattcagcattgtactttcacatgtgccctttatgggaatccttttcttttctcacccgtaatttcctgttctttctcccaatctgcacctcatccagcagagtctccgcccacaagctgcgcttagggaagcaggcactctccggaaactctggactgagtaaaatcaatgggtgcgtgcgggactcctccactgattctttgattccacagcatttgtacagcacccacgggggccccacactaggtgggaaacgaagatgaaaagtcgcagtctctgttccaaagaccgcagagcccagggctgcgtttccttcccggccttttgtccaggccccagggagcgagctgggggaaggctccccggccagggcttccccacagattttactaggtcagggcagccccggggaggcgcctcctcccagccggaaccgcccgactccgcttcgtcctcttgggcccacggaccactccccactgccccagccccaacacctgcagatcctgcgagcccgagccctcccgcgaccgcccagagagggtctgacacccgaaggggaaccccagggactagtcctgccgtagtctaagctctggtctcgcggaggaaaagcaggggcggcccccgtacgcggggcctgcgcccttcagccccagccccaccctgcgcgaccccgggatctcgctcggcggcggccgttgcccagggcacaggcagggcatgctgagaacgctctgcctttcctgtgcctggacacggctcgggctgggatcccacagcgccgccttctggcgggaggcacccccgcggcgctgtgcattctgggctccctggatctctgaacttgaattggagctgctccaagctctccagagataacctcctttagggttacacgagattgcctctgaaattgataggtatgtaaattagtagggatttggagaatgtgtaacgtcgccattttcggtttcaatttttgctactacaagccgcctgtcttcacaatgaaactgtgttatcggccgggcgcggtggctcatgcctataatcccagcactttaggaggctgaggcgggcggatcacctgaggtcaggagtttgagacc

SEQ ID NO: 49843 - DNA, 1724 bp, Homo sapiens
tttttggaacagttgttctgatttcggtgactatgatgtaaaactggttgacctgtaacatccacctctggccccaaacctttctatcctttccaccgtccgctccccgtccgcccggcatcctcgcccaggctccgccccgctcctaggtcggcctcggtccacgctcggctttgtccaggggtttggccacggacaagccgcgggagcggaggccacctgctcaccgcagggcccggaatccacatccccagcagaagcagcctgcagactccgtcctacccgtgcaccgcgcgcactcacggggaccccaggacacgggcgagcccggaacccgaggacccaccacgaccccgaaaccgggcgtccaaacaggctagcccgcttacccgaggcggctccgccatggtccccgcggtcccgcccggccctggcaaacccgaccgtctccggcggctccgcaggaacctgccctgctgcgcactgactcccctccgctccgccccaacccgactcccacgcacagcccgggtggcccccaaacgcagcgccggccgggcgcggtgcatgctgggacccggcgcccggccgcggctgccgctcagtcctacagcgcctcctgcgggaggaagaagcggcgctgcctgagcgtcggtcctcagaggagggacccaggggcccgggcgccctcagagcaggccgcagcacgccggtctttgagggaccctcggattcccgggatctggggagggaagcggtcagagacaagctgaggagctggccggaggggaaacggaggggcaggacatggagagatcagggacagggacagggagagatcagggacagggacagggagacgcgctccacagaaacccagactgagaggcagcgagaggggaacctccggtgcggttcctcccaaagccgcccccgagacaggcttcgtctgtgagggggtcccgggaatccagcgaggccggaaagtgggtggggggcgcgcgctgcccgcggtggcccggggcatccgtcccgccgggggcgcggaggccgtgggggccccatgcttgtcccgccggggacgcggaggcggggtccgcccaccaggtccggtcgccgtgggtctagagccctccgggctccccgggcggccacgctccttccttagcagagaacggccttgggcagagaccccatgcggaagccaccccggcctcagggccgcctgcagggactcagggtggcccaaggctgcggtcgggcaccccgggccccggcaggagacagagacagagtaggaggagaagacggaggaggccatgacacagggcgtgagaaacacgagaacgcaagaacaggggagaggtggggaaaccaggaagagacagaaaggagagagggcgaggaagggggtggcgattgtctccagaaaatcaacctcgcattctgtcttagtcatgtcttaggtgtcaggctgaagtagcaaaggaaaagtgtgtagtttggagaggatgtgcataagaaataaaatagtccctgcgtaggctgaggagcatatacgcatctgtgtttgccacagaatcgtgaaatgtacatgcaccttactgtttaacgttttttatttttacaactgttatacagtacaattttttttttttggagacaaagtctcactcttgtcacccaggctggagtgctgtggcgcaatctcggctcactgcaac

SEQ ID NO: 49844 - DNA, 2414 bp, Homo sapiens
ttcattgggggcacaagaaaaacttgcacacttaagcaagttatacttaactgaatgtaacagggtttcttggattaagcctcaggatacgcctttcaaactctaaaaccggtgctcaaattttcaatactacattacaatactacagcatttacggtaaattcgatttacgctaaccacccaattcattttaagttttctgtcctttcctagagggagcggtctccaatttctctcagttccagctttccttctcctttttctcatctgcttaacactgatgtgcttctctgaaactaccttcagcaggagagcacgggccccagagagaccccgaggttcagagccccgacactgaaggcagggacagcgttgttgatctgagcctacaacaggccgagaaacagatctttcccacccggattctttctcccaaaccaacttttatttatgtattaaacagacggggtctggctgttgcccaggctggagggcagtggctattcacaggcgcgatcccactaacgatcagcactggggttttgccctgctcggtttccgagctgggccggttccccctccctggggaacctggtggtccccgctcccgagaggtcaccacacagatgcagaactcagaggcaccgcgcgacggacctagcgcatatacagcgcagagctcccgggctcaagcgctgctcccgcctcagccttccgagtggccggggccacagacgcgcgcggccaagcccggccagaccagcttttccccaggtcaattccagaacagcacacgcagcaagactgcaccttctccagcccagcccggagctcagtccgtgggccactgccaacccccaggcccaggccccggccgccccactccctggacgcggaccccaatccagctgcgacagggacccgagtttcgacagagcctgcatcctccaccggcccttcttaccgaagccggctcggccatggcggttccgcacgaaccggccctgcctggcacggcctcccctccgctccgccccaacccaactcccaggtacagccctgctggcccccaaaggcagagccggccgggcgcggtgcatgctgggactcggcgctcggaagcggaagccgctccgccccatagcgccccctgcgggcgggaggagcggcgccgccagagggagtcggtcctcagaggaggggcccgggcaccctccgtgcgggccgcagcacgccggtctttgagggacccttggactcccggatctgcatgcgagggatgcggtcgaagacgagatgagggagctgacgggaggggaaacggaggggcaggtgaacatggagagagcaggaacagggagagagtagggacagcgactgggagacgcgctccacagaaacccggactgagaggcagcgagagggtgagagtccggtgctgttccttccaaagctgcccccaagtcagggatgagctcgagggtttcgtttgtgagggggtcccgggaatccagcgaggccgggtaggtggtggggggcgcgcggtggcccggggtgtccgtcccgccgggggcgcggaggccgtgtgggccccgggcatgtcccgtcggggacgcggaggaggggtccgcccaccacgtccggtccccgtgggtgcagcgcccttctgggctccccgagcgtccacactccctccttggcagagaaaggcctcgggcagagaccccatgcggaagccaccccggcctcggggccgcctgcggggactcagggtcgcccagggatgcgggccgggcacccctagcccccggcgggagactgtgacagagcgggagaagacggaggaggccatgacacagggcgtgagaaacacgaagacgcaaaaacgggagaggtgggaagacgcagaaggggaaaccagggagagacagaaaggagagagagggcaaggaagggggtggcgactgtccccagaaaatcaacctcgcattctgtcctagtcatgttttaggtgtcaggctaaagtaacaaatgaaaagtgtgtagttagaaaggatgtccatgagaaagtagtccctgcataggctgaggagcgtgtgcacatctgtatttgtcccggaatcgtgaaatgtagatgcaccttactgattaaagggttaaaaaaaaaaaaccttacattaaaactaacgtttcggatgggcgcggtgcctcacgcctgtaatcccagcactttgggaggcggaggcgggcggatcacgaggtcaggagagcgagaccatcctggctaacggcgaaaccccgtctctactaaaaatacaaaaaaaaaaaaaaaaaaaatagccgagcgttgtggcgggcgcctgtagtcccagctcctagggaggctgagtcgggagagtggcgtgaacccggga

SEQ ID NO: 49845 - DNA, 2755 bp, Homo sapiens
tgcgctcggcctgttctcgcaggtccttttgctcagacgcagcaaaccgtaaccccaagctcgatctctgctgctctcaggaattccacttcctccagcttgggcaacatagcgagaccctgtctctacagaaaaataaataagtaaataaataaatacaaataaataaaacattagccgggcttggtagctgcgcctgtagtccaagatgctcgggcaggctgaggggaaggatcgtttgagcccagcagtttaaggctgcagtgagccttgtttgtgccacttgcactccagcctggacgacagagggagactgtctctaaataaatcaataaataaggccgggcgcaatggctcacgcttgtaatcctagcactttgggaggccaaggcgggtggatcatttgaggtcaggagtttcagaccagcctggccaacatggtgaaaccccgtctccacttaaaaaaaaaaaaattagctgggcatggtggtacatgcctgtaatcccagctacttgggaggcaaaggcaggagaatcggttgaacccggaaggcggttgcagtgagccgagatcccgccactgcactccagcctgggcgacggagtgagactccgtctctaaataaataaataaacaaaaattaagaatcctatttccagaccaggccccggagagtcaataatccgagatgtgaaggagaccttaaaatattattgatcccaacacaggccgcgtgggacctgaaccgcctcaccttggcaaccacatttgtaatttccgcaaatgatctatatcttcttcattccaaaattgtgcctctccgtcactcattccacccataggctcccttcagccgtgtcccccttactctcaccctgcacatttccgctgttctaaatacggctgcccttcagcagaagctgttgcctgcagacggcgcctgcgtatcgagcctccgtgaagaaaatcactccccagaatgagcccggctttgcggctgggtcctaaactgcggtgagctgaaccttctcgtgggaatgtgagaaagcggaacacacgtgggccccaaataacaaccctccccacaccgaagcccaagagctgggggggaggggcggaggcgacgcggggggcgctggccgcaggggccggcagggggcgcgctggccgcggtggctgggcagcgcgagcctgcggcgcgtctaggcccgcgcggttcccggtgcactcgctgcccacaaagcgccagctgaggggccgctgcgggtggagtgcggcggagtcggcctcgcgaccccagcttgatccgccgcctgctgcaccgcgcctccgccgcgttcctgcgcgtcccgagccccgacggccgcgtgagtcccgtccgtgcggggaaggcagggccgggtcggcgccgcctgtggagaggacccggcggccgggcctgcttggagccgggcgcggtggcagcggcggcagcggcggcgacttccgaggcccgggctagacagcgcagggccatggctgaggcggccccggccccggtaagggcggccgcgcgcgagtgttgtgagcccccgagacccagaccccgagggaggaaggcgggcgggcagggagctgccaggcataggcgccgttctcgggtcccgccggccacgtcgcctgtcgcccgtgcttggcggctgcagcctcgcgtgaggggacttagcgggtgggtgtgaaaccgcccacccggggacaccaggctgggccgcaggtctgaggggcactcgcaggcagctatgagacccggggccctgcagttgggttgaagtcgagggggtgcctgctgcgtgtcagccccacgcctgcccgccagacgcgcagcggggttgggctggggagccgtcagccattctcgcggccgcgggagcgttcgtcaccagcaatctgagcggtggcgcgggcggcatttaagtgtgcggaggcgcattcccgccgcgctgcgtgacgcctgggctcccggcaccggactcgggacacgcgggaggccctcccgaaatagctgccgaatgaatggtgcggacccggaggctggagtggcctcgcgtgcgtggcggttcattcgcgggtgtttgccaaggcctgcgggggccggcagcggccagttgccagggcgaccgaggcgaccgggccgcgcctgcacgcagccccgtagaatgagaaggggacggtcaggccgcggggaaagcactgatcgcatttgccacccaagaggtctttggtcacctctaggagagcaattgtactgggtcaggagccaccctggcacatgaggggtgactgggaaaaggaggaagagcagcgatgggtagggggtagagcagagggaagtgccacctccactcttggacctgtttttcttttttccaacctttttttttgtgtataggtgggatggtagcgatgatcctgtgttgtgccagtcctggctaatagaaatataagggaagccgcatacaaaactctaaatcaagcttgtccaacccgcggcccccaggccgcatgcggactaggactgctttaaatgcggcccaacacaaattcgtaaactttcctagaacatcatgagatttatgcacggacctttttctttgtcttttttttttttttttttttttttttttagctcatcagctatcatgatcagtattttatgtgtgacccaagacagttcttccagtgtggcccagggaagccaaaagattggacacccct

SEQ ID NO: 49846 - DNA, 1607 bp, Homo sapiens
ggctgaggcaggagaatggtgtgaacctgggaagcggagcttgcagtgagctgagagtatagaccagtttatactaggaagtgggattctcttctgcatatggccattccctacatgcagtcttaaccccagtgaggcagaattcacagtcctcctctgaatgcactcttcagtttccttcacttgaatgttttctccattcccattaggactagccaaagtcacatctctttttgagtcatgccagccccatgtcttgtccatgtcattcatttgcagatagtcatattcccctttggggcagaaaccatattttagttatctcaatgcttagggaaaaccttgtatgtagtggatactcagaatattttcttgtgtgaattaagtatgctttgcatttgtatctaactctgagtaactctgagtcctccaccctccagaagctcacagctttagattatcacctttcttcttgaaatcattgtgaactcctagagattggtctgtgccttatttttcctgtatcctttcagtaccccatatagttttctcagtcaggaggcacttagtaaacagtaaagatttttagactgagggggctagagtgggggcgggctgctggctgaggtggtgtctctgctctgcaccccaaggaggcctgtcaggaggaggtgggctttccccaacgctgccctcttgacccttggagctctcccaggattcctcagatttccccagcgcccctttggcactgtgtctcctcctctttgccctgccttctccctgtcccaccaccacctcctcaccctgtctatccctcctcctctttgctctggctccttgccaccaggatcttttcctaacttttttctttcctagtagagacaatgggctgacaacctgacttccaaaaaatattgaggaaaggcaaaaactagtttttaggccaggtgtggtgactcaagcctgtaattccagggctttgggaggctgaggttggaggattgcttgaggccaggtgtaggacaccagcctgggcaacatagccagacccatccctacaaaaattatgtttctaaagattgactcgccatagtggcatgtcacttcctgactcgtcccagctactcaggaagctgaaatcggaggatgacctgagctcaggaggtcgaggctatagtgagcaatgatcacatcactgcaccccagtttggatgacagagtgagaccctgtcttaaaaacaagcaaaacaaaacaaaaccaaaaccaaaaacaactagttaccagattctgaatgcctaacatacaagcatacaaggtggcaggatgagtacataaagtcgcaaaaagtactcaagtgcctattaaatgaaaagcaaacataccaggaaaaacttcagctcctgcttgaagaactaagaggggaattagtagaaaagctaaggacttagaagaaatgaagctgcaggtaattaactccaaaaaaaaaaaaaaaggggaattgttaaaagcccaaatacagcaagaattagaaactccagtgtttttgcaattgggatgaagaagtggaaaagtatagagctgcaagctttgctataaacataca

SEQ ID NO: 49847 - DNA, 2076 bp, Homo sapiens
tctgggatgggtccaggtaaatctggattgggaagaaggggagtgggaggtaaagtctgcaaaggagtgagggaaggcagaaggccagaagaaagtgtctgaagacagaattactcctgcaaaattttcacaagggtcaggcactattttctcccgggatgcccaatacatttgcagaattaacagtaatcaagcccacagtccaggtcctcgcatagtttgggcctttaaagtcggccatcccagattgagggggcctgacccctgggcgaggccgccgcctctcagttttggggcggtggcgaccccagtccgggagtggccccggtaggtccccgcaggcgggcaggagctccgaggccattggctggcgcgcgggctgccaaggggcggggagcgccgccgaaggggactgtttgctcctacgggctgtagatggagctgtccggccccggagagggggaaggcgcctggaaaacgttcttcttctccctggccgacccgagcggggaacagcactcccaggatgcagtttgtgtcaacacggccgcagcctcagcagctgggcatccagggcctggggctggacagcgggagctggagctgggcccaggctctgcccccggaggaggtctgccaccaggagccggcgctgcgcggggaaatggccgagggaatgccgcccatgcaggtgggagaaccccgccggcgccatggccgcgctgccgtgggggcggggcgcgggctgggccgcgggaccgggccgcgccgtcctccggtagccttgcggcgccctcccagcttccgcgcccaggcgaggcccgaggcgggcggggcacggccgggctgcgcggcgggcaggacggagcgggcccgacgcaggcccggaagggcaggcctggcccgcgcggcgcggagcagcggtcgccgggcccaagtgcggaggccccgcggggcgggggccgggaccgtcctttccgggacctggcagagctctgaccctgtggctgagccccggcttggggctccctttgcgcccggccggcggagagcttcgcgggcagtgcttccgcccggccgcagaagtgaatgcctcgttcgtgtttacacggtggccaatttgacggggatattttttaaatgtttgattaccacctttcaccaagtgtaatgagtaattcactctccccctgcaccgggtgtgatccagggagggggccatggagagatgacttcggggtctttcctgcggttgacaaacttggccgcatgttggaatggcctgggcagcttttaagactcctgagcccttgcctggtcccagagctcagggtctctgacgggtgagagtagcaccaggcatttcttcaggctccatcgatgatctccgtgggcagaaccggtgctccagaattgggtataaaaccaggggaggtggatcctcagagaggcctgaaagcttgcccagggaagactctctgggcccaccctggggctgggctgctcaggggcccctctgctcaccacgcggctctcagccaggtgctaacgagggagccaggggctgctgtgttgtgtttgatcattttcagggttagggcttcaaacccgagaaaactaaactgggccccgggactttcttaacttctactgtggactctgtccccttctgtgggctagggcggagtggagcctctgtgatggaggaatgggtgcttttgatggaaacaccagcacctcttactggtattacagggcctggcgatcctagggccctgctctccactctgctgtgtcccggagcaggtctgccccggagcagggctgctcttgagtcagagagtggggctggtctgcccagatcgccccaagcagcaggcctccccttttcctagcctgagggccttttctgcagccatcgggaggacagaaaatgacacctcttcctgtcccaggtgtgaaggagagtcggctgccagcccatgtggtccagtgagccctgagtctgacaccaggtcccagatgaccagtgaactgtcaccagcctcaaccagccccccttagccataggtctca

SEQ ID NO: 49848 - DNA, 1644 bp, Homo sapiens
attaaatggtcatgtggccgtgctttccaacaaaaattccagacacatcgtcttacatgtagcatgaggactggaaatatttgaaatcagggttgtcttggactttccaaggcacatgattaccataattaacaggctacagagggctggcctgggcctgaccccacgctccacactgttgatatggaaactgttcccagtttctaaaaagccaaataacaggtgaacttttggaataaaatcacttgccttttggaaccatatttcttttccccaacaacattacatgttctttcctcagcaaaaagtctgagttgtacacatttttgaatccctcaaagcatttagcagagtgctgggcatacggaagacagcaggatcccgtggctttgcctgaaacgcggaacctggtcttgacttttgagtgactgagccctcctggtgcccgcactctggccgggagtgccaagcagcgttctccctcccgccgcacgggggcacaatgggaagcctgcacagtgaggaagagcggctggagccggtcttgtgccggggaggtcgctgctcccagaatgcacctggcatcaacacggcggcggcggcggcggcttccaacaggctctggggcgccgagcggacaggaacgcagcacgggggctccgaggcggggtctgggtgttgaggggcgactggagccatggcggagtcggcgcctgctcgggtaaagaggcaccggcgcgctggctcgagggcgcgttggggatggcggagtcccctgccgggggcggggcttcgcggtttggacgccgccggggtcttggtttcccggggctgccgttggcgcgggtgaacgcggaccctcctcttcgcgaccccagtgctctgcccttttttccctccgcttccttctgcagcggggtcggagcctcggcgccgtgcgcccttgcccagaaacttctctgacgcttgctttaggttggtggatttgtgaccctgcccacacattttctctttcgtgccaaaagagcccgttcccaggttggagtgtttccagattggaaacggtctccgtcgctacgagtgagctctcccgctgcccgggagaccccaggacttgcctctctgcgaccacctcctcttcggtccgatgtgttgtcggtttttccagtgctgcagatttctgtctgggggttgcagccacaggttgaagtcagcctgggctgcttctccttggggacggatgttatctacagtgcagttgctgcattttgtttgtagagctgcccaaactctctccttcaccccccccccaacacccccctcccagcccaccgaccatccccattctgggaatgtcaagatacggagtttggtgtgaggaaaatcctatttgtggagtcacgaagctttcagctgtccatttgggtgattttaggcaactgtgttcgcttctctgggtctctttcgttttcttaactgtaaatcgagagtgttggagtagttgctagatgatctccaaggctttaagtttccttccagctccgacattctcatactgttcccatactgtttcaaagtagtggttaatttaacaacaccagagggtttgcaacggaaggggcagctggaattgaattgactttt

SEQ ID NO: 49849 - DNA, 1954 bp, Homo sapiens
atatttgtgaaaataacttctcaccctcaccccccccccccaaaaaagaaaaaacaaaaccaaaaccaaaaaaccccaaacaaacccaaacacagaaagaaacaaaactgcagatttctagcgggaagagtttgccagcttgttggacaaagactgtgagatgaatgggaaatgcagaaaagacagaaaacaaagcttcaactgcatacagcacatttagttcaatatgcctcagcacaggccgaggaaaatgggtcctgcggtttattcaagatgcctcagggcctaaatgagggatggactgattcacacttgctgtgatctcagcctggaccaaagctacagaagggtcctcgtgggtggctgaggactttcaccaggcgggccccgggaggaggaagggaccccagagtcctcaggaggggagggcaggcttaggaaaaaaaaaaaaaaaatcctaccatcttcacgtttgttctgtcaaatttaaaagagactttaaaaacgttcatgtaagtttccctggcttctccctgggtacacacgtatcctttttactttccccaactcagttctgtggtgcgtgggaggcgctgcaacagagtctcggtccggactggagccccggcgagggccgaccccgttccccacgcagctttccctcgcgaggtttcgcactttccagcgcggttccttcccgcagccctcccggctcccgcgtgggacgcagagagaggttgggcgccgcgctggcccgggagtggcttacgcctgacgtagccccgctggaggccgtggcacgcccgccctggcgtcaactcccgcgccccgggtgagggtgggtggccgcgcctgggtcccggacgccgcgggcgctgaaggcctcgggagggcgcggggcggcggccgcgggcgtgcggtcctacgggctgcagggggcgctgtgcgcgtcctcaagctcggccgccgagcgcagctcttttttaaagggccagcggggcacgtggctcgggacgcagttcgctgccgcccggcagtagctctcaggttaggcgggtcccgctccgcttccgccgtcgctgccgcgccgccccgggcccgacaggccgggtccagggactgcaacccagcgagggacgcgggcagccatggccgaagcggcgcctgcccgggtaagcgccctcggccccgcggacgcccggaaggcccaggccgccgccgcgtgagcccgcgcgagggactctggccgcgcgaggccgcggggtgagagggccttgcgcgcagcctccgcgctcgttgcccccggcccatcgcccagcccgcgtcgaaggcattgaccgggcggcccaaatgccaggcccggcgggcggggccccgacgtcagcggctgacgatccggcccatctgcggcctcagccaggccgggccccagagtcacgctcggcgacgaggaggccgcgccttaggagtattgtcccatttgaggcctcgcggccccccctacagcaggctgggcgggcaggggccgccagccccacgggacagtagcggaggctgagatgggaagggacaggcccagggtcacgcatctattagaggcgggagcctcacgccggggcagggattttggaattagacactttaaaacgcctcatattctacttttgccaaagagaaagattgtgtcgtttacaagagagatagtagatttttttaaaaaagattactgtagcagattttatttaatttttttttttgagagggagtctcgctctgttgcgcatgctggatggagtgcagtggcacgatctcggctcactgcaagctccgcctcccggcttcaagggattctcctgcctcagcctcccaagtagctgggactacaggcgcctgctaccacgcctggctaatttttctatttttggtagagactgggtttcactatgttggccag

SEQ ID NO: 49850 - DNA, 2021 bp, Homo sapiens
gggacaaacacagcgagcggccaggagctgggcctcagccttggtttcctcatctgcacaacgagaaaagtgggtagaatgcaggctgcccgggaagaagcttgagcaaccctaaagctcggggtcaattcacggagtcccctctccttctgggacccaaggccctccgggtcttctgtgctgttttgtgccgtgggttgagccttcgaggtggggtaggtctcatatttcctgtgctctcagattcctgcggccgcacctttgtttgcactaactgtgtttgcaccaactgtgtttgcacggggatttgctggggccttggccggcaggccagtgtgtgcaagaaaagcaacctgacagcggctcctgctaaccagggctggttcggggctgcggccgggcggctcccgcactgcgactaagggccagccggctggcaggcggggctggggctcggatgtcgggactagcgggtctctggcgcgaggcggccgccaccaccgagaaggccgcgcgcattcctagagcggccgccagcggccaggtgagggcgccgcggcctccggggcctcctcgcctctggccggcagggggcagcgcgcggccccgcgcggcccgacgtggcgctggcccgggaggcagcccgtgggccgccggcgcgccctgccgggcacccagcagcgcgctcccgttctcatcagacgggagaaaaaacgcccaggcagaggaacgtctaaaagtcaagtcatcaaaattaatgtaatcgagaaaatgtgcatatttaaaatatggatagagacgcataaatacatctttaaaataaaaatataatcgtttgtgttaagtccttgctccattggctctcagctgcactcacagcaccagtgagaccgacacggttgtgccccatcccacaggcgccaaatggagggcgcagggttttaggagctcgcgtagggcctctcgggcggcagcaatggagccgcgaggccggcggggagaccgaggacgggacccgctgagctctgggtgagctggggggactcgaggggacctggatgggccagaggcctggcttggggaagggccccttcccggttccccaaggtcccggtgtgccgctgccgtagggaagcaggaaggcacggccgcgccaggcgacctgaacgagaggaagcccggggtcgccgcccgcgggcgcggctggtgttcatacccagccaggaagggcgggcgggcctcgggtgccacgcggcgtgcccggcgctttccccgcagtcccgcttgctgcccgtccctggactccttatcaggcagctgggtgaccttgctgcaaagggcagggccgtggagcaggatttctgccgcacaccagccacctgcaacggtggtaagaggatttggcagtgatccgggtactctacctaatattggggctgaaatatcagaaggaatgataaaatccatttttaagtgatagcgtttaaaggtgttggatcaggtttaatgaagaaaatcatctccatcccagctgggcagagatttgggattgtacccgtgtttcttcccgcacattgtcacctgtggcttgttcatccgttcatttcgcgtgcactgaggacctctgaggaccttgcgccagactctggagcaagcgcgaaatgaacaaaagccggccctgcccttgggaaaaatcaaacacacaatggccgctgagtgcacgctccgagcacgcgccaagccctggaaagcccggtagaggggaccctccaacctcccgcagtgatgcgtgtgtggccaggggtcttgctaggctgcaccttgcacctgaatctcccgttgccttcaccgtggaagcgtttgctgtaaaaataacatgggggttggggcgggggagacgtctttgtagctttctcacagggcttaagacatctgtcctgctatcttccccggccttccagggattctcagtggatgttagctctctggatttcactggcaaggttatagagacttaccat

SEQ ID NO: 49851 - DNA, 2536 bp, Homo sapiens
catcttcgtttgattttattttctcatgagtttttttttgattaaagaattgggatgctttttagaaagctatatatcctgcctccttcctgtgtacacaataggaaactgaggctcaaaggcactgactcccatgcagtaatcctctcactagcacggccagggcgtctcaaagagcaggtctgcgggaggatctgagggatgattttttaagagtgtcttcctgaagaggaacatcagcccccaacccctgagaagcttactccccagacaccatctgtcagggcactcaaagtttagcctacgaccttccagacgcagaggccggaggcagaggctggagctcagagggtcacctgctcccaccgcggagatgcccagctgggcgctgcccggcctcccccgccgcccccgacgggccgcgtccgctgccagggcggcccagcccctcacccaggggcggccgccgccagagccaccccctccccgtccaggcccgcagccctctgggcaggcctttctggggctgccgcaccgtgccacggatgccttgctacgtgaccttggggccggcagggcgggtcgccgccaggtgtctgtgcctcagtgtctccgttctgcgaaatgggagagccgcgtcagcgccgcgcccgggccggggaaggctccgcggggccgagctctgcggaaaacgtgccggcggctaccccgacggacgcagcgcgggccccgcagggagcgagcgcgcctccgggcgccccacctcggggccgcgtgtgtgccgggccgggcgtgagagcagcctccctcgcacggacggcggcgaggcccgtagccctcccccaccgcccgggtcaagacgcgcgggccccctccagggcgcccccaccccccgcgccaacgtcgtagcgtttctgccccttaccgagatcccaggccgggccgccgagcccgggacacgcaggccgtccccggggccccgaggccgcgcgtccgtgcgcgcgcgggccgccctcacaggagccggggccgcctcggccatggccctgcgctgtccggcccgggcccccggagtcgccgccgctactgccgccgccgctactgcgcgcggccccacgcaggcccggccgcccggcgctctccgcaggcggcgccggcccagccctgtcttccccgccggggctcgcgcgcggccgtcgggccccggcctgctcggggcgcgcggggcgagcgggcgcggggtcgcggagcccgagcggcggcgtcggagctgggcgcgcggctgtgcgggcggcccggccggctgcgtcccggcggcgagctgggccccggccctcaacggcggcccccggcccgcgcgccgcccctctgcggccgcggctgggaccccagctccggccccggccccggctgcgagctgcgctgccgtcccggcgcctctttagcaggggagctgcacagcagctgccatgttgctacaaactgcatcctgggaggcatgtccctctcaggccgtttaaagagaaacactccgaggctcgtcggaggctgccggaacccagacagctccatctacagccggtaggagcgaacagtgtcgagcgagccgcccggcggcgacggacacgccctgagcccgggccagcccgtcgtggagcccgggccgaaccgccggggcctcccaccctccaggaccctccggcctctcacctggggtcctcgcctgcccaggcaccctcgggcgaggccgggaggcgcgcgggcggaggcgcagtcggagcgcgcagcccaggcgacgtgctggggtctggaggcggcttgattggctccgacagccttcctcccgccgatcccctgcgcctctcacacccagaacccggggtcgttccctttcaaaacctgcgctcacaaagggatctaagaaacccgtcacaccagagaaagcccggagttcatgtgaccagctcagtgcagcccgggttccagggacgcgggctgtgcttccaaggggagccagggggttgggtgcttttgtgaaatgcccgagtgttgttttcgacatgaaaggaccgaattcctagaatcagaccctgctggggctggaagtggccagacgggtcatttaggaggaaactgaggccgagtgggcagcgacttgtttaccctcagtcacagtatgaatgaatgctctttgtaaccatgagaagtcccaaaagaaatgcaggagcttagagttgagaactccccttcctggacaggtccacttaaacatgtattaattgaatacctacgaggtggcgagaactggggatgaattgaaaaggaaaaaaaaagaagaaactataggcaggcgtcctggttactagcgatgaagcccaactggaactaacttaagtgagggaagacggcgggggggagcagaggacattgtgtttacctaatggaaccccaggagtggagctggtcttggaaggcaacaggactcagtatgctggcagctcagataatggaaagttatggccagacgtggtggctc

SEQ ID NO: 49852 - DNA, 1768 bp, Homo sapiens
tgcctgcacacgccctgcactgtcccgtctctctgcgcctttgcccaggcactcctccctccctgaaagcaccaccggtctagctgggcctgaaatcctagccttccctaaaagcccggctcaaatcacagaggcgcagagcatcaggccaggaggggtggacagcggtaccaagaggccccctgacactccttcccccggagcccaccgcaagcttccacctgggcgccagcactcacccctttctgttttgcacgattattgcccgcgtacctgcctgcctggtccttgaacacacagccactgtgtgtcttttcacactttccagctgggtaagcctgggcaagttaagttctctaggccccgggtttttcttttgtatgacagagattaacaccagtacccatcccacaggcttgctgtgaggacagactaacgcctcaacagggcttgtggaagtgcgtggctctatattcccttccgcgccgaccccgggaagctgggcacgtagtgggagtcggtgtatgcggattcgaagccggacacctcccaggtgccaccaggccgctgcgggggagatggagagggacctacaggccgagcgccaggcagagaaaggagccgcgggtgggggggcacccagaaggaggggacagcggctggggcgggggcaggaagccccggagggcccaaagaacttggcgtggggcggcccggggcggggacaaccgttccgccagcgctcgggttcggctcggagtgggggcccggccgacgggcgcagtaggccccggcggaccccgcgccccattcgcgggagccccaggcccggtggtccggcccggaccccggaacccctccccagggcctgcggcgccgtgtgccggggccgggccgcctggggcccccaggccgcgagtccctgcgcgcgcgggtcgcccttaccggagccgcgaccgcctcggccatggccctgcgctgtcccgcccggcccggaggaagtcgtcgtcgccgccgccgcgcgcggcaccacgcaggcccggccgcccggtgctctccgcaggcggcgcctgcctggcctttcctctgccgccgctcctcgctggctgcccctgcgccgcgccgcccgcagtcgcgccgcctccgtcagcgcccggccggtccacactgcatcctgggagccggcgccgcggcccggcagacgaaggcccgtgaggcttcctggaggcagcgcggccgcacagccccacctgcagcctgagaggcgaacggcaggcgctgcgcccgcctgcccgcggccccgccccgccccgcccagccccgcccgcggggcccgacgggaggacctagcgaccccgggccgaccccgcgaccccgcgaccccgcgaccccggccggactgccgagcgcggggggagtcactgcgctggccccgcggcccagcccgaggactcggttattgaaagggtccccctcatgggacccgcctggccgcgcccgcgggcgagcacgggcttccgggcagggcgtcccccgggtgaccgcggccagggcggccccctcgccctgggatgcccggctccccttcccccgccccacgggcacttctgctgcccgaggtcctgggtctggaggtttaggctattttggggaggacagatgtaactcatgcccacctgtgtttgaaatggaataaatacttccaacaacaggaatatagttcggtaaaccccggtaggcaaccacttagcattttctgtaatgggtt

SEQ ID NO: 49853 - DNA, 1905 bp, Homo sapiens
cggtctagctgggcctgaaatcctagccgtccctaaaagcccggctcaaatcacagaggcgcagagcatcaggccaggaggggtggacagcggtaccaagaggccccctgacactccttcccccggagcccaccgcaagcttccacctgggcgccaacactcaccccttcctattttgcacaattattgcccgcgtacctgcctgcctggtccttgaacacacagccactgtgtgtcttttcacacttccaggtgtgcaagcctgggcaagttaacttctctaagccccaggtttttcttttgcatgacagagataacaccagtacccatcccacaggcttgctgtgaggacagaaggacagactaaggcctcaacaggacttggtgcagtacctggctctatattcccttccgcgccgaccctggggagctgggcacgtaaggggtgtcggtatacgcggattcgaagcctcacaactcccaggtaccactaagccgctggggggagctgggggagggacccacaggccgagcgccaagcagagaaaagagcctcgggtggggggacgcagatgtagggttcagcggctggggcgggggcaggaagccccggaggggccaaggatcttggcgtggggcggcccggggcggggacaaccgttccgccagcgctcgggctcggcccggagtggggggcccggctggcaagcgcagtaggccccggcagacgccgcggccctgttccccggagccccaggcgcggtagtacggctcggctcccgcagcccccgtgtgccgggcccgggtcgcccggggaatccaggccgcgagttcgtgcgcgcgctggtcgcccttaccggagctgcggccgcctcctccatggccctgcgctgtcccccgcggcccagataaagtcgtcgccgctgctgcgcgcggccccacgcagggcccgcctcccggtgctctccgcaggcggcgcccgcccagccctgtctctgccgccgctgctccctgactgcccctgccctgcgccgcccgcagttgcgtcaacgcctttagcgcccggccggtccgcactgtatcctgggagccggcgcggccgacgaaggcacatgaggcttcctggaggcaggcagccgcacagccccacctgcagctccggaggcgaactgcaggcgcgaccccgcctggcccgcgcccgggagctgaccccgcgacccctggccgacccctcgccccttccccgactgccgcgtgtgcgcgcgcagtcactgcgctggccccgcgacccaggccgagggactcggttaccgaaagagtccccctcataagacccgcctggccgcgcccgcgggcaagcaggggcttccaggcagggccctccccggtgaccgcgggcagtgtggccccctcgcccagctgggccccggcgcggccgaacaggcacttctgccgcccgaggtcctgggcctggaggtttgggctgttttcggggggcagctgtaactcatccccatctgtgtttgaagtggaataaatacttcgaacaataggaatataccggtagatgctacttagcattttctaccatgtgtttattacagtaaatattttttaatggcatgagcaatggaacgcaataccatcattgaacattattttggggaagaaattggtatggacagatgttcatgatattttaagagaaaaagcctgtccagaacgatcctgtctttgttttaaaattaacactttaaaacaatatatgacatcatatgtagtattatataccgtgtatatgtgtatctatagttttgaaagtttggaagcatacaaatgtcaacatagactaagtagttttctttaatagagcacaggccgtttttacgcattttattttcccaa

SEQ ID NO: 49854 - DNA, 1210 bp, Homo sapiens
gggggcgcgggcgaaagacgtgaggatgtacgggggcctggcagctgctctgtcccacccacgcccggccggaccctcgacccctttcactccaggtcgggtttccccgaccgcggcctctgggaaagatgggtccctcttcatccccaccatcagcccctggcacatgggacgcgctgagtggtggctgcgggaatgaatgagtgataagcggcgcgtacccgcgggcttgcacgcccacagccgccccggctggtctcggcgcgcaacctctacccgcagctgggggcggggacgaggggagggggcggggacgaggcccgagccaggtccgccccgccctgtctccgccccccgcttccgagccggcgccgcggcgccttctgggaagtgtagtccgcgtctgcgccggccggccgggccgccgaagccgggggctccgggcggaaacggcaccacccaccaagggatgcgaggcgctcggggcgggctcaacgaggccgggggcgggcccgggcgcgcccacccccgcccctccccctcggcccaggcccccggccccgccttctcctgcgcggacctgggccgccgccgacgagggtcgcgtgcgcccgcgccagggcccgcgccggaaaccgaggagtggcggggaggctgagcccggggatggcgcgccaggtaaggcaggcggacgcgcggacccctcggcgcagtgcggccccgaaggcggtagggcgagaaagagctgggacccccccgcaacttcgggatcggctgggtgaggctgggcaggcctgatgctcaggggttcgtgccgggaagttcaggtcctcggacaacctctctccagctctccgccgccggtacccacggcccagtctccacctggggaaacccccttggcgtggcttgtttcgttacaagttatcctggtagagtgggcatgaaggcctcggaggcagtgagtaaatctcatacttctgttcttggtggaatcctggatcccgggggctggggacgtggaaatggggagaaacaaagatagaacaaaccccaagttttgtcttgggaagcctgcaggtaaggcgtttagatctgagaactggagggagagccccaggccgtgacagcctgggcaccgtttgggctaggttgtgtgtgggctgtgacgatgctgggaaactctggtgctgatatcagtgaggtatca

SEQ ID NO: 49855 - DNA, 988 bp, Homo sapiens
gtcacatgaatgtgcacagacctgcaggggcctgggctgctatgcaactgtgtgcgaagcggagaccactccattcccagggccacagttccctcttctttcccagggacagctgagctgctccccctctctgctttcctgtcaccctcagagcctggaagagctgttgggggagggagccacgctgatgaggggcaggagcctgctggttgtggagatccccagggtaagttatctgtcagactttgggtgtctcctcccactcatcggtcctcagccccaggcaatgcgtgacctcagcctactcagtccagcctctcacctccctgcctcccctactgcaacctcccaagctttcacccctcatccctctgggctggaagcctgttatgcagagaagcactcagagaaagcctggggtcaccctggagagtacctcctgcctcaggccccccacccaccaccaccctgaagccttatcacagccacccctgcagaacctgctccagctcccaaaagtcctgccacgaggcttacatcccaagacctcagatggtggatgtgctccaccggcccagactgggcaaggccaggcatttagggggtgccaggaaaggcagagggcccagatggtggaagaagtgtagcggcagcccgcctgggcattcccctgggaggcatggagattaatgagtaacgtagaacagaggagccctgttacccaggccccgcccccatgccctggctgtcccttggccagagcgcctggcctgagcccaggtcctctatatctcatgggacatggtgtctcctctggctgctcctcatgtggctgggaggattacgtgagatgctgggtgtgaaaacacgcacgtaggtgtgagtgctgagcagccgcaggggtgcgggggggtcactgtggcctctctgcagggggacagccccggcacagcctgcacctcacagccctggtgcagctggtgaagga

SEQ ID NO: 49856 - DNA, 962 bp, Homo sapiens
tccacgccccagcgtccttgcctgggaaagtgcaggcaagattcgattctctggggagaggcttgagggtgggagcccagggtggggagtgggaaacttcatctcccaggtcctccagctgtcactgcccgagctggtgaaataggagccagcccaggggcgggagtgagtgtcactttaggggtactgcttggggaggtcctcgagaggatcctcttgtagctagaaaatgatcgcctcttcctaaacccctaccacaaaaccacctctcacccgtgccgggctgcccaaggcccggacaccgcccctgctgccccttccctgctccgccttccgcggctcccccgcccctcccccagcagactcccctcccccatctccccggcagccttccctctgccccgcccctcccgctccctctgccttccgccctctctcccctgcgaatcgggccggcgcctcggctccgcccccggccccgcccctcaggctccgcccgcccgagcccggcagggccaacccctcgaggccccgtccgggtcggccctccgctgccaccgcctcccctgaccctacgctccgggccgcctcggcggcagcgctcccctccccctctcagactccaggctgcctttccctaccctcccggttctcccccgctccatctccctccccggctgcacaccctctcccttcctttccccctcctcttttccttcctcgccaacccccgccctcctcctctcagctcttttccccaacccagttctcctctcccctccctcctctcctcccccaccccggtttcccttccttctcctttcctcgcctcacctcggttcccttcccctccccctttccagccctcccccacgtctccccaccgccctccccctcccccctcccttctgcagctctccttcccctccgaggcccccgcctcccttccccctctgtctccc

SEQ ID NO: 49857 - DNA, 1171 bp, Homo sapiens
actgtgttctcccaaaccctagaacacggcctgacccatggtaggcaaccaatgatactttttgagtgaatagaacaaaaagtattgccctccttaataaaagaaaacctagaacttcaaggctgacattggccttcgcgtagcccaatcagagcgctttgcccttgctgcagaggactaaaggacgccacgccgccgttgcctagtaactgtcgccggagggaggcggggagggtcgcaagcgcgccgccggcgtccaatcaggacctgcgttccgggagccaatagcagcttcgagagccgctcacctagagcggactacacttcccgtcacgccccgccgcctggggctgggcagtgaccgtaaagctgttcgctcggtgcgacgcaagtctcagctcagcgcgcttatcctgggtccaccggcgctaccgccccccgacgtgagagagcgaagttcttgggccgcgctccctccctacctgggtgccctccccctccgggagcctgggtccccggggcggtcgcggcggctgcatcctcaggccaggccgcggggggagggggcggcacgggcctccgaaagcggggccatggagcccagagagtcggggaaggtaggactggaaggcccgggggccgcccgctccctcccgaggatccccgagccgggctcgggcgaggcggggcggctcgggcggaggccccgcagatgagccaggcttgcagggaaggactcgccggcccgccctctcttcccgcacttcggcgcccgaccccgggagggtggcggagaggagcggacgcttccgttcggtgtccgcgcatcctccccgagctgccgagcgtccgctgggtcgatgctgggttgggtgacccccgagtggagcgatgcgaaggtgcttcctgttttccccaccaccttcggcgttttgaagaggccctgctaaggcttggagtctggatcggacgccagtgggagctgcagggtgggacgcttgagggcttgaccctgcctagatcctccttaccaagaaagggctgaaaagagagggcatctggcatgctttttgccacttctgtttctaggttatgtacttcatggaatatctgggcattgcttagaaacctgtgtcataaattggctttgggcaagaggctttgagttgga

SEQ ID NO: 49858 - DNA, 1991 bp, Homo sapiens
aggtgtgagccactgcgctcagccctcgtggtgattttttgaaggcctgtatggacatactcttaactctatctcctggatgccaagtgcacccttatcctaggccagtgttctcaacaatgtacacactctggatgagaaaaataaccattgtttacaatccagctaaaatctcacctcctccagggagtcttcctggatttctccaccctctgaattctcataatgggcatttggctactttgatcacagggctcttagaactgcgctgtccagcattatgattttaccagaatatatcactcctcaactactttagaaacccctcgaaggctaggatggtattttatacctaacagtttggtgtcatcccacgcccacctccaacttacatgaatgttggaaggatggatagggaggtttcaactagagaacggagaagggcggatgtaactggttcttgatttcagaaaacagccaggagcacacatggctgacggggtcagtgcaaggacaggcacatttcccttctgcatcacgtggggactgcgcctccctatgtcatgaagccagggaatatgtgtggccggccgcttggggtagcacttgttgctagagataccgcctggaggccactgatctgtaaaagggatctctacagaagatagggatttttgatcgccagagaagaagggatatgtgagatccaaacgccgaaggaggaaagcaggctccgtggtctcttccagccctgatggaagaaactaccgagccttattatactaggtgctttccacatgcctattcatttaatcctccagcaaccttgtaagaagggccatcccattttatatttaaacaaaccttaactactgacgcaaggagtcaaggatctaatcccaaagcctctgcctggttcgctgcagatggatgtccgcgaggacgccagccctccgcctcccgccgggtccctgaacgccggcccggccggtccaacctcattccgcttcccgccatcgaaacgcgaagcccccgccttcccccaaacgtctcagcgccgctggggcctttctggctgcgccgcctccgaccccaggccccggtccgcgcccgccgctcgctagtcctgggagtgaggagaacgcgtgctgaggacccggccagagggacagcggggaccgccctcccgctgcgtctctgaaagcgaggccgttcctcccgcgtccgacccccgcggggccgtcaggttcggggcggcccaggctgcgggtccgcagggcgcttcgggccgagccggcgcggcgcgtgaagggcaggggacgccccgaaagaccgctggggtgggaccccaagctccaggggtctttggaaataagaatgcggcgtgacgttggctgtgcgggcgcggggctgacgcggaccctataacccatcgccgaaaccgggcggccgcgcccctattcctcggcatttctctctgtccgcggccctgctcagccaatcagcgagtgggctcctaggcaggtcctgagtgacagcgcggcgggctggatcaggagatgcgcgtgcgcggcccggcccggctgatcgcttcgggtgctcgactcctgttgcgcatgctcagcgcgctgcccggctggggacccgcgcacctgcagcgcccgctgctcggccctgcatcctgcctgggcatcctgcgcccggccatgacggcgcactcattcgccctcccggtcatcatcttcaccacgttctggggcctcgtcggcatcgccgggccctggttcgtgccgaagggacccaaccgcgggtaaggaaagcgcgcaggccctgcagacctctccaccccggccccctggcccggctcgcccctccgccccggggcggcggcttcctgctctgcagcgagcgtccgcaggagggacgccaggaccccggacgccacctctgaggtctctctgcacctgggtctctgacagccgggaacaggc

SEQ ID NO: 49859 - DNA, 1280 bp, Homo sapiens
ttgggtttttttgtgggggagggggagcacgggagggcactgttctttgcatcctatgatgcttagcagtaccgcctccctttacccaccagatgctagcagaacccctctccctgctcctggccatgacaactataaatgtctccagccattttgaaatgttccctagggaaacacccctaccattgaaaccactgccctagaacctcaacccctcaagggatttccaaacttagttatcaacccagaccctcgggaaaggagcctgggaggccctgaggggagccgagtgccttcagctggcttccccagcaggactggagcttctgaccaggagaccacaccccagcaagaagtaagcccccaagccgccagggacttccaggtatcagagcaggcactgatcccagcatgagctggtccctctgcgagctggtgcttcccaggaggccgggggcagggagctccggcactgccccgagcccagtggaactttgtgttctccccgcaggcggcttcctgagcagggtgggcggacacagttgggatggatgttctcacccctacaggacctccgccttggctccctaacctcaggattaagggccatgatagcagcaagggtcttcctccctcctgaaatgtcagcattttgtcctctgacaaagacctgggacacactggggtggtgacttcatcttcccattctgtgtcccacacagcaggagccccaggctctgaattcctgcggattctgcagcttcagtcagctgtgatgccaggtgcaaaggcctggcccttggccggcagcaattgattcagcaaacatatttctcttttttctctctacccagactcccagaagcagtttaactttacttagcagctcagctcagcttggaggttgagagtgcagagtctacaactggatcaaattccagctctgatgatgattagttgagtgaaagtgacttaatctttctgagcttcatttttattgatgaatcaggataatattagtagcacctgcctcatagaagttgtgcatatgaactgagataatggactaaagtgctcaactggtcgataaatgctattaatttcattatatttacatattaactatttaattccatgccacattttattctgccaggatctcagcttccttccccttttctgttcctgtcatggtcaccacactgatgcactttgcggaagagaaggtggcaagtgccctgtgtgcttttatatgtgagacaggacctgacaaataagta

SEQ ID NO: 49860 - DNA, 552 bp, Homo sapiens
cgggaggtggaggttgcagtgagccgagatcacgccattgcactccagcctgggcaacaagagtgaaactctgtctcaaaaaacaaacaaacaacaaaaatgaatgcctaatattccatcatgtggatgtaccatactttctttaagcaatacattgggcctgtttaaactttttattccatttcattaatctggctgtcaatacattgcacacatacatagtgtttcgactgtagtagctttaaatatatgttgatatgtgtcagggcttgttcctaccaacccccagccactactattctttatctgaatttttctagctattcttgtttatttttccatctgaactttagaatctggttatttttttttttttttttttttttgaggcggagtctcactgttgccaggcgggagtgcagtggcgcgatctcagctcactgcaacctctgcctcccaggttcaagcgattctcctgcctcagcctcctgagcagctgggactacagatgcgtgccatcacgctcagctaatttttgtatttttagtagag

SEQ ID NO: 49861 - DNA, 1117 bp, Homo sapiens
aaggcttgtgatcggcttgtgacagactatctgtattgttattctcttgtgcaattaatttcagaaagaatttatgagtggactattatctttagagcaaaatatagtttaaattaagaatgcctttttccaggccaggcgccatggctcaagcctgtaatcccagcacttcgggaggctgaggtgggtggatcacttgaagtcaggagtttgagaccaggctggccaatatggcaaaaccccgtctctactaaaaatataaaaattagccaggtaaagtggcgcacatctgtaattccagctacttcgaaggctgaagcaggagaatcacttgaacccgggaggcagaggttgcagtgagccgagatggtggcattgcactccagcctgggcaacagagtgagactccatctccaaaacaaaaacaaaaacaagaatgcctttttccattaacttgtttcctcaacaataaacatcttgtgatcaagagtgctgacttcctgggaatgcaacccagcaggtcttgccttccccagcctttatttaggatagtgtcactctagttaggacacctctgacaatacaactcaaatcattggtagctcatgaaaagaactcactctttgactaaacttgagtcaggctcctctcagtcctcgttttgactaggccctgaccctgggctggtccttaactcacttagttcagttttagcaagaatcctgctgagtcagttcagcaaaaatcccctacccttggtatctgatcacctcggcttgtgttcagcaaaaatctccctaacctttatgtgtcctcttagtaattttccatctgctgacttccaccctgttgcttaactataaatctccacctgtccttgtatttgatgttaagcctgatttttttgcccctattgcataatccctattgcagctgttcttgaataaagtctctcaccttaacaattgtttgaataatttttcttttagtgccatttcctactgtaacatgctgtgtgagtctcaattttctgatccatataatggagaaactaatacttccatctccgaggcatggagatcaactgaaattaaaaataacttgcatatggctgggc

SEQ ID NO: 49862 - DNA, 4154 bp, Homo sapiens
caggagtttgagaccaccctggccaatatggcgaaaccccgtctctactaaaaatacaaaaattagccaggtgtggtggttcacgcctgtagtcttagctacttgggagactgaggcaggagaatcgcttgaactcaggaggtggaggttgcagtgagctgagatcacaccactgcactccagcctgggcaagagagtgagactccatctcaaaaaaataaaaataaaaataaaaaacttggataaagtgtaaagataaaaatcactattcttgggcaggggtcccagctgtagcccaagctggagaactagactggcttggcattaatttgcttggggcaggagaagggtcatctgaaagatatgggaaaagctgaggttgcccctgggaagactagggaagcctgcccccgggccagccccttgaatatgtccaactgaggaggtggaaagaagttcaaggtagccagggagacaaaagttgttcactttggtgcacatgtggaaccaacatgggacaaacaggcattttgtgctcgtccagggaacatgacttcttcggctcccacacaatttgtagctgcaggagtggcagagcaccagagtggatgcaggcccagatgttctctgggttaggtgttaaggacttgtgggagtcatcaggcagcaggcatttgccccagtgtcagaggtgtttaagccagaattactccatcttgaataagggctgggtaaaatgaggctgcattcataggaggttaggcattctaagtcacaggatgagacagaaggttggcacaagatacaggtcatacagaccttgctgataaaacaggttgcagtaaagaagctggctaaacgccaccaaaaccaatatggcaatgggagggacctctggtggtcctcactgctcattatgcactaattataatgcattagcatgctaaaagacactcccaccagcaagcaccatgacagtttacagacgccatgacaccatcatgaaatactctatatggtctaaaaaggggaggaagcctcagttccgggaactgcccacccctttctctgaaactcatgaataattcaacccttgtttagcatataatcaagaaataaccaaaaaatgggtaaccagtagccctggagctgctctgcctatggagtagccatccttttacttctttgctttcttaataaacttgttttcactttactctatgggcttgccctgaattctttcttgcatgagatccaagaaccctctcttagggcctggatcgggacccctttctgataacaccaggagacaccctgggtggatttcctgaaccgaccgatagatgagccttccacgcgggagacctggatccttatcgtctttgtggccccttccatctgcacgtgcggacgaggtccgggtcgcactcgggcggtcagcctggcacgcacagcgccggcgtgcagggggccttgggtgccaccgagtccgggaggaaatctaggccgccatccgtccggagactggcacctgtgaccaccacccaacatgtattgaacaagggcttggaggtcctttctctaaggccgcaccgataaacgattaccgactgttgacctcacggccccttcgcttccggccgcaccgcctcgctgcccacgcctgcgcactcaggcaccgcaggtaggaggaacgtaccaactgcgaggcggggggtgcgcgcgaagacccccgcaggctgcgcttccggaagtaacccctggcgcatcccggaatccagagcgcccactacggcctttggccaggccccctgggcgcgttccgggagctcaggcctgcggcgctgggagaagcacgctggccaacaagttgggtggtgggcacgcggcccaggggtcaggggccgccaggcggcgggcggcggggctgcggctcttacctgccgaggaggcgccggctctgcggtgcggagttgcgccggacttcccagcttggccagtggctccgcaggctgccggctccacccctcaggtaagcggggactgggccgccgaggttcagggaagggggcggctgtcggggcccgtgccggccccggggggccacctgctgggccagcggtgccctcgcgccgaaacacactgggagaggccagaatcttccggaacagccagcccttacccatctctccctctgtgccgagaactgccctgaaatactgtggtattaattaactcgtttaacactaacaatctcatgaggcgggtgctgttactattcccgtaatgtagacgaggaaaccgaggcgtgtgctggagcaggatcacggccgtgctcagagacgggctctggatgccatgctctgactccattgttagccctaagcttccagaaagtagcagagtgctgccgtgtcgtttgtaacagatctcactttgtgtcattttttttgcacagtatgaaacctaatgatgcatgattattatttaaaacatcttgcttagactttataagtagtcaaatttgcgtgtgggacaaaaccccaaaacatgcaatggcttgctctcctcttttcctttcacacgttcatctcctcctatccctttctctcaccacctttcaatcttctcacagatgttgtggaggaagatgagacttgagggcccagcaggtgcttaaaatcccctgcctggtgggggtggagtagacactctgtccccctgcagtgctggagttgagagcagaggggctggagagggactgggcggagtgagaaaggcctggcataatcatggaatgcccagggtggggttctacttctcttgcaggcacaagagaagtagaagagtggccgctttccttctgggcacgcacttgggaaaaggcttggtgagagcagcgagaagaataggtctaatttcttgagccagtgtgcggaggtgcttcccagcccaggctaagccagatcactcagccagccgctggctgcctttacagatgtacggctccccgtgagcaatcaacatgcctggctctcaggcataagctgcctcacttcccttctgcacagcactccaggacttgcctgctaccagacccatcctactttctctgtcaggaaaaatgagagttcttcctggtctcttgaggccaatcccttccaccgcctgtgccctggatccctttctccaggaagcttctcttccctgtgtagttagcctccccgctcttcccaggtcaccttctctctgtttagggacagagccaagccttttccctcccatccccacctccagcattcccggttcctgcttctcccccacttcctgctgtaccgcccactgaagggacctttgaccccgctgaccactgcttttggaaagtcttttcttggtttccctaacttcactttactttggtttttccttgtctctcccctctgcctctcagtcacctttgagatctgctcatcctctcacctccctgtattgtcagcattacctgggcagccccctctggtgttttccttcagtttctctagaaacttgcctgaagatttgccccaaaatagcccacatggacctgtatgaggaaagaggctcactgtggaggcgctctccatcattcctcctcttccacttgaggcttaggcatgggccacctcctgaacagctctccccacagtctcctccatgcattgtgccatcaccccgccctgccgtcaccccggcctggcccgctttcccttttgcctcccagggatgtgcctgcttcccatgtggcctggctagggcgctttcctgactgctgcccacatgatcgactatgggcaggcgtgcagcccaaaaggccgtgcttcagcttagaagcccttggaatcttgtcttgttgtggttgtaggcctccaatgtgttgtcagctgtggtgatgtgtgtcacaagtaacttcttttttttgagacagggtctggctctgttgctcaggctggaatgcagtggtgcaatcacggctcactgcaatctccacttccctgctcaagccatcttcctgcctcagactgccaagaagctgggaccacaggcacaggccatcacagctggctgatttttttgtattttttttgtaaagacaaggtttcgccatcttgcccaag

SEQ ID NO: 49863 - DNA, 2328 bp, Homo sapiens
tcctgtctgccaggccccagctcccaccagccactctcacaaccttgggctcaggctgagccactccacctctaaggaggctcttcgcagtggggtctctaacctcagggcttcttaatggacctcccaattcatgcatgcacacccaggcatgtgccccacaccccaaaccccaagtccatgcactcacacccagcatgcgcccattgctctcacaccccttcactcaccccattgggcctgactttgcactcgggtttcttccagtccctcttccggcagcttgtctgctgcagcttaaattccagcctcacaaatattccagctgggaagggctgcggacagacaggcaggcagaggatggccggtagccagctgagggtgcagagcaagccctggtgtgatccgcacctccctcacgcagtcacattccagcaggctggacagtggccttttctccaaagggctggggctcagagcccaagcacttctgtcccccttcgtgggaatgcgctggtctcctggggtacgaccctccccgctcctgcccgggccatgctactcaccgtgtccacggcgctctccacactggtctcctggaaggcccactgcacgggcgggtgcttgtgaaattcctccagggccacctgcaggccccggcgctgggcttccgtgagctcggcgacgcccacgcccaccgcacccagccacagggccagagggatcagcagccgtcgcatgcttccgtgtcaccctggccctgcgaagcgggtgtgcgcccctcagctctccgagccagcccgagccgcctcctcccgcgccctgctctggggggagggtggggagcgggggcggggtccaggcctgtagaacgctgggcacaggtgaaggagcctggaaatggccctttctccaaattgaccttagggtccgcctggccctctccgttccctcccaccctgcccgcgctgttccctggggcctgcagttttagcaaagttccctgcccacgctaggaatcagtcagttcgcactcccaccctacacccctaatcttgcccattgtgtctctccctgggtctccggcacgacccactctcctccctgccgtccccggagcccctctctcctttccccgctcagccttctccccaaccgctactccctccccgtccagaatccccctgctcccacggggttccccccacgtccccgaggtccaggccagccgggggaaggggcaggggccggaggccgaatacttttgggaggacctaaacacgtgggagggtccggacgggtgggagcggcgggaggcctaatcctcccggcgcgggggctgccgcgggccaccagccagccccagtcgctaggaatgggggtctcgcgccgcccagcccttggctttcccgcttcaggcaaaatcttccctccttcctcttttttctggggccttccccacgacccctcttcctagcccttctgatccgtcccctgatgcatgactggggccaccggaggggctgaccctcccggagagccccgtcggtcctggtggtcttgggaccggagagcgacagatgtggaaaccgaggcccctcagtgaagagctgccagggtggtcgccttagagcaaaggcgttcctcattccgcctgcgcagctgcccctccgcccggctgccgccccagcccgcttcccctcctcacgtccttccctgcgcctggaggtctcccctgaccgtcccgcagctgaaatcttggcctcgctgtccgcctcttcccgctcttcttctcgcggggcggcccccacctcctcccacccccacctcctggaccccctccagcaactctggctcctcccctccccagtgggaccggcctctggggcgggatgccctcccgcgccctccctccccatcccacccccctccttcccctcgatccagccctcatgaccctgaccctggccgcggctgcaggcggctcgcccaggcgcgcagccctcggtcccacctccctctggctcgggcctgagcattccgcagcctcggccggcccgggcctcttctccgctgctctgctcccccaaggactttctgtgccccactcctacccaggcagggctgccctgtcttgggtcctttacgggggaccattccccagcgtccctgagacactcatcctgggatttcttcccctaaatacagacattctcaaaccaaatgagacctcgaggtccctacacctgatcctgcctcccactccctgagccacactgagaaggaaggtctctcctttagggaggactctggcgcctgcaaccttga

SEQ ID NO: 49864 - DNA, 901 bp, Homo sapiens
gggcagcaaagcgaaaccccatctcaaaaaaaaaaaaaaaaagaaaaaaaaaagaaaagaaaagaagggaagccttagataaattaaatttaacagagctaactgagcaaagaacaatttgtgaatccagtggcccctgaaccagaagaataggttcagagagactggagctgccatgtggccaaagaagatttatggacagaaaaaggaaagtgacagaaagaaaacagaagtgaggcacagaagcagccagattggttgcagcttcgagtttgcctcatgtgaacctggtttgaacagttggttgcctttgattggctgaaacttggtgtttggcacaagagtaggttatcgtttgtttacacatccagttagctcactgttcactagggaggagaaacctttaggccgaacttaaaacacataaggaggcagctttgggctaaacttaatgattttccctctttagtcaacgtctcaaaactttaggcatcaatgtcaccctgtcatcatcataaatgtacttatttggtcccaaatcctactgggaaatagtagaacagtgggttttctaaggtgggtaaaggtgagagtataggggacctccttgtgctggaatctcctgtttacaatagaaaaacaaaacctggtctgtcttaggaactatctgcttccttgaagtttcagtttgattatgtcacatttatcatgaatgactccattttgatgtggtctgttgaggcctagtgcacaagctgagtccaccatggcaaatgcgacaggagtgggtggggataaacatatgtatctaatccaccatgtttaactagaatctatgagttacttagaaagacaaattactacatttatgtatatatatacatgcacacacacaattttt

SEQ ID NO: 49865 - DNA, 3695 bp, Homo sapiens
tttaatacctgtactttatgagtgccccccaaacaataaaccaactccccaacttttaaaatgggcaaatagaaaagtgggcaaatggacataaacaaattcacaagagaaaataaaactggcaaaaaataaccatgtgaaaaaacaatccagctaactagtactctaagaaatgcaagtacaaaagatgagaaataaccatttcaaactaaattttttttttaaaaaagtctgtgttgtcaagtatatggaaaatgggcatttctcagggaaaactaatacgttttcctggaagataatttagaaaacatttaaaaaatatattccttttatacagccataaataatcatgtttaaaagaatatctaataaaatggaagaaaattcacaagatcgtgttaagtgaagaaggcagaatacatcttcgcaaggcattattccaattatgccagacatgccatggatatacgtagagaaaacaccggaggcaacataccaaaatattaaatgtaattgactctacgaggtaaaactgagttttatgttcccctatttcctatttatgcaatagatttaaaaagtatttttacgactaattatacaattcaaaaattgcctgtgttgaaaagcatgaaagtacatgaaattgtactaccctggaaaccccaggaagtgtttagtttggaaagccagggccacctgctagtgggtgagtcatgggcacaggctcgcacctgccaccgcagacgccacacaggctgctgagcctttccaagcgaaatgccccacgtgcgccaacggccacctcggccgtcgccccacgcttggcccgcagccagaggaagcccagcaacttctgctctttcttaatttctagaaaagagtgaagagaggccttttcaaagttcgcaggatcgggcctttttgtgctccactttggaacaaatcggaagctagggccttccaggtgcgccaccgccgtcccgggaccgccgcggccgcaagcgtccgcactgcggccggggtgcgcggcctgagaaaggcccgggcaacgacgctccgggggcttgccggagccctctttgaagtctcccgacgggctcccagcctctcataaggcagctaaggccgaacaccccggtgaccataggccagccacgcggtcgcccggggacgcgcgtgctccgcagggacaaagggtcgggaaacttgagctccggccagtcccagagaaacccgggctggtggtcgccatggcaacggagtccgaccctccgaggcctgccgccctggcgcggcagtggcttgagtgacccggcccgctcttggcgggggcgcccgcgccccggccccggcagtccctccccgcccccaggccgcggccgcgggagccggcgactgaccctcggcagctcctgtagtcacgtggcgctgggaacccggcggggggaggttggggacgggcctggcagttgtgaactcgaacctgccgctgtcgccgcggcggggcggggagcgagagtgggccgcggaggccggccttcgggctccatggacgggcgccgcgtccctgcacagcccgccgcagaggtacggccggggcaggggcgcggggccaccgcgggcccgcggggggccgctccacctgcggggcgcgtgaccgtgagtgtgcgcgaccgtgtgtgagtgcgcggggggggacgctgctggatctgcgggggtgggggagcgcacctgcgcacaggctccgcgagctgcgccgtgcgtgggacccgaaatggctcactcgcaagaacgggacccgtgtgcccgggagcgtggacggaggacacgcatcagtacaaaagggcggtgtggggcttctgccacccgcggccagccgcgatgcggaaggggattctgacggagtcgtggtcacaccagctggccctgcgcagccccatgggaaataggcctggaattcctgtcgggaggaggctgggggaaggggagccagcagggattccagagttcctgccataggccggcctttggccatcagggaaagcccagactctggccacagaatggagaattcgttccgtgaccttaccagggaagaaagtgaccccgaaagacagcagtgtgcttccttgttgaaggggcacattcatttattaatccaatgtccattaaggtcactctgccaggcaggatgtggggcttatggctggtgcgtgtggctttgtggggggaggggttgtggctggtgaggacacaaagctgactgccctagaggagctcagagcctcacttctgttttctcttccctccccacaggtaaggctggcctctctgcagtcagaggtctgagctctgccatggggataggggtgtctttattactgcagttttctctaacacctgggggctaccggagtgtgggccgaagcaggcgctgcagccgcggaagtatccccaggaacatccccaagaggagctggaaaaagcctcatccccagctctgcagtctccagggtagagtctggcctttgctgtgctcccaaaccacgccacaacaggggtgcacgggcgtccccatcccggcggaaggaaatggccctttctcatatcctggggtcttccctgtgcacagtctgacactgggaatgagtgacctttgtgttccctgagaagagagagtgcgctctagggaatttagaaggatgtgtctggagcttgtgagcaggcacagaagggcccttaggagcctaactgcttccttcctccttccgcggaggaggctcctgtgcaggaatctgggctcccctgagctgtggaagagctgaacatggggcagcccctggcgaggttggggcaggaccgggcaggggactgagattgcagtctcatcttccctccccttctattgccccagtaatctccagcaccccgagggaggcagagccggtgatcaggccccgagggcagcaggctgtgggtgttccttggattcagggagagccttccttcctgcaatgtcctaatttgtgtgggtggaagagggcaggcgggcagaatgggggcacagtctgggcaggcggtggtctggcgttagactgccgggagtagcacccagggctctgctcctgttccccgagaagggctgttctcacttgtcctccagcctcctacggagactgcagttagtgatgctgaaagtgcctcccctgtggggctaggaatgaaaagctatagacacctttttctctgagatctttgcaaacccaggcgctttagaggaaagaacactggcctgggagtttaaagacctgttccctagtcttgattctgctgttggcttactgtgtcaccttgggcaggtctcgtcatctttgatgtctcacagttgcttcatctgttaaacagggagctcagtgtctgtttgtccagcttctcagagttgctgtgcagctcggatgtggcataggaaacagcagacacagggagagggcagcataaggcactgtagggagcagtggccacattttctggtgagtcctgtggcaggaatgtttgtgcattcagcactggagcatttactccctgtctgacactggggtagctgccatgagggggattctagtatcagagtccctcccttctggaagtttccagggcaacaaagacataagacaaacatccttgaaatgtta

SEQ ID NO: 49866 - DNA, 2475 bp, Homo sapiens
agaacctcttctaggtactcttctagaaaataagctaggtgtggtggtgcatgccagtagtctcaggtgtagttcaggtgggaggatcccttgaggccaggagtttgaggctgaagtgcgttatgattgtgcctgtgaatagccactgtactttaacctgggaaacatagcaagaccccgtctttaaaaaaataaacaggagaatgagactccaaagtgttgatagctagtgatgtgtggcctctttatagggtgtgtatgattttgtattttacaaatccttctatagataatataaccaaattaacggtaaaaactcagtaaggtatgcaggcaactagaaaattattaaccctattttatagacgaataagtcaaagtccagaaacagaaaagtatcttttataaaaagtacacatgaagttagtgacaaaatcgaatctcagtccccagttcctgctgtgctactgaggctaaaccgcagccgggcctgtggcaaatgtttaatcagctgttgactgaagaaaataaggtccgcctgcccaacagcaaccgtttgtagagtctcagaggcccagcttctgtctgtatctacctcatgccccagaggcagcttctagcagctccggagagcatcctgccagtgggagttgacccagctgcgccccctttgagggagaagtgtgaggaatttccttacaatggggtggggagttgcgaagatactccttcctgaaggtctggcagtctggaccggggtggcaactgggcggagatgattccgctcacgggaaccctacctagtaacccgacctagtaacgtaacctcagagccgttcctcagctagaaaacaaagggattaggccgggcgcgggtttgtaatcccagcactttgggaggccgaggccgcagggtcacttaagctcaagagttcgagaccagcctgggcaacatggcgagacccccatctctacaaaatatttaaaaagttagcaggttgggaggttcggttgagccacgggttcgaggttgcactgagccatgatcgcgccactggggtctgagcgagaccacctccctgaaacagaaaacgaaggggtcgggtataatgatttctaaggtccctcgtagtgaaccctaaaagttatcacaccccacggtggggctatcgcggcttgagggcagccacagcctcagccggggtttctgtccgggccctgatgggtccccagcagggagaaacagcgtccggcgcgctgtggcgctcggcgaacgtgcgctgagttcaggcgttacaacggggtcgcacgcggagtccaggcctggcaggggtgccaggacgccgccggccatctggggcccgacctcccaaggtctcctccccgcggccggcggctagcgcgctcacggcgcccgggccttgcgcgcccgccgggggcgaggtcagccctcccccctcggctattggctccagagaacaaaggagccgccccgcgggctgctccgatagggccgggcgggtcatctgagcggcgcagccaatggagtggctgggcggccccggggatggccaggcccgccagccaatcaggcacccgtgcccgccccgcctgccccgggaatggccagggccgggagcccggtgcccaagtcgccctcggggtggcagttcccgttaaccttagccacaaagtcaaaggtatttatttccccgtcgcctccctccgagtccctctgcattttgggcggggaggggcggtgcgagggatggaccagcgcccggccccgctcctcccgtgctgcctccgcccggcccgggctggggcggagggatggggcgggggcctggggtgccccgagccccgcgcgccccccgagccccgggtctcaagcgttccctctgccccgacacagccgaggggaaaggggcgcggccgagggtggggagggcgccaggccagggcagcgaggttaggagggaggctagtgagaatggagggaggacgcggtggcgagtagaggggtcgcccgcgggcggtctctcctgggctgtcccgttgttccgagttccccgtccctgttcgcctccctgatagatcagtttctgggggcaggaaccccaatgctcgctgcagagtgacagacacatagtaggtgaccaataaatgtgtgattaaacgagcggggataaggattgggggtggagataagtgagagggaagcaccgcagaagttggaagtgtgtggtgtcgggtgtggcggagaactcctctctaggaagatgggcacagcagccgcgaactcggtggggcggggtgcgggcatcccctctgtgaagaacgttgaggatatctacatgtggaaggtgtggagatgggtcctccttcggccctttgagcaagatgatctgagctggggctgggtgtggtcagagccccaggggttggaggcggacgacagcccaaggcttcaca

SEQ ID NO: 49867 - DNA, 1550 bp, Homo sapiens
acatcaggggtccttcgtggtctcagtttcctcttttgtaaaatgggaattatggctgttttaccttctcagcaggtatgcttacaatgaaagaacccctgcccatgtcgaatgtggctatggatagaaaagctctttggaaaagagagtgctttatgggatgggaggggggctggggaccctgagttttgtccttgtcccacaggcccattctctttcttctgcttctctttctgacagatggcaggaaagggacacagccggcgctgatgctgggaggcctccagggatggagagtggcctggctggcaacggcacaggtaagagagaagaaagaggaggcaggggagcggggtctcctctgctgaggtcacgtgcccttatcttttctaaagccaggcgcgagccagtgccctcagccagtagctagtacatcccactgatgcagaatttcagggtggggaccaggacttagacagccatgtcaaagaatggaacaatgacagaggctgtgggagctcaaaaaatggcaaagcctggtccattaacttgcccagcaaggggacacatgtgcacccatgccttgtagaaattgaggtgttatttacgtgctagaacagggagtttgtggggttatactaattagacacggaaaactggcactctaggtaggacgattggaacaaacctgtggctcatcagtcaggacattgtcttcagttcagtccattaacgcttcctgggggtcactcaaagttcagggtcgttattggctaagccgcttagagctggttgtgatgaaatacatgctgccagtggaaagtttgcccgcacagtcatgtgcttttggctggagcccctgcccagcgtccctgcgcctggagtggagcagcccctggcgtctgtgtgtagcacttgcagcccttcctggagtgccctgtcgcatgtggcgtgtggcccagctgccagaagggctctaggccccttggcagggttgagtccagagcacaccggctacccttgggaaccctgccctttggcacagtgtgactcgggtttctttacctccctctcccctcccaggggaattgccccatagaccccagggccccttcctcattgcctctgtgggaagagccgcctcccctcccaggaatatcatgtcaggagacccaagactgagacaaaaatcaggcagcggggtaaaagagaaacgtggccgcaagtgcaaaacatggcagcgtggtgtgtggacacagaccctcagggagcctagccatgcagctgcgtgcctgtccaaggagccaggtggtggcaggagcaccctagctgcatgtgtgttttggaaattccagtggaactcagagcacatgtgcccagcgtgttatagaaggccctttccccagatagactcatacctgggatcctgagtcactgtgaggttgctctggttgatgtgagctgtggtctgctggggtcctctctcctctctacggcagcttctggggaaccctgtggttttagagaagagtttgaaaaacactagccta

SEQ ID NO: 49868 - DNA, 1782 bp, Homo sapiens
tactacttgtgacttttaaaataacttttcctctcaggcctctgtttttttgtctgtcaaatgtacaccctcaggcacgttctcactggggcccaggtttttacttccctgtcgtcacacactatttatgtctgagggtctcagtcccagggcggtgcagtggaacacaagctgggccacggtgctgggtcacggtgccgtgttcccgtctgtgctctgctacttagagctgtgagtgttggaggaagccactctgtgtttcaattttattttcccgtctataaaatgggataaaacccacacaaggtagggtgcacatggttattggaaggttcccacgagatcataacatggaaaagggctttgtaaaaggcaaagttatgtccgagtaagggacattatcattaaatggcagctggaagctgtaatttggttctgccctctcacgcccgctgctactccagacgtcgtaagttgctcttttatgggatatctctggcttgactgcgggttccgttctgaggaggtggggtcagcaggggcctgatgtcttcttcctttccctctggtcactctagtgatataacccaggccatatagtcaggcagactttggcgaaactgtcagcgagggcagctcctcgattcggcccctttgactattgtctccagtcctgaaaccctcgcccagggccgctccgccgccgggctccggcgctcagcccatgtcacccggggaaaggccggcgcctccgtccgaccctctttcctgtcgctgggggcggtttgtgggcctggccttgggattaggaaaatagggatggtgctataacggccgaatgcaggcctcagggaatcccgaaagggggaatgtctgggtcggcggatcggggggcttgagagggcccgctccgtgggacgttcaggccccggaaccggcccccgcatggtcgccgctccggcccgggcgggcgcagcgctggcagccccgttttccgccagccgggctgccggagagttagacctcccagcctcacggggctgctgtgcggctgcgacgacgccggcgactgcggcgctgcagcggagacggaaggctcgggaggcggcgccatgtgagtgcgcgcggggccgcgctggggccgcggcgggaggttaccgtatttaccgaggccagagccggaccctcgggggcgggtcactgcgggcgtgctaccgtatttgccgggtcccgcgcaggtcctttccgggagtgggagcgccgggacttaattacgtatttatccagggttgcgtggctccgcgggggggcgctgcggccgtggggggtgggctgcattcattccctctgggagctggggcttgcagtcgggcggggtgggttgcggcagcagggtggaggcctacgtattttcgtgggggtggggttgcgacgcagagtttaccatatttctccagggttgctccggccgcagaagttggcaaggttgtgtgtaaggtcgggtggggtggggtcagctctcccgattaatgcagctatttgataagagcaacgtcgcgggacgcttgccgtctttatgggggcggggagaaggggcgcgggtgtcgctgcgggagagttaccgtatttgcgttgagcagcgcagactgtagagcaaagagctgcggccggagaccggaggagcaggggctcagctgggctgtgagtgtggcatgggaggaaagaacttgggggagagacggggggcctttcggcgtgcaggcggggcctcagtcaggggta

SEQ ID NO: 49869 - DNA, 1195 bp, Homo sapiens
agtccaggctcaccttgctctgtgaccttggcaagtatgttgacctcactgagcctcagtttccccatctttaaagtggggctcaataaccctgctccgcccctttctcagggctgttgtgaggacaatgggaaacaatttaagaggaacacagtgtcctgggaagaggatcctttggagaagcagcatgaagggagctgggtttgggggtgttggctgggcactgagggtgctgctcagccttgggccaggctttgctgtgaggataccaagaggaatcacgctgagaccagtccccctgggagcccacaccctggttcagtgacttggaaaccttttgaacacatgcctcattttgataaacaaagagctgccgcctttaatgtttaaccgaggtcactttcaagtttacagggttgtgttttttttcctgttttaagcttcacaaaaatatctttaaatcactgataatgccacccttttctccaagtttggggtgcacttccctacctccccctgtccttgagatctggttggagggataagacatatctagacgaaggtaactgaaaatcctagctgaaactgaaactgaaaatcctaactgaaactcatcaccatctgtctagtgtcttgtgtggctggctggcatggtgctaggtgctggggttgaaagaaggcagctctgtccttagggtgctgggagtcgggggacagaggtggcatgactgaccctcgtgcagtatgatcagtgagagccacatggttgtgtcacacggtgtttaagcccggggtggaaaggtcagggaaggcttctaggagaaggtgcccttgggaagggactggaaggagtgtaggccgtgcttaaaaggcagtggaggaagaggaacaccaattcccagcaggggaacttgagcttgaacaaaacggggcgaaaggtggaggttgtgggaggtgagtgtccctgccaggctgggggttggctaaccctcgtgttccccgacccctctctctccaccccccacccccgcccccgcttctgtctccctagggactggtgattgcagctggaagtgcccatgaccgagctggcgtcctccgggggcgggtcccctgcgggggacggggaggagggtctgggggacgagcgaggcctggtcatccaccaccctgcagaggagcagccctaccgctg

SEQ ID NO: 49870 - DNA, 1256 bp, Homo sapiens
atgtaaaaatgttttgatggttaatgatccttacaatcagactcagacaaaaatgtcccctctcaggttcccctttctgtgcccttcttcccctgggcagtgcctatcagaggctcctcttctctcccagtggcatctgctttagaacaatccctgctgctggtgtcaatgaggtttaagcccttctcagggggccatttgcatctagacaaacttctaactgttgggacatatcccagctgggaaggactgaaatccaccaacttccttggcattcatgcctttctttccagtccagatgaaatcattaaaacactcttttttcacttttgagaagaagagacagttggcccacatgacagcaaataactactgattaactttccatttaaactgtttattttgcataatggcatgaaagagaatttcaaacacaggcacgtggtggcgttcattagcagtcaggaagctcaggaagattcaagagaggaagaagaccgactggagtctcggttttactttctttttctcttggagctgagctataagacaacaggactgaacagggagccaactgtttctttgaacagtaaatcaggtaagcccagatttacgaaaagttctgcagtgttgatttctaggtcccaagccatgcacaaacattttcatttttcttagaacaaatttgtcctattttaagagaagcaatttagagtgactgccttttccttaagtggagccagtttacaggaaaccgatgtaatttactttacacattactggcaaagaaagaatttccatagtataaagtcaataaaaagtgctaactgggaagaatttgggcattaatcggtggctttcagttttctgtgcttgtacgcttggtctatgcctgccagatttaagcaagagaaactagctgatgaaaacgtaccgatatttctcactccatagtagttcctacattgcaagggcttcataaccaggggctgttggggaatgagaaaaattcaagccattaatggatcaagtgaagtgtatttccagcttaaaggactgcacggtttcccagagtcataatcttcattcactgagtctctcagcaaagactcaacatgagggaggaggtttggagagagtagaggagggaaggaggcaaggtgggaaaagaaagagagggaaagggaggactgagcctaaggtgtaagggaaggcacacctacagagaaagctgacagaagcgaagagtgtgcagg

SEQ ID NO: 49871 - DNA, 941 bp, Homo sapiens
catattataaaagagtgaaaattggactgacaactgacttctaaaaagaggcaaaaaaaaaaacctgttctgcacaagacttctattacacatatacaaagaacaccctggattctgtgatagttaattttatgtgtcagcttgattgaactaaaggatgcctagatagctagtaagatattatttctgtgtgtgtttgtgaaggtgtttccagaagagattagcatttgaatccgtagattcaaacgagtaaagaagttctgccatcaccaataggggcagacatcgtctagtctgttgaagttccaaatagaacaaaaaggcagcaaagggcaattcattctctcctctcgagctgggacatccatcttctcctgccttcaaacaatggagctcctggttctcaagcctttgaactcttggacttacaccaacaacctcccacacacacacctggttcttggacctttggcctcaaactgggagagttacatcatcagcttccctggttctcaggccttcaaacttagattggattacaccatcagctttcctagttctccagctcacagacagcatattatggggctctcagcctccataatcatgcagaccaactacacacacacacacacacacacacacacactcacgcacacacaatgggttctctatttttggagaaccctcacgaatacagctgccattaggaagaaggtcaggatcactgagaaagcccagtgcccaaagcccaggcacatagggcatgcctaagactgaagctatgtaagaacaacaaagaacacttctctgcccttgccatatatctaaaaaaatactgggtgattaacaagcaatccagtctactatagggaagtgtcaaagcctggaaccaccctctatgaagtggagttatgcagagataactgaaatctgagggt

SEQ ID NO: 49872 - DNA, 813 bp, Homo sapiens
ctctcatgaactttggtctcttttgtgggacgattagtaaaatttttcctttggagaagacgcctgtcttcattctcaattcctccacttttgtctgccctgtagaccaacacgtatcacattccttcaagcctacggtgtgtccaccacgctctattcagttcttttataatcttctccatgactcattttagcattgccatcagtatcctttctgactcacctgtgaacactttgttatttgtgaatatctgccaaaaaatgtattcctcaatgcagcctgatccactcagaaagcttggattgggagagctattgttgctggtcattggctaacataacatagtttgactggcttttgtgacaggcaattggctgttttaaaagaaaagacctcaattcagagaaactcctgccaccagcaattttatttttgaataaccttttataagaaatgcactcaagattttgcaataaaattctgtgtgttggttttagggtaggcttctagctgtccaattaatttgtctcctgaccagggagtggcagcattgtacacatgttccaagaggtttgttgacttttttggaaaagtctctttttccacctgtggaatcaaggacaatacacagcaaaaggagccatttcctgatgctagctccattgtaaatatgtgacctttggcaggtcatttaatgctcagtttccttgcattttaatagaaattttaagatcagttttgatcacatcacagggaatttgagagagcaattaaaataagaaggatgaaataactttgaaaattataaatgt

SEQ ID NO: 49873 - DNA, 1494 bp, Homo sapiens
tatagcatgttcttattgttgatagatgcacgagactgccataaactatagtcttaatctcactgaagatgttatttggactttctcctcttctgctgctcttagggtctgtttttccatcggctcatgcagtcttctactgttcacctgtgtggtgagccctggctttccattcgtccttgcaaatggagtaggtagtcagacacctgctgcctctgccctcgtggaaaccctcctggtacccttctccccgctggggcagtctggttaaggactctgagtctgtcaggcagggttttcaacccccataaagtccaaaaaatgggactttgttgtgcagtgtcactgccctatttaaacttacctctcaccagatagattgcccaattcttccagtaaagggctgtttgccttgtcctgactgcactctggcttctcttgtgaaccaggtcattcgatggatcctaggatgtcacatggttgtctcgttttaaagaagtaaatgaccaaagcagataggtttagtcataaagccagaatggttctagttaaagatgatggaaaggatccaggggaagtcttcagttttaaaaaattttaatgattctatttaaattttttttttgattagagaatattcaaaacatacaggtgggcaacacctcaaaagtacacccacacacacctcaccttctagatgctcggtttccccccctagaggcagtcagtgttgctactttgggtgtttccatctgaaactatcctacgcgtatacaaacaaataaacatatatttacatatttgtgtgtatttgcatacattgcaaagaatatatacaatgttatgttacacaagtttttgtaacccgaatttactcataagggggtgataaattaggggaatgacggcggtataacgtagaggcacattagtgcgtatatgattttcttcccagtactgtgtattatacaatgttttatcccaagaaacacgaagttcactattcagctcttaccggcaggtggcgccctctggctgtacgtgatgcccactcccatctcctttctcttggatcagttctcctctgtcttggaggtacttttccatgcttctggctcatctttgcacattttccgcttgtgtccttgactcagctgacttcactcttccttacagctctttcctcaagctaacttcaccttatttctaaaagtaaagaggtttcttttttcttttttattacagtgtttctacatttataagaaatttaacttgtcttctcattgtactaatatctgtattaagactggttttttgcttttgttagcgctcttcacaaagcactaattttcaacaacgtgatccaaccataactctctcataagtctgttgtttttaacatgaaatatttaaggaatgcaagatttttcagcaatatataaatgttacagcagaaatgtccatactgttccccaccaccactacccgcacttt

SEQ ID NO: 49874 - DNA, 2010 bp, Homo sapiens
gccaccgcgcccagccttgcttttattttttaatgagatgagtacataaatagcctcttcatgcttttttcagctgcagagtgcaggtattaagacgtaaatgggatctagaattctgatttgattctgtttctctagcaccgacattaagatagactcttggggatccagtgttcacaggcactgttactccacctggattttgtctacagagtgaattatctaagacaaataaactatacattttatgtatatgtatatataaatgtacatatacattttatgtatatgtatatataaatgtacatatacattttatgtatatgtatatataaatgtacatatacattttatgtatatgtatatataaatgtacatatacattttatgtatatgtatatataaatgtacatatacattttatgtatatgtatatataaatgtacatatacattttatgtatatgtatatataaatgtacatatacattttatgtatatgtatatataaatgtacatatacattttatgtatatgtatatataaatgtacatatacatttgcaaaacttgagtttatatgcagctttttaaggaacagaacacttgcttgaagtgagtttccccaaagtatctgaatgcctgccacactctcctctcccccattacatggtatttcctcacagttcagattggcaagtgcacttggggtcaccccagacacataccttgctcaggagcctctgagtgcagctcctaaatatctggggcctacagcctagacaacccacttaagtgctagttactatacctagtctctcagcctattataattgggactctttcaaccgcacatgtcgtaagcaaaagattgcttaatgatcgtatactaaaatggtcaggactcaatctggcttcaagcactgctgaattcagaattcaagcaatacaatcaggtgtgagttgtttgttgtttctcacctgtcagctctgacttccaggttgtcttcattctgaagctcctggggtggtctttggcagctccaagtggacttttcacagggcaatgatggctgccacagctccagcttacatccgtctaggttcaagttcagtgaggaaagcaagagcctgtgatggtggcataacccagaagccctaagatttactctgatatgacccattcaggccatgtgcccacatttgaaacaatctccatggcctggggaaaatgatctgcggtttaagtttgggtcacaggctttatccctggaactaaggacagagccccaccatgaacacttagcctgataaaaaggaaaaggtaggtccaaaaatggaaatctggggctgttattagaagaaaagagaatggatgcagggccatttcttgttagattctatgctagcactaactcgatggttctcaaaaaaaatttccccaccacaacaatttcaaccaagaatggtggtgtaacttgagaaagtccctagaggatttcacaacatctccaattgcaaaagttctcccagctcacaccaagaaccactggcctactcgattattccccaaatatgtcctgttgatcacattgcaaactgttcaatacaaacggcttaaacaaactccatgtacagctggaaaaaataattcattccatttattgattcatccaacaaatatttagaagctgtcctcccaactccccctaatatctctcttgtgtatacaaggcaggaggatttgtttgccattacaatttattgctgacttccaagtttatatataccaaatgctcctaaactccaggctaacatgtccaaatgccttctcaacatctcaacctgatctctaaaaatcctctcatatttaacatgccccaaattgaactcctgttttctgtcatttaaaaatgttccctccatagtcttccatgtcttggtaattaacaatactttgaaacaaaaacttggaagctgtcctttgctccccttcttttcttacaacccac

SEQ ID NO: 49875 - DNA, 3009 bp, Homo sapiens
gagaaagaaaaggagaaaaaaagagcatgtgcactatgggcttaatccactagaaatcttttgaaaaatatgtagaatttatagcctcaacttatgataccaaaaaatctcaatctgggaattttttaaatcccaaacttatagtgatcccaggtttctggcagaaacaaactaaaatcttctctgaaaaaagtacattcatcaacctaggtttcaaatatatcccacagataaagttccaacaaacatgaggtcaaaatttttttttaaatcacaaaacatataattaaataaaatatttttatataaaaatcccacagctaacaccaacggtgaaagactgaaagcctttttgctcatatctgaaatgagatgaggaggcttattcttgccatttctattccatgtagtactggaagttctagccggagcaagtaggcaagaaacataaataaaaggcatccaagctagaaaggaagaagcagaagtatctctgttctcagacaacatgattttataggtagaaaaccctaaagatttcaaactcagacacacacacacaaaaaatctgtttgaactaataatctgtttgaactaataagtaaattcagcaaagttgcaggatacagaatcaacattcaaaaatcagttgcggggccaggtatgatggcttatgcctataatcccaggactttgggaagttaaggtgaaaggaccacttcagtccaggaattcaaggctgtggtgagctatgattacaccactgcactccagcctgggcaatagagtgagactctgtctctttaaaaaaaaaaaaaaaaaaggagatgaacctgagtggactttgctcatgcccacactaaaacctccacccggggaagttacagtttcctgttcattgtacaccacctatatgctggcatgaggactcgctgagtgcagctgagaatcctctgcatgtgatgacgatgacgcaccctctccacggccccataagccctcctgtcactttctgtcggggaggcatggctttggagaataccctcagtgctctcctcacttgtacgaagtacaaggcctcccattaatgaaaacctgagttcccgctaaaagttgtttgttacttggcaagtgaacaaacctcgtttttaggggtgaaacaggaggaatagattaaaccagtaagaaagtgaggagtcaggggagggaggtaaatgagataaatcctgaagttcacagcagcacctagtgaaagtgaattcctacttcaggaggggatttttttgtacatttggcagttttcctaatattttgttgcaactttttgtgtgagtgcttctttggatctgaggctccaggctttctctgtgaagtttgacaccacagggcctcatgccatccgctagagaaccctaaagatttctttagagttagaaatatctgtaaaagcagactctgggtttttgcagaggcaagaggtggtcaaaagaattttcccagtacaagaaaatcctctcctttctgccatttcatatcctcctcctctagaaatacttttccaggaggttttcctggttgacccaggcagctaaggtagcagagggcagggtaattcccaagtgcctcccacactgagcaacagaattagacaccacccatcacccacatcacatgagcaaaggctgtgaatgcgaagcccagacactactccctctgcaactttcctgcggccagtcacttctggaaaccttgccctgcatccctcttccttgtctcagctggagtggggtgagaagagcagtgggaaagcagcagggaagaggagtcagccctgaccacacttccctccccagctcctccccgtccagcaatctgagtctcctctgggagacaggcaaaccatgatccgataactgcagttgtgttgtgttgttttgttttgttttgttttgttttgttttattttgttttgtttttgagatggagtctcgctctgtcgcccaggctggagtgcagtggcgcgatctcagctcactgcaacctccacctcccaggttcaaaccattctcctgccttagcctcccaaggatctgggactacaggcatatgccgccaggcctggcgaatttttttgtatttttagtagagatggggtttcaccgtgttagccaggatggtctcgatctcctgaccttgtgatccgtccgcctcggcctcccaaagtgctgggattacaggcttgagccactgcacccagccgatagctgcagtttttaacacgaaaaggattgggcaatgacagagttgtgaaatctagaatctggtcctgatgttaaagaacccaagatccaatggggaatgagtgagttgacaaaatacagttaaaagaagtgactagaaaacaaaaaaagaagaagaatcatttcctgtttatactctgaatggttttaaatccttcaataaatatgttgcacacaaataggcttgagattatctgcatgccctcgtgccagggccgtgaagtcatgcccatctgtgtctgtgcagttttaccaccaagactgagctgtgcaaagagacaaatagctgtcagcttttccaagtaaacagaagcagaaagaaggagtgtcacatctgactttctacagagcacaaagattcagacttctaaggctattcacaggaggggagaggggaaaggatgggaaggagagacaggaatagaggaagtggggccgggagagggatcagatagaggggagaccatcttcactcagaggcttggaaactccaggggaaaaatacagaagttgcccggcagaaaggggccattttgtgcaacaacaacccagggggaacaaagaaaaagaaaaaagaaaaccaccaagttgacatttgtctaccagagtaaaaaaaggaaaagaattgctactggatctagccataaaaggactaacttagagacactgaagtacaggaattaatactatcttcagctaaggaaagaga

SEQ ID NO: 49876 - DNA, 1960 bp, Homo sapiens
gctccttcattatccctggccaggctctccctccttcacctcattctgctccagtgacacatcccaaggaacagacatgcccagtttgaaacagggcagctcctgcaaagccccactctggggtagcagagtcatctgccttacgtggaaacagaaagaaaaggtcccagaacagagtggcagggccttgctttagggcagagaggacattcagcaggagctgcaaatgtcagcacccaaggtcatcaggacaagataacgaacagacttaagtggccccagatttccaagtatttctacttcctctttttgaccatatagctgggcccttgatagaaggacatttcagaagcctctctcggcctcagacagttttggctgatatccaaagcagaaagcagaagctgctctttctggcttgttaacgtctgagctcccggaagagattataccagaaaagcctaggagatttactggaaattatactagaggagactgtgctagaaatgcctgtgattatagagattatgctagaagagatgttgtgaagacaaagggggtggggtgcccctcaggcggcacttagggagtggggagctgtcctggagaccctgaggagtcagatgtggagggagaggagaggctggtgggaccaggcaacagagggcgatggtggcctgaggatgtgatgagacctcagggtgatatgccaggaacaccagctcctgggaactgcagctttcagctgtggcaaaggcaggtgtggtcccacaccatgagaggcacccctttatggggaacccggagggctgcacaaagggctcctcaatagtaaacaaggaagggattttgaaaacgcagtgctggggcacacctgatccccctctcaggctgtcccaagctgtctcccgtctcccagtgtctgagtttgctagggctgccgtaacaaaacaccgactgaggggcttaaacaggagaaatttcttttctctcagttctggaaggccaaagtccaagatttggcaccagcggagttcctctgaggctctccttggctagtagatgccgtcttctccctgtgtcctcaggtggccttccctctgggcctgtcggcattctgattgcctctaatatgacatcagacatattggatgagggcccaccacaatgatctcattttaacttaattacctctttcaagacactgtctccaaatacagtcacatcctgagctactaggggtgagggcttcaacatataaatttggaggggacaaaaattcagcctctcacgcccaccacctcccaccctaccccagaagcaaaaaaggtttccttcctgcctcaaggactctggtactctccaggcttgaggaccagccctctgtccatgctgcagtatagattgagatctttgcagatggagttctgaatatcaacatctgtgacaactaaaagacaacccccctgcccaactttggccaaagttccttggagtcagggtggtgagtgggcaagtaactcagtcctatcaaatgtgcccatggacactgaggtctgagcagccctgcgcactctgcgttctcatggctgttcacgacatgagcaacggcaagctcagggtgctctgcccctgagtgtctgctactttgcattctcctttctcatgttccttgtcttcctacagttcttcagcaagcacaccaccttcctgcctgctgcatcgctaacttggcagtcaagtaacatttgttctttgtagtaaagggtttatgcctcacctcttaagcagactgtaaacttcttggtgtcagaagctctgtcttaagtctgtgtgtatcataaccctgcacacagcaggacatggtagtcgggaacggtgaagggtctgagatctaactgtacatgcaggtcaacaagtcagtctgccacagtttcatggatgctggtagaagccacaa

SEQ ID NO: 49877 - DNA, 3339 bp, Homo sapiens
gcgtgagccaccgcgcccggccagttctctttttttagagagagagatggggtgttgctttgttgcccagggtggtctcaaactcctggactcaagcaatcctcccacctcagcctcccaaagtgctgcaattacaggtgtgagccaccacgcctggcccatagttctcttattatgagtgaggttggttgtcttttcatatgttcagggccatttttatttcttcttttgtgagctctccgttcacatcctatgtccttgtttcgttttgttttgttttgcttttttctatggaagttctttatctattcacaaaattaccgtttgtgatatgagtttcaaatgtttctttacaatttgaagtttattttttgaccttgcttgtatattcatacaatccatgttctatttcattctatttatggtgtctagctcttacacttttaaaggacttccccgtttcgagattataaaataatcttccacattttcttctaagtgcctttatgctttcagttttcacttttaaatgccgaccatctggaatttgggagctgggtgaccaaccttcgccgttgggagacacggatccaagttctgttgctgtcattcagatgtttaacttctgaaagatacgttccatttgcggaaaatacatcctctttttctcagtgatttaaaattctctcctgagcagaaatgaagttcccctaggaatgtaggcctattctagtccttatattctgcccattggcatgtctcatgggctaggcatcattaccacaattttaacatggagcttaatgctaattgggctgtttcatgatcccctcgtgtggtttttctttcagaattgtcatggccatttttgctagactacttcttcacatgcactttagaatcagcttgcctggctctaaaataaatcctgcataggcaattctaatggacatcctggctaagtatcacagtttaaatcaaatattattaacaattctaataacacctcccattcgtactctacctacttttcaaagcagtttcactctttcacccacctggcctccttggggttagaaaggacaggagttagacaattccgcacacgtacaaaggagcttcagactgcttccagcccagccccagattccagccagaccttcccttgacggcccaggcctcgccctgagggcacctcgggttccagctacctccgggcccccaggaccaccgcttcccccgccccacgccaacccctagatctgcctcgcccccgcctgaagagtcggatctgaaccaggccggcaccacggagattcccctgcgggccgcccgacgcctggtaggtggtgggctcttcccggctgccccgaacactttcctctgtccagctcttcccgtgccccggggctggggaaagcgtccggcagccccgccgctccctggccccgtcccaggagccaccccaccgtagggctccagccagggtccaggcgtgcaggcggcagaaggtggacgggacgcgccagccccaggcctctcctcccgctctccagccgtttttctggggagaaacacctgcacccagctgtccctccctcctacgtgagtcctcctggaaaccaggttggaggaagaaagacgtcctgtggacaggacggggtgggggcatggccctggggactcctcgtgacagagggtcctgcggcaagagggtctcccgggccgcggaggccctgcctcacctgcagtcctccgggagcccgcggccgagcagagcggacactagctgaccccgagcaggggagcgacgggagggcggagacggcagatgcacgggtgggggctgcggccccgcccaggctgcgcggtttcccgaaaccagctgcggcccgggggcccggcaaagggggttccgcccggaggagcggaccgggcgggagaagaccgagcccccgcgcgccccctgcgctcccactcgcgcacacttgcacgccggccctggccgggcggggctggaggcgagaacgaccccacgggctttcccagggccgtccgcccgcggaccctcccagctccccagagcccagtgaccctcgcgcagcaggagaaccccagacggaccccaggccctgcagcctgtcatgaacccgaggggctgaagttcagccccacccccgcctcccctccccgcctccccctccaactctcaacccacttctccagccagcgccccagccctcccgccgcccgctcgcaggtcccgaggagcgcaggtgaggcggcaccccactcccggcggcccccgggcctccttccgcacgcaccccgagctgcctccgcacagttggaggagcgtaggagggacccccacccagggatgacactccaggaaggggactgcagaggaagccaggtgcggccccggcttttgacctacctccgcaccgcagcgcggtccttcacggggcaggggcggcgtgaacccgtcgggcgtgagcagcagtcggtggagcgggaggtcggcggtggcggggatgggggtatccggagcgcagccggggcgcagctgctggcacaggagctccacaggcagccaaggactcggtcctgtcccagagcctgcggactgtggaggggaggccgcaggaagagcccgggaggagggggtgaggggtcgaggtgtggggcgctgcttgacccagacgccagggccctgggaggaggatgagggggacagagcagatcttgggcgaaaggggaggttcccgcaggctctgtagtcgccgcagttccagcatggtcagcaccccctctgctacacacattcccctcgtgaggggccaggggtgcggccctgtgaccaggacagccattcattgggtgactttgagccaccactggcccctgacctccccaactccaatgaaatctgcgaaaatcttctgacagccgttcctctctggtgctcccttcctcatagactgtgtccctgacaatgggaacagccgacagtgatgagatggccccggaggccccacagcacacccacatcgatgtgcacatccaccaggagtctgccctggccaagctcctgctcacctgctgctctgcgctgcggccccgggccacccaggccaggggcagcagccggctgctggtggcctcgtgggtgagtgtgacggcctgcctcgtcgggcggcgggaggaactccccacctccagccgcagcagcactctctgccagcctccctctgaacaggacaccgagccagttatgtcttcttacttagcgatgtgattctctggccttctcagtaagagcctggggaggggagg

SEQ ID NO: 49878 - DNA, 921 bp, Homo sapiens
ttttaaactcgatattcctccttctgagaatgccatttcctagcagaaccctaactgacttttctttttcttcaactttactctcctttgatcctagaatcaactgcattcaccagagagtacctacaattgccagctagtgtgctaagcactggccatgcagagataagaggcacaggttacagtctgtggatatcttgggaggccagggctatgatggaggtcagctccaggtaggggcatggcggagagaggaagatgatcaagggaggcatcagagagtcagcagcagccaggcaaaggtcggaaggggcagagtgttccaggcaaggggtgtgtgccgagataggagcctaggtaggctggcattgctgagactgatgagaggtcagaccctagaggtacacagaagccaacatgtcccagtaggcagcctctggaggactttggcagggtggcaaatggccagattcccactgtggaaaggtcattctagcagaggcagacaggctaaatttggaggagacaagtttgggagcaggaaagccagtaggagtctactgcaggaatttaggtaaaacatagcaaaagcacaatccaaaataatacaggaggaaatggaatgcaggagataggtgaaggaattctcaggaaatagaacttgctggggcattgggtgtgactgggaggggaagaaatacgagtctggcaggactctcacatgcctggctggagcattcgtgggtttatggtggcattcccatgataagggaggggcaatatgttcttcctggaatttgttgagtttgaggtacctgtggtctaggcaaggaaaaatgcccatgaggaaaatggggatatgggtctgaagctcagaattgtctagactaaaggcatgcagttgatcatcattttcatgat

SEQ ID NO: 49879 - DNA, 1461 bp, Homo sapiens
ccttcacgtgacagatgtcccagcagttctgacgcacctaggagagcggggtgggtggcagggcatatgtacgtgttttgaaaaaactcccagtcgatttttgttcattcctcccccaaaacccgcgttctacacgcccttgagacgacgggacatctagagatcctggagccttgggaaaatggcccgaggtcggcggctgacgcgttactatggatactccatagcttggagggccagtcgggccacaccctttggacgtcacccggagcccacaggagcacctggcaaaagccaggcccacttcctgctcggctccgcccagagcagggggcgggcggataggcgattccctccaatcacagttccaaaaggagggggctgacaacatatcctccaatcacagcttgaagtgagattgatgtgtcttttcaccaatcaccgccaaggcgcgagggggttgtcgggatgggggcgggagccaacatagagccctcagtgggatgagggtgaaactgctattgccggcggctcctgttttaccgcgtcagcatgctggtgcatttatttcgggtcgggattcggggtggcccattcccaggcaggctgctaccgcccctccgcttccagacattctcagctgtcaggtaaaaacggaaaaacctactcagagcgggccattgaccgcccggcagggcagtgccggcccgccgggagatggagtccacgagcttgcgcgaggcttgctgggagctgtaggccaggcctaccggggtggaatgtcactccgcgggtgttggcctcaattatttatagtgacactccagtcgccagcaggaggctcctgcgtctgcagccgcgtgtcagccagaaggaggggacgctcggggtcagtgaccacgcccagtccgcactcccgaccgggggtcccctttcctggccctggaggtgattgcgcgatttggacgaaaattcttattagtatgaagagacatttaatgtagtggtgcttccaggattcaaagtgagtcgaagaagaactagagatgttcagcagggataaagagccaatctaataggccgggcgcggtggctcgctcctgtaatcccagcactttggaaggccaggagttcgagaccagcctggccaacatggcaaaacctcgtctctactaaaaaatacaaaaatttgccgtgattggtggcacgcgcctgtaattccaactacttggaaggctggggcaggagaatcgcttcaacccgggaggcggaggttgcagtgagctgagatcatggccactgcactccagcccgggtgatagagtgagactctgcctcagaaaaaaaaaaaaaagagtcaatctagtaacttgtacatgtgtgtttttcgcaaaacactctacacaggttggtcgagagagagagacagacagacagacagatgggaaacaaacaaggacc

SEQ ID NO: 49880 - DNA, 2886 bp, Homo sapiens
cgcagggccttctggggcttgtagtcctaaaacgactaggtctccccgcaatgcccgagaccgaggacaagaagactacaacccccagccgtctgcgctcacgctctctgcagcactcgactccagggctccgtttctaccgcggaggcaaaccttggacttcaagtcccaggaagcaacgcgtgtccgttttccgggcgccccgccgcggcgccgtggttcccagtgtgccccgctgttgttattccttttatgtgctcccagccctcttgaaaagggccgctccgggactacgcgttccagaatgcagcggaaatgggggcggagcgctctcggttaggggtttggggtttggcggcctagatcccgggcactggcggcccagcgctgacctggttggtggcattgtgttcccaacggcctcttgacgacctcagcacgggtttccacctctccccaagccacctagtgaccccagaattgactggggaatgcctgtgagcgatgatgacctcacagggaacagctgaccgcagggctgggagaacagctgtgccccttcgaggctggattttagtggagggacacacgccaaagaccccctctctgctgagccccgtttgttgtctcggagcccacccgactctagccgctgaactctgacatgctgaggaaaactgggtggagccctgggggtccccctcagaccccagtctccggaacagggcccactggagtcagccagggtgtggcaggcaggttggttaaccccctccacagacaagaccacagaccgatgctcaacttgcagcagcctctgcctcaccccttaaaggagctgattatagattcccttacgctgcctctctaattgtctcatgattgcattcttgagggctatggaccgagggaaaaggatcccaaacagcactcctcagcaccggaaccagagttgctgctaaacacgtgttaattaactcgtttctatctgaatgcttttgcatacacaagggaaaagaagcaaaaagtgtattccttatctggaagactttgtgatttcgttgggcaaaaaagaactacacacaaaggtcttgaatgataagtgatggctctgcctagggttcggttcagtgtggaggttccattcaagaggaaggaggccagcacagcgaatctctgtccctctctggaagtggagagcctctaacaagttaccctctcccagatcagctcagggtaccgggcggccagcctccagcccctgtcacccttctcacccactcgccacccgtccctcaggggctttcttggaggcacgggggttattgaggggggcaagagaatctcaaccccgatacgtttatgtttcgacttccccgaatttccttgtgcctgcgttttgctgcctgggatccctagcgtgagaagggctcctttacactcagaggtgccgtaatggagccaagggacggcatcctcggggctcccgagccccgagtggagaagcttggggcagagggacggcgggggcggcccctggtgccgggctgtgcctggaagcgcgcccccgccccggcccccgctcccgcctccccacccgcgaaggcgggaccgcgcacggtgcgccggggggcgcgcacgcagggggctggcctgcccgcggcgcgggggaaagttgagttgggagaagttgggagcggcgggggcgcgccccggggtgggcacggggcagtcgtcgggagcgcgcgagtgcgccggaggacggggagagaccccgagacccccggggcacgaagtccagagcgagcgggtaggcggagaggtggtggcgggggacggccagggccgcagagggaggaagggagggggaaggagaggggggaactcgggactcgagcggggagggagtggaagtggaggaaagggcggagactggggcgcggggaaccgcggtcttggggagaaggatggggaggcggatggagtgctggtcggaagcgggcattccggggtccccttctcagagttccctaaagccagggtgccgcgccccctgccaccaggagggggtagtctccccgaggcgccgccggccctcccactccccggctggctccagaccacccctcccctccggcccccccgcatagtccttcagtcccgtccggggcgcccagactgggggttgcccggggcccccatccccaatctccgggttgagaggcgaagccaggaaaggcgggtggcgggtaaggtcggacaaggggtcagacagaagagggagcagctgggtgggaatgggaaagatgagcccggagagttggacctgactcccggggtcggtttgtccaggcgggaagttctgtgctgggtgtgagaggcggcactgcctgaaacccagggtctactttatcccccttcgtttcccccgccagccccacatggaagagctgcggaatttacgagttcacttggggggtggttaatgcccaagtgggggtccgaggtgctaatcccttggtcaaggggagagatactaatcctctgggccggtcggggctggtcccgggaatgtgcccctacccggattatcggcaccgatgctctggacagaagctgctttgtgttctgggacagcaggggagggggtgcagaggagtgtggaggagcgcgacgagggcacagcctgaggtgggagtgggcgcctgcaggtgctctgggcggactctccccacacccttcccagactgggtgcactcacgctcacccacaccacccgccctggctgaaggcctgctgagggggaggggaagagcgtggttagccaagttggagtgcttgccaagaatgtgttgccaggctccccatcctgggtgacccccccag

SEQ ID NO: 49881 - DNA, 1488 bp, Homo sapiens
ctggggagggagttgaggctgttacctgaagacctaggtagcttagcctcagcggttgaggaactttgagaaccctgggtctctcacccagcaacccgtctcagacccggctggccttagaggcgcaggtcaagtctgcacgcgggccagggttctgggcggagctcgcctgccacgactggccacgccccctgcccacgtgccacccaggcccgcccctccctgcccccacgtggccaccgctccacatggccccctttggattttcctaaggagtcttaatgattaaccccgtgccacaatcagctccgctattggtcacactggcccagaggggcacgtgactgggaaggggcacaggctggtcccctccccctccttctcaggttcacccctgccggccatggacttcctcctgcggcctcaggtgcgaggggtctgcgaccctctctccccatggcggcaagctccctgcgcctctccccgtcccctcgtcccacggggctgcttctggtgggagtggggctgggcgcttaggggagccaggagatggacaggagccttcctcacagaggggagaagccagccccctggcccgctcaccttctcttatccggtgttctgccagtcccagctgctccagtccccacctcgcccctaagacccgcccttcaccccagccctccccgcgctcttccttgttctggctgctggcaccgctatggagggggctgcatacccccgcccttggagatcccgatgcccttcaggtccagaagctcttgagcaaatatttggcggcgcctggagctgagaccgtgggtgggtggggggctggaccaaggctgcctggccaggcggctgccgcttagctgggctgagctcttacaagcgccgcattccctgccggctgtgccggccggccgctgctccgcgcccgcaggatgactcaggtgggggctgtgggggtggggtgaggggtggggctagggacctggcccagggctcgggccgggggcctgggggctgggggagctctcctgggggctgaagggcatccattccggtccctgcggggctgggtttgtttgactcggacaggctctgggtcggttagcttgggcgccgccagaagttactttttgggctcagcagttgtcctcaggccaactggagtttcttcactatctgtcatgtgaacttcccggttcacacgccctccctccaggctgcagatgggctggacacacgggatttcttccacctgccctgaactgactacacagccaagggggctgggctgggatgagggtagctcagaacccaggggacagctgctggggggactgggtctctgcatctgagggggcagactgctggggggacactgggtcactgtgtttgaagggatgtctactggtagggtgactggcttcctgcatttgagggggcagactgcttgggaggactgggtccctatatttgttt

SEQ ID NO: 49882 - DNA, 4115 bp, Homo sapiens
ccaaaaaagggggtgaggttttctccaaaggggagaaagacctgctacctactgcttacctcactcctcatttagggggcctgtggtcagagcaagcctttgtgactgctctgggcctcttccccaccccgcccctctgcctccttccacgcctttgaaacagcaatcataatcctcagtgcgctcagcgcagcactacttgcaaagcaattccacatgcaccatctctgatgctccttacacgcccatgaagagtaggcagggctggcattacctcatttcaccggtggagaaacgcaggcccagagcagcgaaggggttaagttaagcccgaggtcattaaccgggttagtggtcgcgcccagtctggagcccaggcggcaccggcgtgcactctcccgaccacctccctctcccacaggaggcggcggcggcacagagggtggaacgcgggctccgcggctggacggtgctgggttccatgctgggcgctcccactcaccagcggcgtgaccttggacaagtggcttcgtctctctaagtctcctcacccgtgaaatgaaaacgcagcgcccacctcgcagggcgcgcgtggagcccgagtgcaccgctttgcgatggcgcggagtcggcgaagtcgggggccccaacacccaccccggcccagggacgccaggagaccgtggccgctgccgctaacaccagctcccgctgccctcccgcagccctccccgcaggcgccacccctacatgactccccgggccctgcgcaggtcgctccctcagtcggtctcggggcccgggggccgggttccccccgcggcctcctcatcggctagccaccgagtccgccatcttcccagcagcccctagatagccgcccggacgccaatcccgaagcagctatcggtcttcggagacgtggctcccggcaggcactgcgagccagggagccgcgagccccgcccgcgggaagtgcgcgcccggcgccgagggcggggccacggaggccggcgccaaagccagagcagaacgctggggagaagggaaggcggagggccagaccccaggcgcagtccgtgcccttctctcccaaggggcgaggactccccgcccgccagcccgcacacactcagacacactgcaagagtgaaaacttcacagttactttaatctgcacgggttccggggaactcctctgcccctccccgctccccttcaccagcctcccaccgacctggcgtccccaactcagcccaaggagctgtcagggattggaggcggctgggtcctccggcagaacactaagacgggcccccggggcggcccggctctgcccggggccgaggcagcgacagcagatgcccgaccccgaggagcccactcccagtgcgggctgagggtcagcagccccgggaggtggccccgagccccggcggtcgcagggcggggcctccgccagtcccgggagtcctctgcggcgcagggctgggctccagggcggcgggaagaggcaggccggagaggcgggcctgggcaggcagcagctcccgccgcggcgcggggagcaaggtccggaggggccggcgacgctgccaagcgcccgcggaggcactacgggcggtacatggcaaaggccaggagactgaggagcagggtgaagccggccaggcccagagtggcggtcaggggaaagaagggccggtactggatctggcagtaccagagcagcagcaacagcaggagcagcaggggcagcagcaggctgccgatttccagcccggaggggccgggctcggaccccggcgggcaggggggatttgggggaccgactctcgtggacacgtggcagtggagaacgcagttgggagggaggtgaaggctgcccagggtctgggtgtcgtcgcctagcagctgcccttggtagatgagtcgcacctgctgttcccggccgggaaactgggtcctgaggagagagggacctgggtaagagagcaggcctcaggcaatcctagtccctggccccggaacagcactcccaccctccccctgccctccacaacacaccggccctggcctgggaggggccgtctgccaggggaacaagtacagttgtgatctggggcgctcagcgcctccagtataaaggagggctgggtcttaggtgtctctgggggccttctgcgaccactctcccaacccctgtctttagcattgctcctgcctcttgacctacttaccttttcaaggagccaatggtgtcgtggggccaggccctggccacctgctctgaatcattgaggaatttcagccgtagcacgaggggctcctgcggggagtccggggctggcggtgttgctgtgaaccccgtgctgggctctggctgtgcagcttgacctctgtgtctcaggctgggggtctctgcccctggggcctcccctctcatgctgtcggtagctgccatggctgcgctgggctgggatggcgttggggtccctgacggctggggcagtgggtccccgccctcagcggtgtgcgttgagacccaggcaagggccagcaccagaaggcaggcaagcaccgagaaaaggacggtcacctcatcacccaccccttcaatcagggtcatggcgcctgccttgcccgccgcgctaccgagctggagaggcacaaagagcccgtgaggcccgggccccctggccaggagccctggaacctccacagggtcctgccctcaccccaccgcgacgctcccaccgtcctcagcctccgtcccctcacccaccccagggtaccggcttctctgcctcccagtcgccccaaacttgcctccgggtgccccttcccatcgccgaatcccaagtcctaactttctgtcatctgagctcgaggtcttcaaccagctcccaactcacccaaaccctatcccaaggtaagggcctaagcaacgcctctcctaaacttcaccccaaccaaacttcacccccaagcgtatctattctcctgcccacttcaccccagtgtgtctactccttcaccgacttcaccccaggctcatctactccgctgctaaagtttctaagaggtgggggtagagcctctgtgcccccacccccgccccccgcgttacggttcacctaaaccccacccgcggcacaggactgcttcccaggcttcccccacagcaaacgtcaaactccgcccctgggcaatctggagccaccgagcgtcaccacccacccagctcggccccctccaggtcccctcaaccccactccgcggaggactaactccgcgcctcctctggaagtctctccaagccccccgggctgcctgaccccagatcccgcccggaatccgagacttcacgttccccacccccacctctcatcacccctcccaccttcccgccccccgaagccgcaggagggcacggcgatcccggcccgaccggggccctgggcggcggggtgggcgcggtcacggcgcggggactcaccgcccggctcccccagctccatcgcggcccctcgggcacttccgggcgggaggcgcggaggtcgcaggcacctgaagcacccctccttccccgccgccgcggcccggggcattgtggaacttgtagtccggcgccgcgctgtccccgccctccgccctgcggacccacgtgtggggctccacccgcggttctctgcgcctgcagatcgcgaaggggctggcgggggcggttttgggggttgtgctaccccctagaggtttgggcggcagcagcgtccgccccctcccctgccaacagccagggcatctatcacaccagacaccgacgtcagctggagcacgtcagagtacccgtgttcgtgatgcagtgtggaaggctctgaggaactcaggtggcccctactgttatgtcacagtggacgccagaaggcactttggccaccaaaattaattcttcagcccagagcccaatatccatgggctgccccaccaggctggctagggatacccatcctcagggctgcccctttccttggtcccctcctccaccttcgggactccacagccccttcagggctgtggaagaagcatagaccttggaacctggcagaaatcct

SEQ ID NO: 49883 - DNA, 4406 bp, Homo sapiens
ggtgggggggagggggctaacagaactgcagcccactttggcaatgggactgcagaggaactgggacatttcagggagctccctggccctagagggagtgaaaggacaggatggacaaggggtgaggacaagaaaaattgagagccacgtgggctttggttggtctctccaatgggatgagtaggggagaaaggcatatactatttcatccctccctcttcttcctctatgtaccaatggggtcgggtagcatttagctaatctcccaagtccggcagggggagggtcttttaggagagcactgctgcagccggcagtggagagcctgggcagggagacagggagaaaactccggcagcagggtggtctctagggctgacctcggagcctggggacaggggagcctatgccgcactgaaggcgggacgctgtaagcgaggagcagctgggcctgggcggactcctcggccaatcagcctcggtcagcagcaccctcaggcgcagggcactgtttgggcattgcctagagatccgacaccccgcccagatcagcgcagggaggcgaaagcgacagccgggcgcgggaggagaccagggcagctgtcccctccgcgagggtggccctcgaggcaatgcgggtgggggctggtgaggaggcggaagggccgaggctgagtgggaggggccggggcgccagggctggagcgcgcggctcgggggtggaggctgcagagccagcgagcgagcgaggggcgggggcgcccgggccggcgcgcaggaggggcgggggcggcggggaggggggctcgggctgcgtgtgccggagccggcgggggcggcggtgcgtgcgcatgacgcggggggagggcctgggccgcgcgctcccggtcccgttgttgttgccgctggaggctgctccgaggcagcgggatcacggcgctgggaagcgctcggcagcggcggccacagcgtgcgcggcggcgcctcctggcctcggcctccggcccccggcccccggctccatgcgctagccccgcgccgccagcccagtagtcccggccccgccagccccgcgctcccgctcgccgctgccgccgccgccgccgccgccgcctccgccgcgccgccccgggcccgcctcgggccccacggctccgaagccatgaacttccaggcgggcggggggcagagcccgcagcagcagcagagcctggcggctccggggggcggcggcgctgccgcgcagcagctcgtctgcggcgggcagttcggcggcgcggggcccggggccgggggcggcggcggcccctcgcagcagctggccggcgggcccccccagcagttcgcgctctccaactccgcggccatccgggccgagatccagcgcttcgagtccgtgcatcccaatatctacgccatctacgacctgatcgagcgcatcgaggatttggcgctgcagaaccagatccgggagcacgtcatctccatcgagggtgagcggagccgggggctgcgggagccggggcgcagtggcctctccggcgccggccgagggctccacaggccgtgcctggccatgctctccctgtcgggggtccttgcgcgcttgaggaccaggccacgaggtttgccgatctgtgttgcagaaccggcgggcagcttcgccatatctcgttcggggacactttggggttgggggttttctgctgactgtgttccagggcgcgaaggtggtgtcgcttgggggggccgggaccagatctgtccaggcctggccggggaaggtgggcgcggcagagggcttcagctgcggggaggtggggtcgtgaccggggaggcttcttagccgctgcccgggccctgctccgcagtggggcgggggatcggagcctcgcgttagtggatggcagccttcccgggcccagcgcccgcaggcccggagggtggcgctcgccgcggcgccctctcccgacgcacaccccctacgccgcggcggccaagcgggagcgggccgggcctggcgctgggctgaggctcagcgaccgcgtgggaggcgccggcaggtccatccgcgctttggccgggtcatgagcctgacggggatccgcggctcctcggtctggaggcagctgctgggcagccgggtgctgaccgaccgccagggacaccgcacccggagtcggggaccggaaacccccggccactgcgctgcctagcgcttttttctctgggcccttaggccctggactttcgaccgctgagggcacaggaagtggtggcacgctgctggcagatgcctcgcaagccctggtgtggtgggtgctggaggcacccgcaggcaccccggtggcatggtgaccttcgagcgggcacggacagatgggcctcaccctgggccatctgcttcctcccccagctctgtttgaaaggggacgcccaccggcaggtggtgggtttggcctcagtggaaatgcagtgagagccaaggccttttgcgataacatggagttatgggcaggggcctgtccctgacttgggccttaaggttagggccccactcccagcttcatctgcttgcctgaggttctgggggatagtgcacctgaacacctccctttctgctttcagaggtccccatagccggggaagaagtactgggtctggggggaccccatgtggtgctgggttctatcttttgttgtgacatgccagtctgacttccttctgccttttcccaacccgttcttatttctttcctctcaaggctgagttctctgtgaactaattaggtgacagaaaaaactcattaacgtggatctgagtaaatggcctgaatcaccgctgtggctggggactaggagatggcatttgtgcgagccctgggccccaaagacaggagatgaccaatttttcctcttagatctgaagagggtggaggcgggagagacatcgttgctgcagcttcactgtccttggaggaagtaaagacattcctgatttgctccaagcttaccttcccccagctccttctggagggcgacaagcctcgtgggccggccacaggagggtgggggcacatctgcttccgagcttttcccagagcagggagaggtttccgggctcccctggctccagcttgatgagcagcgacccctcctccccagctcaggggagcctctggttgagcatcttttgtgatgtgaaggctgattcctggggcgcccttgagttttttttgcctgatcttaaatttaacacaacaggcagaatttcccctcctagagccctcccctgaccgacttctccattgcggtttggaaataccccatggttccgtctactaggcctggaagctcggcctcaccctcgtgaaatcccgggagccggtgtctcactgtcaccagaccgacccagccgcggctcacacatccgttctcagccctgctgttcccactcctgggccctgctgccctgctgccctgctgtccctccctcccccctgcccagcctctcctggcaccgtcatctttatccacctcacccgtcttgcgttcccacttttctgctgtaggcagtcttcaaaagaaaaaaaaaaccactccttctccagtttctgccctatatccttcctgcgatagaactcctctccatctgccaaaccatattgcttctgtcctgcgaagcggtgtccccaccttctttctgcgaggagggagaggcgcagactccctgggcgtttccgagcacagtctgaggctggactgagacccagccctccacccccagccccagggcggaacagacctaggctgttacataaacacagtgtcagctgggagccgggtcctgtgtttcctggggctaagcctctcggtggaaaggggcggcagttccgagtgtataacaaagcctccctcactctgtttagacttcggtgaagggtttgtttgtcccagctctgaaggtgacgtgggacctgcggtcaggatccatctggctctgaggaagtgcagtgggcacttgggcctcctgtagtctctgccactcacagtcacttctgaccccgtgtccaggacaggaggaagcaggggatgtttggctttcctgtgtttcaggacaggatttgaggagagggagaccattttgaaaagttcctttcccaccagaggccaaggaaagagaaaacctgcccattacttggccttagggagtggaagaagtacagccttcagctgggagggagagctggagggctcactatgtgcagagcctctgagccaccttcacctcactagtggggaaactgaggctcagagaagggagggagccaagcggatacagccagggagagtataggccttcaacaggagcccgcttccggcttggcactcacctgcagtgagcgc

SEQ ID NO: 49884 - DNA, 1591 bp, Homo sapiens
caattcacctgtggtctctctgccattggcctcattcttctctgccacctgtggttctgtgacaacatctccattttcttcatgtccttttctgggccgctgtcgagctttggcagcctccttctttttggctgccttcttcttggccaggtcggagggcatgatgatgacccacaggggtaggttactgttgtttcagggagcctgaaggaaggcaaacagatacccccaaaccctaaacttactagtaagaatgcctgggccctgctccatccctctcaggaatcttcgtatcaacatcaagcctctgatgccctggcctgcccccgcctcgtctgttccaacttggtcagggtatcccaaaccaatgccgattctcagcggctcttctaatcttaacatctcttcccacaggcaccagtcccccacggactgcctcactttggaaacgctccttctttcagggcctccggctggggaccaggttctgcccctcagcggaggtctccgtctccggtttccctacaacttggcgctccgcactcagctagccgcctcactttccgggcttcctcctcccgtccgtctcgggcctcttctcgatcgtccctctccacatcacccggccgtcgagcccagcctcttgccgggacgcactcgtcctcgcccgcgtgagtcccctccgagtctccacgctcgtcacccccgggtcctcccccaccccgcccgtcagcttctctcccttagccctatcttccccctcgcagagccctccatccaaaccccgtccctgcttcctcttctaattctctttccccctcaccggcggggaccctctccctacagctccccttcccctaactcactgggcctcgctgctcggcctatgtcgcaacagagctgctccttaggatcctccgcgtgcggccggctcaccagccaatcacggcctcgggtggttctcggcgcgccgcgctgcctccttggaagtgtagtcctcaagttgcagcggccaagagtgagacccgccttgaggactactatgtatcccacagacctcgcggggccgcgtgacgccatcaggatgcgcgaggctcggggagggggcgggattagagtccaagagctctctgctagcgggcgcacttcgggcgctggaaactgcaaatcccagattgctcgttggataaaccggctgagccttcaggctttaccccacctctcgaaaatccattgagctgttgtggagttacgagtttttagagctacctaaccgactcaggcagcagggcgtgcaactacacttcccagcttgcctcagcgggagtagatcgaaacaatgggagaggagaggtgggagcgtgaggggaggactaaaatgaagggggcgctgggcagggaggggttccagaaagcggggcatcgctgcaaagatgttgccaacggaattccttcacgaaagaaagcgccttggtttcattaaaccttaattttagaggctggttcattgttaaacttttagaaggtgccagacgttgttttggaacctcggccgcttagcctccccgctgccgcattgttaggtttccac

SEQ ID NO: 49885 - DNA, 2145 bp, Homo sapiens
gatttctacctgttttattcttgctatgtcaagcgtgtttattacctgtctccctcaactttcagttccctgagagcagggaccatgcccatctcgtccaccgcttgtttacccagcactcacgaagatgcccggaacttagcatccttagatgaacgtacgtgcctggcaaacaacaaacatttcttaggcaactgaaaggctgatgggattccacagccaattgggagaaaagcgctctcgagggtgggggtatgctttttccagggcagatggtgttcagcccaagttacggggcagctttggtccactctggatttgcctggattcgcgtatgtgggggcgaacgcgtcttatcggggggcggccggttggggccaggcagcccggatcccagccgaggaggtgcgcggtgctgagaggccgtgggagcgaccatagagaacgcgcgggcggagcgagcggccggatgcggtcaccatagagacgggtgactgacaggcagcggaagaggaagctgcggacaggggctgtgaggtggcagcggctgcagcggcggagccggcgcctcagcgggcactggggtctgttcccccttccccgtccctgctccctgccaggcgcgtgcgggacgccgctcttggtccccacgcctccgccccgccccctcccgggacgccgggagaccccggccgtcctttatccggtgtccgccggcccccggccctgaaacccgggcctcctccccgagggccttgggcgtccctcctggtcctgcgctcgcggcctcgatgctgtctctggcgcggcctccgctcccgccgactggcctgagaacgaggtctgtgccccagtctcccagccgcgacctccgaccccgcctcgcagaacgacccgagctggtctcccgagcccccttctcagcagcccggtgacgtggccagtttatttctgttttgagacgaacggcgaagactcgcgtcgggtcttcgttctagggctagacttggtctctgatcgccgagaggtagcgcaggggctgtgggcccccggcaggggtcctgtcggaagctggccgcgcttctgtttgcgttcccaggaccctggcattgtctctagttgctgcttgtgctctctctttgcttttggtttgcttcatttggcccctggggccctggtaaaaccaggcaccgaatcgctcgcacacagagttccagtccccgcctgctgtctcctcagcagctggggttccgaggagaatgccctgcaagatggctccatcggccatggcgctcctgagaggctgtcagtgctgagtcaccgatctacctcattcgggtgggcagaacttatgtgtgccatgcgagtggctccagaccgctcctgagtgggaggaggggttcctgtagccgttgcgtcttctcaaacacggggagcagagtagaaagaggctctggccccttcccttgtgcccaccgggcctgccgcagtggctcagcagccccttcagtagcccgcctgaggaccgatgccagaggcaggcattcttccggaaaggcccactgaggcaggctccggctcctctggttggggctgttgttttgatggatcgtgtgcttttcccttacctcttatcacttgctgtcatctgttgacttaggcccagtctgcagatgtgtgtagtgttcctttttgggttagctttggcagtattgagttttacttcctcctctttttagtggaagacagaccataatcccagtgtgagtgaaattgattgtttcatttattaccgttttggctgggggttagttccgacaccttcacagttgaagagcaggcagaaggagttgtgaagacaggacaatcttcttggggatgctggtcctggaagccagcgggcctcgctctgtctttggcctcattgaccccaggttctctggttaaaactgaaagcctactactggcctggtgcccatcaatccattgatccttgaggctgtgcccctggggcacccacctggcagggcctaccaccatgcgactgagctccctgttggctctgctgcggccagcgcttcccctcatcttagggctgtctctggggtgcagcctgagcctcctgcgggtttcctggatccaggg

SEQ ID NO: 49886 - DNA, 1422 bp, Homo sapiens
ggatgaacagacagcccagcccagcctctgccatgtccccatcccccacccccacccccagggcaggggcaacacctgggcccacaaggaaaagaacgaaagtcaacctgtcggctacagcgaggaccccctacttggggggtagagtccccaagtcccacccccgcccctgacaagagccatgcaaacgcctcccttccccgcctcgcgtcagacccggccggccgcctggcgacgtgttcgggtgccagggcgccagcacagtcccgcggccgggccgtgggccatgacgccccccactagaggggtgggagagcgggagcgccctcccggcccctcccgatcagccctccattcagcccgagccagctcgcttgccctcccccgctaactttcccccactcaccaccccatggaccagaaactcaaaaagtttgcttttcgtggctttgcgcgcccctccggcaacttcgtccgcggccatcggggtgggctcagcggctcctctcactctctctctctcttcctctttctttcccttttctgcctttttttttcctccaactctcccctctgagtcctgctgggctctctcacacttctactcgagcggagtggggagggggccccttcagggctgccctgacggcccacggcccacgccgccgccgcccgcccgccgccgccgccgccgccgcggctgccgcattcctgcactgataagacagaaatagtccggcggcccggggtctgcctgttgactcggcggggacggggccgcctgcctttccaagcccgctgtccaaacagcgcagataagcggcgaggcgcgccgaccagcccggccgcgggcgctgggcagcagtgctgcagcccgaagccgccgaggcccgcgggaggcggcgcggggaggggacgccaggggaggcggcggggggtcgccggccaccggctctcgccacaaatagtttctccgtcagggaattcgccggccgcgccaggcagggaacagtcagttccaacttttcccccagcggctcctgctgcatttctgaggccctttccccagagacctggcaggccgagcagggaaacattcgctggcaggaaccgggggagcccggcccgcgaggcctcgcgcctgcccggggccggcggcggtgggtgtgcccgggcggcggcgtggccctgcgtccactgctgtgtgtgcccttgtctcacacgccgtgtgtgtccgcgcccttttgtggcgtggcagcttatgtgcgtgcagacagacgccctgtatgtgtgcctccctccacgacagcctccgtgcgcgcgcgcctgcgtgtgtggcaggacatggcctgtgcctttcagctctgtgagaggctatttctgggtatgtgagtctttgtttgccgctctgtgagaaagtga

SEQ ID NO: 49887 - DNA, 1182 bp, Homo sapiens
cccacacggccacatcctcgcccagccccgcctccgcttagctccgccccgtcgcggctccgccccgcggtaaccacgcccacacaaccgtatccccgcccacagctggcttcgccttggccccgcccacaaccctctttccaagcggcggcggcggcggcggcgcgaaggcgacagcggcggcgggggcggggctggcctcacccggaatgaaaacaaacggcggccgctgccgcatccgggcactctgctggtcgcggcgggagtggcgtggcgcaggtgaggacacggcggccgagtgtcctcgaccccagcctcagcagcactgcttggcgccccggttcccggtccgactgggcacctctcctggccaggggtggagcggccgcggggcgggggtgagcagccatgcgtggagctgggccggggccggggccggggccgggagcggtgggccgggcttcgggacgcgctggccgttcggggccctttggtttgccctgagttaggcagaggtgtggggtatttaaaagaaaatattgagtgtatcggtttggggagagaaaggaataaatatgtctataaaaaattagccaaatgctatacttgaatcgtaacactccgagtataccatttgggatttatttgcaatcaaagccagattttctttgctatttaatgacaagacacttgattttctcgaaccttgacgacctgattctatcattctcacctccttcccttttatttttaatcaagaatctttcattttcctaagaaaaaatgaatgtgtcttgactagatatagttgtgtttcaactatatataatgtatacttgaaaaggtgtggctaaatgtagcaatgatcgattcattacaaaagtgaaagtgaaatttttaaaggatcgttataacgtttcactttctgcttggaccacggagtgatattaatgagtttcgtcttttcttagttacaatgtgaaacattgtatggcatgcatgaaactttttcagttctcatttcagttaaaattaaaaactgacttattaaacttgacttaaaatatgtcgccacttactctgttgtctataactgaagttccttaagtttcaagacagtggtttaatttttttttaacattaaatcttattcggtgtaaccctggagctcttgtttgctcc

SEQ ID NO: 49888 - DNA, 1029 bp, Homo sapiens
cagtattggtgccagtaagtaattgcattgtgtgttcaaagtgacagtgtcttggctcattctcggtcctccttgctatcatcatctgctgtgaaacaattgctcctttttcccccagtttttttgatgctctcactatcagtgttcatttttccaaaataggttttttctaacagttgtatctcagtttttcatggcatcatcagaaatgatattgtatgtaagtgatgtttctagaaactgaagtctgcttgcttttctaagcagagaaacagtactcatttttgccagaaatctatcatactggaatttcctagcatgtacttctctgctctcattcagagtatcctgaacatgatgtaacatttatcagggactaaggattgtcatgaggcattaaattgctctgtgttgtgacataatgatgtgcttgggaggtgacaaactgtattagggtcctagttcttctgtttcttctgttccaggcaggcctcactttttctttgcaacccaccttctgaccttgcttctgaatttattgttacagtctcttggtttagaaactaggtgtggcataaaggaaaaatatttgacctttgtccctggttcctggcagagccaaaactcttgggatttcctaagtggtaagcatgataggagcaacctttgtgctcatgaggcttggttgcccctagatagcttcaggatggggctggtcaccaaaagtaccaagccgtgattagacacttgaaactttccaccctcccctccaacctctgggaaggggagattgagctgatgactaatactaatggtcagtgatttaatcaggcctgcataatgaaacttccatacaaacccctaagtgacagattttggacagcttccaaattggtgaacacatccacatgtcgggatgtacacccccaactccatgggacagaggcttctatgctcaggacccttccagaccttgccttagtacctcttcatgtgaatggttatttgtatcctttgtaatgaactata

SEQ ID NO: 49889 - DNA, 1413 bp, Homo sapiens
agtaatttccctaaatttgagtaggcactaatgtccagttagtgatgaggtcaaataaattgttgttgtttggaaagttacaatccaaagtcagaattcttttaagtgactttacatattgaacaatttatcagcttgaaagtcaatgttacaaattcttaaactggaacattcccaaggtaggcttttagagaccctcttgggcttctaaaatgccacagagctgtatgtcacattctgatcctttctagcgtgtgaacgttgagaaataatggggaataaaggattcccaagtttcctagaagcctgtgcaggaggacacagcacagaaggcttcatccttttcctgttccagtagaggtcagagggcagtccgctgagtgctctcaagcagggccgaggagatctgggtggggtcacctcctctcattgccatggccaggtagtttgcatctagaaatgtcactgtggcaaggcacccagagcctcttgggactgatcgatgccagcactctcagaagaaataagagcataggctccagccctactgggtctgtggtttttctcctcatgtgcggagacaagagatcgtagaaataaacacacaagacaaagagatagaagaaaagacagttgggcccggaggaccactaccacctagacgcggaaaccggtagtggccccgaatgcctggctgtgctgttatttattggatacaaggcagaaggggcagggtaaggactgtgagtcatctccaatgattgataaggtcacaggagtcatgtgtccaccggacagggggcctttcccttgtaggtagacgaggcggagagagaggacagcttacgtcattatttcttctatgctcttctcagaaagatcaaagacgttaatactttcactttctgctgctgctatctagaaggcggagccaggtgtacagagcggaacatgaaagtgaaacaggagcgggaccactgaagcacagcgtcacagggagacgtttaggcctctggatggctgtgggcgggcctgactaatgtcaggccttccacaagaggtggtggagcagagtcttctctaactaccccagggagaggctccctttcccagtctgctaagtaacaggtgccttcccaggcactggcgctaccgctagaccaaggtctgctaagtaacgagggcctttccgggcactggagttaccgctagacgagggagccctctagtggccctgttcgggcataacagagggctcacacttgtcttctggtcacttctcactgtgtcccttcagctcctatctctgtgtggcctggtttttcctaggttataattgtagaacaaagattattgtaatattgaaataaagagtaatactacaaactaataatgatattcatatataatcat

SEQ ID NO: 49890 - DNA, 760 bp, Homo sapiens
caatggcggctagtgagctgtggcatctctacctggtggaactgaagcctgaagccagggatgctgaagacctgaaatgagggaccactttatgatgtgtgtaaggaataaaggacatatacgcagatgatggcaaactgataaaaatgtaaatgcatacaaatattgaagaaaacaggcaatgatgaaaggaaggtttaaaaaaaaaactccatttctgaactgggccaggctgccctgatgccctctgccctctgccctgtggcagagcctggcactgagcccacagaggcccacagcgttcagggttctgctgtggacaggcctcttcccctgggtttctaagcactcacccacatctgaacacacgcccaagtgagtcacgggtcagagccaggccaacagagcatgtccccaaccccaacccctatgttccacagaacacaaaacaggcctccactgacccaggcctgcggggtcaccctagcggggaggaggcggaaccaggcctgccacccctggagctgaggcccccaccccaaccccgaggaccctaggacagaagagggaaggcatgggggtgggctcatcacacctccaggggctgcagtgattgtgcagaataagcaaaaaagccaaactaaaaataaatatttctgaagggatgaagaatgcagataagatgcagttattatgttcaaagaacatgctgaggctgacggttttctgccaaggtagcgcctgcacaccctggggactc

SEQ ID NO: 49891 - DNA, 553 bp, Homo sapiens
aacgtgctatgttcatacaatggaagagtattagctccaaaaggaagcactgatgcattctacaacatggttgagcctagaaaacatgctaagtgaaagaagccagacacaaaagaccaatgtatgactccactgatgtgaaatctccagaatggaccaatccctacagaggggagcagatcagtggctgcccagagcttggaggaggggaatagggagtcactccttcctgggcaccaggtttcggtttggggtgatgaaatgttctataaccagacagtggtgatggttgcataacattgtaaatatgcttaatgccactggattgcacaatttaaaatggttatgatggtaaattttatgttatgtgtgttttaccacgtacacacataaaacttattttgtgccattaaaaagaaaaagctctatgaagcacctctattattactactgtgattaatgtttgcagaacaatatcagagaattaaaagtatttaatgtttggagaataacatatggccatatacccttagaacccagtatgtacatgtgt

SEQ ID NO: 49892 - DNA, 1009 bp, Homo sapiens
gaacaaaaagttggaaacactttgcataccaaagctcaggcgtgggcgagagcggggagactagactccgtccgcggtccagggctgcatggggcagcgatgcccgctctgcccaacgctccgctagcgaagcgcagttcgtggtcgccaggcctgcagctcccgcctgggctccgcgcttccgcaccgggctgcgggttcctctctccgcctcctgcgccgggtcagccccggaggacactgatgagtgcgtgaatgagtaagggaataaatgcgcgaaggccagcaccgccaggctgcagcgccggccgagggccccagcggagctcggcgggggtgcggggcggttccaggagcctcgccccctgctggggacccagcttgtgccctggcgtcgtggccgccggcaggcagcaaggaagggggtgtaaagagcccggttaggctgagtccctgcccttccgagggagcccgtctgcgagtgagcccgtctgcaagtgagcccgtctgcaagtgagctgggcctgggcctctgcaggggtcgccccgccagcccgggccccctggctgcgccccgtttccagccggcgtcagggagggggctgcagtgctccgggggtcatcggattcgggcggggaaggaaaggcgggacgtctgcgccccagaagacagtccccgggtctcccaccctgaaagccagcgaggttcgggtaaatgaaagttgctgaagcctgacccctcgtggtgggcacaatcaccacacgccccagggcggccgcgggaggatttagaattagaattattattgccgttatatttgtttagagatgggctctccctatgttgcccaggctggtcttgaatttctggactgaagcgatcctcctgcctcagcctcccgagtagtcgggactacaggcgggtgccaccacatctgcttagaattataataaattcgaattctcatagtgcttacttatagccagcaccaactaaagcttaacatat

SEQ ID NO: 49893 - DNA, 1762 bp, Homo sapiens
tggcttcagattctcatgggagtacgaaccctattatgaactgtgcgtgcgagggacctaggttgcatgctcctgatgagactctaactaatgcctcatgatctaagatggaacagtttcatcctgaaaccatcccctcaactccagtccgtggaaaaattgtcttccatgaaactggtccctggtgccaaaaaggttggggaccactgttctaaggacaccagccattggtttagggtctgctctaatccagtatgtgctcactttaactttgttcgttggtaatgaccctatttccaaatagagtcacattcacaggtactgggaatgaagacttcaacatgccttttgccgggaggcaactcaacccacagcccccctcagtccaagtccccagggggtggtgagtggcctggccacctctgcggtcccacagtcctgtcactccggcccgtgctccctcctaatctggacaataagagccctgtgccattattgtccaagccagtgcttctcaaaatgcagcccctgagctcgcagcagcagcagcagcagcgtccctggaacttggaagacatgcagatgtcctgcacctgacggggcctctgcaatcagggactgtgcgggggaagccagcctgtgtcagcgagccatccaggtcactctgatacaagccaatatgtggtaactgccgagccaggcggctgcgctggcttagagctgttactgtcattctacaactttacaacaatgccccagacacagaaaaggttgcgccttggaacgatttctgttatgggataataaaaatcccgacgtcagagctaaggaatgtgaccttccgctgctccagttgtaactccctgctgtcctcctgcttgagccttttagggtaaagttcagcacatatcaccctcgtcaaccgcgccccgtaaggcagccacagagtcctgtgctgatgtacttgaattccttgctgatctgatgatgatgggagcaggaggggagtggagggatatacagaacgccaggcggcagccacgcggtgcaggcagaggctctctcctcgcaggagcctgccagctggctgttgtgttcttgtagggaataaatcaggaggcacagctctgcccggggctttcttgggcagtaggaggaactgggtgaaaggtcttggctgctgaggccacaatatttcccgaatcctgtgctatttcttgtgaaactacgaatccaagactgtttcctagattgtggcagatgtgggacccggggggaccttcagagtcatctcccaggcgactctctcctttgcagatgaggagctgaggtcccaccgctcagaagctgactgggcaggtcagcagcctccctggccaggacacaatctgctgcgctgccacagggtctggctgggcaggtgtgggactgagctctggggaccaatagtgacaccgcacaggcaaccttcagcatgctggacatgagaacgagggcgggcctgcaatcctcggatcactgtgttggtagttcttagtagatcatactgttcttgatgccttgggccagactggaatgaaatattttttctcggatttggtaaactcgtttgctggggtaagtcgtggtgttccgtattgctttggatgtgtagcccaggaataagatggcagcactgcaggattccggagccacccacagcaccgactgctgctggagatacacaatcatgggcactcgtgaagctgcagaaactcacggg

SEQ ID NO: 49894 - DNA, 591 bp, Homo sapiens
gccaagattgcaccactgcactcaagcctgggcgacagagcaagaccctgtgtcaaaaaaaaaaaaagggtaatctgaaaatatgtaacataagtctttatcttaaaaactcctttgaagctagaaatcctatgtcattcagtatgaaaggcctagcagtatctagaaattaagaaatgttatggatttcacaaaatcgccaataattgaacttgtatgttaataaatcaacaactagagccttagcttctcactcttctgctacctaaaatgtctactggaggactttagaacagggtacatgccctgtgaagaaatcgcatgagatgcatagttcagatgactttatcaccaggaatgaggaagtggtctctccctaatttcacctccaaacccttccttctctcttgcatccttggagcattattacacacatgctgtatatgcctggcatacttaactccatcacaacaggacgtgcagtgagagtgaaggagaggcatggtaacacccatcttacactactgggtttaatttatgcttgtttctcctccaaactatggataggtatagttgcacaatgttttcaca

SEQ ID NO: 49895 - DNA, 1024 bp, Homo sapiens
cctaggagaaaggtactgttcattagcagaagtggcactggagaaaaactacgtttcccttgggtctctcctccctggggctctcccgccaaggtgaggtcattaattatttaactaatccagaagggataggaaggctatatttgctaacatgctgttttttgccatttccattaaaaagtgctattattaactagtgttgaaatcttgacaagtcagcattaaatgctaatgaatcttcataaataaaccccaccgctcattttcaagtgttctcagttccagttgtaatttctggctttaaggagtgtcttctggagacgtagttcagatcttttggttaggtttttctagtttgtttgcaaccacaaaaaggcattggtgatctctactgtgatcacctttaacctttttctctcaataacttcatatatttactttggcttttgtccttagcaaattcaggtctggaaacactgttactcgcttgctgaagataatctcacactccagatcaactctttggaaaaatgttacatgaaaactacacaggagtgatcccaaataaatggaaaagtagcccatactcagatgtgtgtttatcctcaaacacaaatcactcatttaatgacataaattactataaatggtttaaaaggcagtatctcaattcctacaattaactgtcaaatactcttcctccaaaccaaaacccaccttaacttttaaaaataaaaattattttaaaaaattcttctgagcttttatcagggaacagcattgtattattttttccaatgataaaatggcacagtgagtttctcagctggtattttcactacagaaggtgtactttcaggggtgttgactcaatcttatacctcatgattactgcaaaataggcactgtttacagaattattttaagttttcagattaatattgactttgttatcatgcttattctcctaaaaaataacttattagcccggtgtggtggctcatgcctgtaatcccagcactct

SEQ ID NO: 49896 - DNA, 755 bp, Homo sapiens
gactgcataagaaatagatgtggtgaaatgttggaaccatttctctcttggtctgtttaatgttgaaagggtgagctaataggaggcaatttcaacttcactccctcaagctaccctgtctccctccagactggcagtttcaaggatgcaaactgcattgcaaaatcaaactgactcatgaagcatttgggccagtgcactgtttacttccatctgtttgctgacacatttgtgcccagcgtttgggagccctttgtatcaacgttctgacaagtgtccctataaccttaacctactcgaaaccagtttgggttggatatgatggggcttctgtgctattgctgggattgggggaaataaaacatgcaatttaagtggggggaaaaaatccacccaaagggatacaggcatcccttggtatacaagggggactggttccaggatgcttgaggatagcaaaatccgagtgtgatgaagccctgcttttcaccctgcagaatctgcatatatgaaaagtcggccctccatacatgtgggctttgcatccaaggaatactgtattttccatttgcatttggttgaggaaaaaaaaattcctgcctataagtgggcccacacagttccaactgtgttgattaagggtcaactgtcctattaagcaatacaaaggaattaaatactggtatatgtacacatgaataaatctcaaatgtgttgtgctaagtagccagacgcaaaaagctgcataatatatg

SEQ ID NO: 49897 - DNA, 3759 bp, Homo sapiens
agagggaagataaaacagaatggatttcaactggacataaggaacttctgtagccaaaaaaaaaaaaaaaaaagtgataaaactagccctgctcaccaaagactagagctaccatttcgacatttgaaaagggtaaatcagtcaagatctttaggtcattctcttgggttgaaatcaggtagccgaggtacttgttgcctataacgtgattattcagggactactatttccaaatagttgccaataagtacttacttgactgactagggaaggctcacccaagagccagaacacctcgcggtcccaactcctcaaaatgcagaggaggaaatcaagagaacagagacaagagcatggattcaggctgccaataaaggctggatcccaggttccatgttgatatttgaacaattagtgactttgaacccctccatttgattcatggttacttcctggctgcagctgttaaagctgccacctatgcatcccctcggattcagcaccgcatcgcacaagagttcccctacgactctaggcaccccgcatctctagccaagcttctttcagcccttaatttccccccggctctcgacggagaggtggtaaaaggatgagtaagcatgcagtggctgatcttggtcaaagagcacagaccctggcacaggcggtggaaagcgcagttggggagtgcatccagtgagcggcaggcaggtacaagcttcccatgacagatagtcaccccgttccgcaatcacgggagcctcggaaccctcgctttcacctccccatcccctcaactgtggcccggtgcacgccttctatagacagttacttcaaaacagcccgaaaagatgaactaatttctccaggcttccggatgtcgggagacaatacagcctcaccctgaagcgtgtctaagttcaatcgctctggtttcacacaggccagaaaaccgctcgttctgtaacaccccgtccgccccccaacccgaccctaagccaccttattcagcaataaggcgactgctaggaactgtttcaaatgtatgtcaaccttttgggggaagaaaaagaaaacaaaaagactttggaattacttcaacagcctggttgcaagtacctgaccttattccttcccgaacaaaaatagggcaccgagagatcagacattcctttttctctgtcttcctacccaggccgccagcagcatctcgagggcctccagagggacctcttttgggggatcgcctaggtttcctatgcagaaaacttgcgttcagtgcccaaacgtcctctaaatccctagttttctttacaagggtaaacttcaccacagatggaatgaagccgaggcgctgcttcctttgttaaaatcccacggactttcttttccttacatcgggggcggggtgggggagaccgccagccccggtcacgcgcgcccgcggcgaaggcggggaggcaggtgtgactccctcgcggcagcctctagcgcggctccccggcgccgcctcacttccccagacgagacccggactcctcggcggccgacggcccccgccccgcgcctcccacgccctccgcccggccgccacctgcccgcccggcccgcggagggcgcccagctaccgcggctcctccaccggcgcggacgccgccccgaccgccaccacctccgctcagaatggtggttacgaaacgcgcggcccccgcccgccccgccacatggccgcgccggctccaaacttcgcaggcccggccgcgacccggctcccaggcgaggccccggcggcgcgaggaggccgcgcggccaccggccactcacccacagaccggtagcccaggatcgcgatcttccgggacttggactgcggcatcttggcggcctcctcagccccggcccaaccacatcaaccgcggcggcggtggctcctgctgctgtgatcggcggcggccgcgccgggagagagcggcatacagagcaggggcggcggcgggcgcggctgcctctcgctcgctagctcgcgcgctcccaaccgcccggaaccgaccgcgcggcggcgcccctcccccccacaacacgcccacgtgaccggccggcgtcagcaccgcccctcttcgcgccgtggcccgccgcctccgccccccgaaatacgcggggggtgcgtcggggcgacgttttactttaaaggcaaaaaaaggggacgccgcgatgcccccagaaaagtcacgactgaaactcgctgcgtcatgaccctcccaccttcttccgccgctttttaattacgccattctccccgagcgccgattggacagctcctgcacagccgcgcgatgacgtgtcggaaactccatctcccattgggggaaacaaggaggcggggaggggggggcggggctgcccgcccgggagctaaaaatacacctcgctgctaccgcgctgttgggcgccggctaggtttgaaggcttcaaacttccaaccggttaggggcgggcgggagaggcggagagacaaacggtggctccctggtgattggccagaacggagcgcagggcggggcaataggtgggaggtgcggtgattggcgaaacgctaagcggttggcgggttcgcgcccgctgagcccgtgaagggcgcgaggcgcgtggcctgggcgggtgggctggctcctccctcggggttttttgaaaattctccttgagctgcgttagcgttcgtgtctgggtttgaggatgtagtggtgactaagcgtcaccgacggccgaaggactgtgggaagcatggagtctgcgttaattcaaagtgttaggaatttcattaaaaacagggcgagcctcgtcagttctggtgtccgcttcgcttcgcgcggagctcggcgcacctcctggaacagcgccggggcgggaagccggttctccgccagcaccggggcggctggtgcggcgggcaggcccgagccgggtgccaggaacgcctcgggccgcggtgtggacgggcggagaccgtggtgtgggcacagccttcccaggggtgcagtgcagaggggcgcgggaagggaagcccggccgggaacgcaggtgccgttgagggaccagcctgcaggcaggcccggcgtggtggctgctggagggcttggcacttgccgagttagcagagactccgccgcgccggggaacccgcccctattctgcccaggctgtttggcagtggggacctgcagaggccgggcatggcccttcgccctttgccagtgatcggtggggaggaatgaagccaggggaagctgagtggcaggccttgtattccagcgtaggaaggtttagaggtgactggagtcgacttggaacacccaacccaagagcgactccctccagctttcccacggaagcactccgatgaggggctggggtgtgcattcttgtcctcggggatctacagatggaagccccaggcagccagccagaagtgatcaatgtctggaagttctatgtttccatgaaatgttgaggtttacgctatagttattttaagtattttaaaataaaggtcttaaaatgcactctcctgtaaaatgtgtcgtttttatcctgtggattcggataccctcaccacggtgtttttgaacagatgctactaaattccttgcattataaaatcagtttagttttacctttttttaaaaaaaatagaacagaatagaaaactgcgttatgcatagtaagggtaagtatgtgtcctcattagtacagtggtgagtt

SEQ ID NO: 49898 - DNA, 595 bp, Homo sapiens
tgggatggggacgctgcaccagcgccacgatccacatagacgtgctggctttcaccagccactgtccagactctgaacagacatcagttgagcacctgccacatgccggatccttgccagagctcagagcatcgagatgaacaggtcaccctcctcaaaggactcaggggaccactgtgtcaacaacaactgctactaacatttacatggtcctttagagcctgcaaagtgctgttgcctataaacaacttgccaggtgagaaaaaccagtctaaacaaggtaagggattgcacaacagcttcctggcagtgacagcagtgccgggcagcaaaccctcctctgactgcagatgccagccgctttcaaccactgctctccgctggccaggagggagtgagggtagggtagggacggtgacttacaacaaatacagctgtgtgtgtggcgggtcttgtgcagcacagagggagggggcatctgtttgctggggagggagagtcacagcagaagtcatatttgattcagatcttgagagatgagcagaattgctctagatggagaatctggagatatggtgcaggcaggcaggtgtgg

SEQ ID NO: 49899 - DNA, 599 bp, Homo sapiens
cagcccatttcctaacaggccagggaactgtactggttcatggccccaggattggggacccctgacctataagacctgggaggcctggcccccgcctacctccctgcctcttgtattaaacactcctgctccgtattttctccaaccccctatttttttccagtcctccatcagtgctctgctgtctcttccatggggcctgacactactgcttcctctgcctgaaatactttctccgtctgtttgtggcccagtgaactccttcattagaccttggctcaaggatatgactggtgagtcatggaacctgaatttgaacttgaagcctctggattccaaagctgtgttctcagccaagctgatccccctccttccctcggcccgccacaactgctttccccgttctgccgaaatccttccctattttcatgggtcagtccaaattatgccatctgcaagagacatccttgacagctccattcagcccacaccgatctgtgcattttaggaagatctggactacttgggaaatatctgagaagaaaaacatgtagtgtataagctaattagcaaaacaagtgttaaacaagtgatactaa

SEQ ID NO: 49900 - DNA, 2431 bp, Homo sapiens
tgaacgcgttctcttccagctaacatgtttgtgaaatgctgcagtgaatctcaaagataacaggcacccggctaattctattgggttaacacgtccatgctggctgtgcaggcttatttaagtaattgcctgactgtgaatgaacagaggtattaaagtaaagttggcacaagggacagcatccacatggcacgttctttgtttcgagagctttattctatcaatactcctggaaaaaagagaagttgctaaataaataatggaagcacacaagacagtgtgaacgccttttcaagtcctcgaattgtcaagcatcttatataaagttctttcccgactctgagctcatcacatttcattttacatattaattttgcgtaagagcaagctcatcccgttcaaatgttaacagcttcaaaataagatcctggtgaaagctcgtcacattccattttaaatattaattttgccaaagaacgagctcatgcctttcaaatgttaacagcctccaaataagatccaagttatttacctgtaagatacaagaagaagacaggagagggaaaaaaaacaaccaagtgagaggagaggcgacagaaatgacggagtgagagggtcgcctgaactcaacaccgattcaataacctcttcaggttttcctatttaactttccccattaaaaaagaagacacaccctaccggtcatatcttcacaggcgcagataagggcaccagtctatgattaaagggtctggactgtgggtatgattcggggttgcctccgagtgcatggtgacaagcacaaacaattagcgctccctgacaccttgctgtaattcgagttcggcgagtaaggacaaaagggccgcccgtccgtgtggatgccgggctcagggctgcgctctgggagcctggctcgcgtcccctccgcggacgcccggtaccccgcagcccgagctcgccggcgcccgcatccccgccccggttcccgccccggcccctgggcttccgcaggacgcagctcgccgtggggcagcgccggagatggggcgcggggtccccgcgggtcccggtcctcgggcggccgggccgtgggagcgccgggccggcagcgggcggggcgcactcaccttcgtcctcgaactccagcttctccagcatgccggcttccgcgggtcccagggccgccgccagcgccgcctgagggggaggaggaggacagcgatcagcatgagctgcgacgctcgtccccggccggcgggctcgcggccggccgagcgctggggcctggctctgccgcgccgccgggaggaggggcctggcaggggacgcgggcagcgggggccgggggcggagcgggagcgctgcccccacccgcccgaggccgccgccgccgccgcaggtggcgcggccgcggcccgcgtgcccctccgcgagtgggacgcgccgctcccccccgcgccttggtacggcccgcccgggaggaagcgtgggaagggacccgggagctcgagggcggcagcgcctgggcccggggcgcccccctccggccgtggcccgcgtcctccccgccgtgccgccattgggagaggcccgcggcccgcccccactccgccccccggcgccgctcaccttcccagcaccggcggccgcgctcggcaggctccacctgcgcaggtgtgggctccgcggcgcggggagggggagaggggctggaggctgcagaacgccccggggcgccagctaggggatcctttctcgctttcctcttccctttccaaattttagatgtaactgcccatcctcggcccccttaacaaaaatcgttccgtgggctacacgtattgtagatgcactttgtcgctatccatttttttttttccagcatggaactcttaattcgcgtcctctcttcgcagccgagtgtcttctcggttggggagccgctgccaaaaacgtacacaccctgaatctggccctggccgctcaggagctgggtatctgagactctactatggccaactcaggttggcaggctgcgcggccagcagccgctagcctcctggaagggcaggacaggccgagaggggactgaggtccctggccccacggcccatccctgcagagtgcacgggcgccgcgaatgcgattagctccagtaccgattagggctgaaaggagcttggccctagcgctcttgcaagccgggcctgaaagaggaagtcctgaaaatgcctctcgtttagctttgtcatcttacttgcgccaatccctaagtcttaaacctcttaaaaaaagaaaaggggtggggagagaaaaagaaaacaaaactaagatgtttcatggtaaaaagctacagcagataccatacttcatagtgaaagactgttttccctatgaagttcagaaaccaggccagggtgtctgctct

SEQ ID NO: 49901 - DNA, 1377 bp, Homo sapiens
cacagtggctcacatgtgtaatcccagcactttgggaggacgaggcaggtggatcacctgaggtcaggagttcaagaccagcctgggcaacatggtgaaacaatgtctctatgaaaaaaacaaaaattagccgggtatggggcatgcacctgtaattccagctacttgggaggctgagacacaagaattgtttgaacctgggaggcggaggttgcagtaaactgagatcctgccactgcactcttgcctgagtgacagagtgagactctgtctcaacaaaaacaaaaacaaaacagacttattattcactaacttagaaccattcagtggctctcggcaatctttaggattttcttggcaaactcctgagctggggggaagggcctgatcatttattcaccttctcttgccatgtccctctgtgtaccccacacctaaaccttaaggcattgtcctggaatagaccatacactccctgctgtaagggtttctgagcattctggcctccttgtttcttcctcctttccttggccagttcttactatttttaaagattcagatcaatctttctctgaaagcctttcccgattcttttctttcagtctgcttttcctccttcccccaccgccttccttccttccttccttccccgattcacgaccttttctcacaacttgcctggttaattacttctctgaacccacatgcttccatatggcatttaacacactggcttgggatttacttttctgtttcctctgagtcccacattgctctctgaagggaacgaatgactcatcatccttgtattgcctgtgtgtgacacatagtaggcattcaaaaaatatttgagtgaaatgaattgttcattcagacatccattaaaacttggtagggaaacagttgattttagtagcataaatgggtttagaagttatttcactcaatttactcatgcttcccttggacctcattgctgtttggaaatcattatagtcactttccctttagtgttggaattaacattttgaaggaaaaaaagtgactgtgccaagaaatgatggcagggtagtttttattgtaatagattctatctgaggaccaaagttcgctggcagtatgagatcctggcatggatactggctgagagctttgccagctcttgccaccaccctacaatttcagcttttttgttcccttcttttttccttttttttttttttttttttttgagatggagtctcgctctgttgccaggctggagtgcagtggcacgatctcggctcactgcaatctccacctccctggttcaagtgattcccctgcctcagcctcccaagtagctgggactacaggcgcacaccaccacacccagca

SEQ ID NO: 49902 - DNA, 960 bp, Homo sapiens
gatggtctttatctgagagtagaacattcttgtagagaagtgaaagaaagattggagaccactgggagtgaaaggaatggaattggatttcttaggattgcatgtaagaagtgaatgtagataatctcaaatcgtttttggcaatataaaaaaatcctaatatctgcatacagtagagagggttggctgcaggagagcctggagtcagcggggacattgaagacgtctttacaatgaatgtaaaaattaagcgagcaggtcagaggtactgcagagataagaacagtttcgactttgtggattaggaagtaaataggaaagagattgggaatgtcagggaacagggattgaatgggcctgtgtgaggtaataaagggggaatgctgcaatcaatctgttaaacttcagctattacaaggctgtccaaaaaagtacctttggtgtgtaactagagtagcttccagtgtcatttggcggagaggaggggtgggtggtgtggatcatgctgaggaagaatgacagagatttttgattcatcagctatgcctcccaaactttggacaggtgtcattctatcatatccccatacaacctacacagttatttaaattgacttaaacccccaagtcttcccttaggcaacaattccatgaaatcataggttttgctgtttcagatatatttttccatgatatacaaaaatgtcgctatgaaaacgttcatccttgtaccgcctgaaagcatcttgcatcccaccgtggtcctcatgccccctgctttgggaaaactggtgtgtgagaacaagcggagtcagcatgaagggctggggcacccgggaaaagcacggagacattgctaggaggggccggtgtcttctcaaagggtgaaagggaagagacatcgatttaacaagcagccctagtagctgcaacacaaaggcatttgctataattggaagct

SEQ ID NO: 49903 - DNA, 2310 bp, Homo sapiens
cctgagtgacagagtgagagagcctgtctcaacaaaaaagtttaagagaaaaatggtaatggttgactattttcctgctgagaagtgggcctgggtgatagcgaaacccagtctcaaaaaaaaaaaaaatttagaagaaaaatggtaatggttaatgatttttctgctgagaagtgggcaattacgcaaactttacctctagggaatggtttgcatgttaagattggaaccagagcaggggaaggggttatggtcctaaatcctaccaaactcagcagttcctgtcgctgtgttcctaaagatctgtggatgacagtaatgcttgacaacagtgacatatgctgacacgctatactagcagtttgaaaactggccagaggactcctgagggtccatgaaaccttttcagggagtctacaggtggaaactttttgtgccaacactaaggcgtcatttgctttttacccaccattgcttttccccatcaatgtcagcaccgtggcaaattctggtgccttaattcacatcaacaaggcagtggcaaactgtgacaacctcctactccaggggagaaggccagtgtcacttaagaaggtctttgataatgccatacatttattcattttgtcaaatctcagctcttgagtatgtgtctttttaatattctgtgtgatgaaatgagaggtgcacatataacttttccgttgcaaattatgatgatgttcttgaggaaaacatgtgcaattgagctgcttttaaaaccctgaaaaattgtagttatttggacctgggtatttggtagacagttttttttcaaaatgaataaactgagcctgtcactgcaaggaaaacaactgacatatttgttgtcaatgataaagtttgagttttcaagcaaaaattagaattttggaaaccttgtgtctgccacgatgagcttgacaatttccccatacttagagatttctctggggagattagtggtgttattaagaaatgctttttagttattgtgtaacaaaatgtgttcctatttggaagatctgcattagtcagtgagccaatattttccagatgactaatgcatggtattataaaatcatgcatgggtgaaagatccattcgaaatacaagatagggctgggcacggtggctcatgcctgtaatcccagcactttgggaggccaaggtgggcagatcacttgaggtcagcagttcgagaccatcctggccaacatagtgaaaccccgtctctactaaaaatacaaaaattagctgggcttggtggcgagtgcctgtaatcccagctgttcgagaggctgaggtaggagaatctcttgaacccgggaggtggaggttgcagtgagctgagattgcgccactgcactccagcctaggcaacagggcgagactccacctaaaaacaaacaaaaaaccaaaaatgcaagatagatggacagattctaacataatagactctaggtaagtaggctccgaaaagttcaatgatatggtgtcagattacacactgcggctaaccttcaagaaactaccacttgtcctctgggttcatccatgttgtcacagatgacatcaggctaagtgaaataagccaagcacggaaagacaagtactgcatgagctcacttgtagattataaacagtgaaactcataaaggcagcgagtagaatggaggttccagagactggggctggggttggatggggaaaggcaggaggctggccaaagtgtacaaagtttcagtttcatgggagaaataagttctgatgtatcgcacagcactgtgactacagttaataataaagactgctaagtgtagattttaagtgttctcacaaagaaatgataggtatgtgaggtgacagatacgttaattagctcggtttaatcattctgtattgtatacacatatcacagcatcacagtgtaccccataattatatacgatttttatttagcagttaaatatttaaaaaaccccaccacttgtcaagaaggctatccacaattatctgaagaggtaaaccaatacactcctctctttttttccaaccgcctatctgtctgaggctcgattttcttcatgtgcttcaaccaaaacaacatatggcaacagaccgggtgctgaagcagatctgagaattccaccgaattcttctaacccagacatgaaaaagctttgcagcaatgtaaaaggagttctttttcacaaagatggatttatgctaatatgtaatgagtttattactgatcttttcagataaattaatatttaaaaagttttaatt

SEQ ID NO: 49904 - DNA, 2054 bp, Homo sapiens
tgttcaaaatatgttggaaaatatctgagtgatcttcaagtcaaagcatcatggtaatatggaaggtgaaaaaatatttctatttaaaaaaaaaactttcaggaatttttccaaggttattctcctaaaaggaatccggaaaatatccagtcttatagggctttgtatacccaataacattctgcacctagttatgaaatagttggctctagcatatgggtatttacatgggaactaacaaaacaaaacagaaatggtggtgcaggggaaggaaaggagaatctcacaggggctaattttaaatctgtcccaactctgacaatgtggtcccagcctctgctgtctgccctgttccttcttcacgcttgcttggaggtcagagttctacatcatggacccaaaacgtaaccctagatacttcgcttgggcaaaagacaacagcagatatgcatcttgatgttgccacttagaaagcagtcctggggaggcacaggggaggcccctctgctgctttgtgagagagagaaattctgccacagaacttttcccatatacaatggtttcggaaaaacaatttgctaataatttgtcaatgaaagggaaatgttagcagcctcagtccctctaattatcagtatttgtggaatcacaaaagcaacaggcattgtttggtgctgtggagatgaactctgccgaatgtgatagtctggaatgggccagcatgagaatcataggtggtaagaatgggcatgaccttggacaaacatctcagaacctcattttcggtggaggaagtgcaggctctgagaggtgaagtgtgtggccgaggatctaccccccaccccagaagcaggtccacagccatgactcaggtcttcaggccgcagcccagggccttgctccattccaggaggtttctgacggtgacctcatccctgtggaatgttggggagaagaccgtttgtatgggcgacaggaaaaagcacacggtcgcaccaggcgaggtgggtgcctcaggtcagaggtgtatctgccttgggctgcctctccgtgtccaccctcctccccaacggggctccctcggccagctgccaagggtgtatagggtggagcgggtagtggaaggccaagacttggcactttgggtttggaaggggagggaggaggaggaggaggaggaggaaatgaggcccccccccgggctccttgctgagtcagcatggtgactactgtcatttcctagaaggaaataagggaaggacaccaattcaataggagacctgggggactttcatactctcagctgatgccagggtgcccagtgagcaggggaaaggcttcctggccctggcggcaggatggggccagaatattcctgggcaggagcccccccaggtggcccatcctgcctgagcatgtctgaacatgttcttaggtcaggactagagttcgagatttcagaaatgtcattctaaccttgatctcttcgagatgcctgtttataacacagcatcgttcatgccaattgtctggcaaagccggtatacacggctatcgctatgatgtaaaacagcagatctcatgtgagggtaaacttggaatttaccccgatgagatgcggtgtggggagggtccagtggctgcgaggccctggaagcatgcctctttcagggaggcctccatcatcagagcttccgtctgcaacgtccctgccctgtgctggccagggaactccgcggcgggctcccccactgtgcccgggattcggacactgcttgccgcggagtgtttccagtccctcttgaaattcctggttgttgacaatttgtttattattctagctcttgaggaaacttcctaaaaactggggaagaagtagttcttcaactttcttgaatctcaggacacttggatcatctgacgaaactgatgaatgaagcatgggtacacagatttctctgtctctcaaatcacttcggggcccttctaactccccaaaagtcaggttttaggaatctgtattccgaggggtctcaaaatgttcacgtggttcc

SEQ ID NO: 49905 - DNA, 2851 bp, Homo sapiens
acaacactgaaactctgtcctcataaaaataactcatttctccccacctgcaacccctggcaaccatcttctacttcctgtatctgggaatctggccactctagggacctcatatgagtaaaatctggcagtgtctgtcccttcatgactgcgttctctcactcagcacaatgccctcaaggttcatccacaaggcagcacctgtcagaatctccttccttttgaaggctgaatactattccaccacatctacacacagcacggagggctttctctcacaattccctcccggctttgccatcgctttgctattgctctgtgtctcccaagagatcgctgcccctcctaggtctgcagcttccctttcctgtggtgacagcaactatggttgctgcctgcatggcctggtgtccccatgtgcccccaacaccgagggccagagcaaggagtaaggacatccgatgcaaacaccgcacccacacgtttcctggggatgccccagtccctccgggtcagaatctgtcagcctgtgcccatgcctgtcccttccttctgggccacggtcacaggacttgggtcagcaggcccgggcagggagggagcccgggacaacgccagacattcctgccttcctgcagccaagtttccgatgtgctgttggaggaatcctgccaagggtaatgtgacatttacatgatgcctggtggggctgcccagtgacataacaggggggttgggggtgtgtctctgggcacagagcctgcagcccggcagagtctgatgacactgtgttgtgtaaattgaagcgacagtcacctgtttctctaagtcatggctcaaacctgtttcctcttatgtgaccataaaatcacaccgcctgtcaccttgatctttgggactcttctgtcttccttctgaataaagctacttgataaacacccatccacttcctgcagggggagaaggccaaatgccctcaggtgcattcttttgagagagtccagagagcatgagcccagccagaagtaggcatttgtgatggcctttctgtgcacttgtgcacacaaactttctcgtgtgggtgccctaagtgccggcattgtgcaggaagctgtgttgggggctgggagcacagtggtagcagacaccatccctgccctctttcaactgattttgcaaggacttcaggaacacattctagcacaactaactagagctgctcacttatgagcagagcctcagttcagccatcagtgaaatggacaaatcaaataggaactcttgaatgggccacctcccctgggcagcagggtggcgttgcttccaaggtgtgcttaaagccggctctcttctttgtggtctgagcagaagctgtaaggctaggccctggccttgttcttagctgtccctggcctacagacctttgaactaatcactcttggtggtctgaattctctgtagacaggtggaaaccgtaggcactgtgtcctccagacctcagcacagcaagaacagtctggtgttcatccgggcagaggaagcagaccccaccctgtgtttacacgacaccagctcttcaggggtccgagggggcgggcctgatgccggcataaggtttgatgttgccagctagaatcgccaacacatccccggaagcccagtggcttagcctcctatcagtgcctcctctgcagcccctgccagggctgccaggagctcagccggcctttgttctatttcaccccaaccaaatacctcctcctcctcccttctccttattcgttaaaattcagcgcatgatactggcaagcttcagccgcagctcacagcactttcagaggaaaacgtggcgcgcccggggccttctcacagccatcgtgcagccgcctgggcagctcccagctccaatggcaactggtagcatcaggagagtatggggttccccagtggggctccggggcagcgcaacgccacaggaccttgtggtggatgtggcaaagcatctgctctggtggcctggggcaggtgaggaagtgagcgcttctcaggagcagagccaggtcgtctctgcaggcccaggcctgccggcgcctcagccctgacgccatcatctctcctttgactgagaacaaggacctctttccttgcctaaatagcctacggctaagaggaaatcacccccagttacgagaggtttcaggaagccccccgcaaccttccacccaccatcatcaaactttcaaaagcagagagtctgggatttgaagcccctgtctgaaaagtaggtttcagatccatcggaaggcagggtcaggccaaacctctcctctcaagtcagataaaaacgatcacaccagggaggagaggcctgaaaaggggcagctgaagggaaaaagagctggagagtggggagcagcccggagtgtctcctctggctgggaggggccctgtggagctggcagcagcagctcttgggagcagacagaaggccgctccttaggaccaggcgctgccacctgcaggctcaggccctgttcacctgccgcagattccccgagagccaggcagaaaaagtggaccctgcccccagagcgcaggcccagggagaggcaggcaggtggccagtctgagtcagcgggatggaggcgcctggcatggggaaggggtgtgtagcctgggaggggccttgggcgggagcatccccggggagagagctggagccagttcccttaggacacatgataactggcagaggaagagcagctgctggggaacggggggtggtgtgtagggagctgcacaccctggggtggtcaaggcagaatgggcaccagctgcagcccaccaggcc

SEQ ID NO: 49906 - DNA, 725 bp, Homo sapiens
taaagaaagcaattctatttgtccaggatcagctcactaaggtcctcctagagcagggtgttcgattggagggtgctctgctcttcaaattaatttcagtctccctgcttaactctccaggctctggggtcccctcctagagcaagagtgttgactcctccttacactgccctctgcaggttggtggcacttccttgtagaaatctcataagtggcccttcttagccgatctcatctcacccgctgcgttttatttgacattcctacacatgttttatgatttcacatccccccgccccccatctgtgcacctgcaactcccaagttcactgttgttgagggtagaacttcaagccaggagcctgggtctcttgagtcttgctcatcagggttaagatgaaacgacaggtatgtgaaaccatgttgtaccctgcaaagcatgttgaaaatgcttcccggagtaaaaggttaggtaacacaacttcagtgtgactcagcacagcagatatgcagcacagagaagaccctgggacatgcccaaggccacacagctggctggtgtcagtcagagctccagccaagccttgaagtctggctctggagaccaagctcctgactgctgtctcctcctgcctctttgccctgtagcaccaaaggagaaattaatctttcctcctaggtggtaatgactagttgcaatcaaggctgcagagagacccactcat

SEQ ID NO: 49907 - DNA, 2610 bp, Homo sapiens
agctgccgaggcttcgctctcgccccccgccctgaggcagcacaccaagtggtcacccaccagtctccccaccacaaaagactcccctcccctttgctccgctgccacactgaggccacatgaaccttcgtgggaagagaagaccccgtcactcctctgctcgaagctctgcggtgaccccatcacacttagaggaagactcaaggggcagccccttcagggcccgtgcatgtgctgttctcccctccccgggagccctgccctctccctgctcttgcatctctcccagggcgcagccacccaaagtgaggcctccctaagcataccatctaagagggcaccgctcacacacccccatttgccacatgctcattcagcttcatttttctctcttcacttgtcactatccgcccagatacacacatggagatgtcatgacatctaacacactctgcttgcccctacaagcaaataggctccacgaagccagggactttgttctctgtacctctgtgtcagcagagtctagaatattgcttggcacagagcactcatagtggtaggcagagagtgtcagcagtgctgggtccagagtactaagagtgctaggcttacaaagtactaacagtgctaggcatatggtaccagcagtactagccctagagtattgcgagtgctaggaatacagtactaacatgctagggttagagtactaagagtgctaggcttagagtactgagagtgctagacttagagtactaacagtgctaggcctagagtatcaacagtactaggctgagagtgctgagtgctaggctgagagtactaaacagtgctaagctgagagtactgagggtgctaggcttagagaactgagggtgctaggcttagaggatcaacagtgctaggcttaaagtgctaagagtactaggctgagagtatgaagagtgctaggctgagagtactgagtgctaggctgagagtactgagtgctaggtttagagtactgagggtgctaggcttagagtactgaggatgctaggctgagagtactaatagtgctaggctagagtactgagggtgctaagcttagagtactaagagtactaggcttagagtactaagagtgctaagcttagagcactaacagtgctaggcttagtagtaacagtaataggcatcacagtaccagtgatgactaagcactttagtgtatgcacttcagaaaatagtcaaagagttaatattcaaataggttaatatatttcaacactttaaatctattgcttcctttaatctccatccaccaaggaggacagcaatattatccccattttatggatggtgaaactgaggcacaggaaagttaagcaacctgtagatatttatcaaatgtgttgaaggaacgaggaagagaacaggctctccatcacagaagtgtttaaactacttgttagggttactctcggatatgcaggttcctgagagccgctagcctgtctcaactcagatgcaagttctacaatttagaaatctttggaccccaggactcttcctagccacagcctggtgctaactctagacatggggacacaggtccagtgttggtggcctgccaccgactgggtttggcaccatcacccagaagccgccctcctctgggtttcccaggcgccccaggtggctgggctgtgtctcgggtgatggaggaggtgtacagatcccatgtcagggtgtgactgcccggaggcagtggcggcagaatgtcaggtgccaccagggactccaggccttcctccgcggcgcgtacgtgcatcacgtggtgtaacatgactgggcggctcagtgtggcccccaccctcacgtgccctcctggcacccagcctccgcccgaccctctgagagctctgaggagtgtgaacaatgggacgggctcaggctcactcacccgggaaggacgctctgctggctcagcaggaaggggcctggcacccaaagcctggacatcctgtgtggcctggagggagaatcagatggggtggccaccgcaggagactgggtccctctcctccactccctggcagtgactctacactcaggacccacgagactgctaatggtaaccacagggacagccctgcaggggccttgctctggcccactgtgaaagggaaagtccccttcctccactgatgtaacaaaacaaatctgctcttgttggccctgatgagctgacacccggccagagccaagcccagggatgggaggtgcccactggcctgacctcggacaccagctcctgggctgcaggtccaggaggcacccaggcacaatcaggctcctgttgccaaaaaagggagtgcatgcagagtaagcaaaatgagtgtgccccataaccacattcagtcacccggggccacgctgtgctgagggagggtgtggaacacaccacaatcctctccagcctccatctctgtctttcctgggagaggttctgaggcctcgtggagatttacacaaagcctgatgcttcagaggggaaaatgctctggccatgcaaattcattccgttttccatcactcattttgggtgcaggatattttcagcac

SEQ ID NO: 49908 - DNA, 996 bp, Homo sapiens
accccatgtcaaaaagaaaaaaaaaaaaaaagaaggaaagaggttgccttcataaagctgtaaaatcgcataaaaagagggtgcaatcagtcattgacgagagttacccaagagactgtaattacatggttaaagaatttggaaacacctagaactccactcaaggtgactggggtcatttgcagggaggcaagaataatatttgacttgaatttcatatgcaggaactttctggagaaacgccaggtgaagagaatggcagaagggtggtgtcccaaggaaagggcagaaaacaggtggctccagatgccttttaagagaagggctgccccggccccagactcaccggctggtacagtgaccactcagcagctctggactggctcccgtgtggccctgccaacaggatggggagggcctggcatgtgtgagtagccatgcccacccacgtatttgcctactatgcctgccaactgggatgaaaaagctttggatctggctaagtttctgtgaaccaggtaataaatctgttcttggtgtgctgaaaatagtggggtttttcagcctataaagttgatgagccaccctgagccttggggacccaccaggaaagcatctcctcatgagaaaggagctggccttgaccttgctggggacctgcctcaaattcactatccctgcatgggtaggtgcttgtcattctttctgcccacgcagcatctttttacacctcctctatgcctgaccttgggagtggggggaaggggctctgatgtgagggtcgtcctgggccagactcagcttctgctacatggaagcagatgccaggcaggaggtcctgccttccagagcagacactatcttagtcatcttgggctggcagaacagagcacatagatggggtggcttacgtaacagaagttgattttcttacggttctgggggctggaaagcccaaggtcacggtgccagccctgttggtttctggtgaggacc

SEQ ID NO: 49909 - DNA, 659 bp, Homo sapiens
ctgccggaagcgcaaacagaacttcgcaggggatttgttgatgtagttaaggtcagctgctcactgatactctccagggctttttttttttttttttttctccttaaaattaaaaaaaggagggaagaccagataggcaaaggaggcacaagcctgcaagtcatgtgcagccgtgcatgatgtctctttaaacagactgtaaaaggaaaccaccctgggcagacaattcttggcaccaattggccagagcacattcccattgtgacatgacatcacacaactattttgattcatgggttccagggccccacggggtcagaaggctccggctgctgccgggtggagaagccacacaagtccctgggctggaaattgctgaatctaccctggctcacggttccactcaatgaaagcagcaatgccgtcttcaaggaggggatacagctccccgactggaatttaacggaaggtcttcggcaaatgcgtaatttgagctctggacttgctgagaattgcagcatgacagagctggaagagattttagagagatctagtccaactcccttctatgacagatggggaaacaggctcaggacagggaggtgacttccccaagatcctgtcgccaatggtagaaccaggactggagttctaatctc

SEQ ID NO: 49910 - DNA, 7575 bp, Homo sapiens
tgcgcacctgtagtccccgctactcgagaggctgaggcaggagaatcacttgaacccgggaggcggaggttgcagtgaaccgagattgtgccactgcactccagcctgtgcaacagagtaagattacatctcacaaaaaaaaaaaaaataaaataaaataaaaagtccttatttgcattaaagccacctcgcaacacagaccagacgagtcaggaggctacaacaagctgacctgccttgtgggtacaccgtactctggaagcacaaagccggctgcttcctccccgaggccacttctaggtggctgagcacagaggtggggcacaaaaaactcctcactgctggggtctttctgtttgactcacacatgcctgaaattccttacatgagggacaaagctttggatcccacgattagagatgaacgctgatgcgttgggagagatggcgccttcccattgcagggcaggggctgaggacccttcttcagcatacgtgggcgggggaaagttgaccactcacaggcggatggggacaccaaaccttcccctcttctgtttccgccagtcgatgatcccacatgaatagaggggaaactccctgccacaactgtgaccctgctcagagttccttctaacagaatgcttttcacactcagaattcttttttaaagggaggggctgaaaaaggaaggaaagaatggctcccaaataggaaccgtattttctaatgtatttttaaagggccagggcctttttggatcacagtttaaaactcacacccctggctggtgctgcaacccaaagcctggcacgggaccaggtaattcgggtggcagatgcctttatctcttagcagtgccccgtgctgtgtggccaaggcttccaggtcaccattctgacactaggtttataagatctgggagggagtgaaatcagagctcagctcattcaacgtgtgttctttacgtgtgtcttctggtggctgttcttttagatttctgactacaaacctacctttgacaactcgaaaaagaaaacagtgtggaagaatactaccacaaggcatttcatactgttagcatgcttcattgttttctggcttttggtttaattttctccccagctagactgaaagctccccgatgacaggtatctcacccgcagaagaaagaaaaggagcgattactgagttcctccacgagactcaggagcagcatgatgggtcagggaacagcaagccagctgctgctccatgctcggcatccctgggagcagcatgtcctgttcctggaggacgcttttgtggctgttctggagccagggaggctgtgctgactgctcctctgccctcggcagggctccaggcttggccagccagggctgggctgcgggaggccatggcactaggtcccgttcactctaatacttggattttaccaggtgtgccagcccccccacatctggatgctgcaaaacattccacagccagactgtgcactacacagcagagctgggggcgagagagatgaggaaggagaggtcaggggaactgcagatgggctcgaagatggagcacggtcacccctgcttcctgcacatgaggataagtggcgtgaaggcgaccacccttccacaagagacacaatggcgctcctgtggctctgatatgtaacccccacccccagactccggtgacccaaaacatgcgagtaaaccctttaattgctggaggttctcagccggtgccccggggccacgttcccacggcatcggggaagtgccaggacatgtggcacatgttgtcccactaacgtggtgctggtccaggctgcaggttggagccccaccccagccttatcgcctggtgaatgggactctgggtctccgttgtagacaccatggttggtgcctagcctccacttgtcccccaccccaccactgcagtgggcatctgagagccgagggcgtcatcaggccgagctgcctcctactccaggtagcctgtgaatacctacaggatcaagccccttgaagcccaccctatctctggacttccaattatatcaaaaccaaatttttgaaaagaccccaagctttccgtctcatcaaagccactttgcatgttatgtgaagctgcaaatagtctccttgaagctgtcactggggacccatatgagagaaaagtcactgagactccgtgtaaccaccctccctccatgcgcctccattcattcatgagactggcacttcccagggcagggctgctgaggcctgggagcaccgcgcaggcagaatcagcccggccgaccgagagatccaccagcagagcagggcagggggaaccctagtcacccacaccctgcggctgtacagagctgggagactttgcccgcagcagtttcctacattcttctcaaccatgctgtgtggtagggaggccagccatgactattcagttcaagaaataacatttttcaaaaacccagaagttcagaggtgctcagtgatttgcccaggatccgtgggcagcttgtgggattgtgggggtcgacactggctctgctggttcctcatcagggggccatcaagagccaggctgcctctgctccatgggtggacggctgcagaagcaggtgaggatgcactactcaaaaacttcccgctcatcctgaacctttgcggatcacgaggccatacctgcaaagcacccagtcccctgcacggctgcgttccaaaccacatctcattatgcaagagggcacgggtcccctccgcgccggggagcagcaacacgccttagcacatatttgccagagctctcctgccggttgcaaaatactgtgtcatgtttcatggaaagttctaaaggtcactgctgcacttgactctgagatcgccacgtcgcctcactggggcctccacgccctgccccaggaggtgtttatgagctggcacctctgcggagcaccctctgccctgactcaagcccccacgcctctgttccacgtcagcccgacacactcatggtcatgcacagcctcgtggtgaccacaggaactggagcctgagtctctgagtgacaagagggtgatttttttggcagagacaaaccacctcagctcacacagctccactcacaccagcgatatctaaggccactgagaactggcagaggcaacaggggcatcttgattttaaaaacacagagaagtactaaaaaggtgaaaaacgatagcaataattatttttagcatgccgaaatgcagcacccaaagagtaagaaatccctggatctccttaaaatctggaaggggcatcgcattcccccatggagggctcggtggggcccttttcagtcccttctcgtggtgcctggcaaccctgcagtcgctcagtgtccaagagcacaccaggccaagagctctgagggctccagcggcaagaacctgccctgattccagctgctccgtggcgcagaagctgagcgctgggctcaacgggggccaccaagcaatggcttctgaaaaccagattctgaaactctgcaggccagccatttgggttttctgtttaattctctttaagtgatttaattctcttacaagtgctgaagtgagctgggaatgcaccgaagccttggagaaggacccggttaactcccggactcagcggaaagccagtttggcctgtggtctctcacttctaggcgatggggcaggatttccagtgtctggacctgggctggtcacagagcaatccacctcctcctgcacgtcactccttaagaagcccctagcttagattatgagggctgagctgaagtttgcctcagatctctttcttcttatagtgaaatatatttcaaaacaaggtaacaggtagaaaggtttaaaacacttaggtcagagaaccttaaagcaacacaggttcacccattggcatgcaattctgagccatttagtttattcttccacatttctcccataagagagaccattttacagggtttcaaggtgattaaataagacagaatagcaaaaatatcctgtaagctgcagagcatttcacaaacagaggacatggccattctctgtccctgaaagcagcctctcaggagctccactagctcaggcacaaggtgcccgaaaggacctcgcgtgaacagctgcggaaagcctgggtgaggactgaaggccgcctgctccagtggctgctcctgggacggctgctgggcaccatgctgagaattcagaggctgtggccggagcctggggagagagcgctgggctccacgattctggcctggccaggcagcgcttggacttgcaataggagctccacaccttggcagaacctgctctggatctcagcagagaaatcagaaggaattggacaaagccctgctcatcagcccagtgctcaaagccccagcatttcacgtcctgaatgaggaatgaagggattttctcagtaacaatttactctttttaaccacacatactaagaaaactttattcgcagcaaattgtgatggggcgggggagagggtaggtaccattcaaggcaggaacatgggctgccacagagcaggtagtggcacaaggaaggagacagagagggtgagcagaactcgggcagagggcacagacatcctgcctcaaacagaagtttgttctcataactcagtggctgctgctggatgtgttgacgcatatagggtgatctagcaagaacctgactcatctataaagagtgaaattacagtacttggtatcttttgaataagaaaactgttggctctcgccagtaatctcagcactttgggaggccgaggtgggtggatcacctgaggtcaggagttcgagaccagcctggccaacatggtgaaactccgtctctactaaaaatacaaaaattagccgggcgtggtggcgggcgcctgtaatcccagttactcaggaggctgaggcaggagaatcgcttgaacctggaaggcggggtttgtagtgagccgagattgcgccactgcactccagcctgggtgatagagagagactccgtctcaaaaaaaaaccaaccaaccaaacaaacaaaaaaactgtaaagtatgtaatgcatctgacacttaaaaaagatgtatgctctggtactcgatggcttaagttccagatatctagaaagttagctcacgtggcttgttcattccttgagactggcaagatacaaaaacaaaacaaaacaaaacaaaaaacaaaagtcattctaccacttgattgttcactctttcagattggctttatcccaaatgtcagatgttactacattcacggacatcactcacctcaaattcttttctgtttatagcatcactctcagtggggctaagggggtgaaaatcacctcttggagggggcaaaaaaacttactttttttttttttttttttttgggacaaggtctcactctattgcccggggttgagtgctgtggcacaatctcagctcactgtaactgccacctcccagactcagcaatcctcccacatcagcctccctagtagctggtactacaggcacgtgccaccacgcctggctaatttttgtagtttttgtagagatggggtttcaccatgttgcccagactggtctcaaactcttggactcaagtgatccgcccacctcggcctccctaagtgctgggattacaggcgtgagtcactgtaaccagccaaaaatcttacttcttatatacaaggaacagctatacttacagtataagtaaacaatagatagtatatgtaacaatgtaaacaatagatagtatatctgttttattaaaatttcatagaggttatcagaaaaaagtcagaaaggcattttagggggtaattttcaaaagattgatttttttaaaagagagcagagggaaaactgggaaggtgtggggtgggacattgaattatctgcccctccattttaataggacgtcaacatacaaggtttaacactgataaatcataaaatagttgacgaggcatatgatttttaaaggcttcttttggggtttggttgaggagggtgggaactactgcttttcaatataaattgttttggaatgtttggtttttttaaccatgcgattgaactacttcactgaaaattaaaatgtaaaggggagaaaattgaacaaaaaaaatctggtaaatggtgataagtatctatagcagacaaaaatcagcaaggtacattctcaaaaactccctttggcaaaagctaaaataaaaataaaaaaggttgcaaaactccgtcatcagcagcggcaaggaggaaagaacatccgtgccgtgccacctggccttcgccccgccgcgcccgcagccagagagatgagctgggcactttcacccaacctgcccccagtgacgacagtgagagtatttgctaatcattcgccaaaattttaaaacacagttttctgggctttaggcaacatggggctggcctgggtgttttggagcctccgagggtgaggaagaggctgacggttttcctcatagaggcccacgggccagatgtctccagagaggagatgctcaaaagaaactgtgctcactgcaaagcagaagagatgcggttaagcaagagaactggattaaccatccatccaaagatcaaactcagaaaaggaggctacggagaatttgccatcttttctctctcctcactagaagctttaaagggatagttagaccctgagtcagcctttcacattgtagcaagcagacacctggaggggcaatgagacagtcccccgtccatcagcctatcctgatgccccatttctttgaatcagtgaactgtagtccccggtatccacctccctcactctctctgcttcctccatttcagtaagcgttcagtgtctacatgggccaggtacagagaagcagcatatgaaggtgacgttggtcatcaaaactctgctgttatgaaacatttttgtgcatcagaggacaataataagagagtgaaaaggcagctcacaggaaaggagaaaatatttgcaagtcatatatctgataagtgtctagtatccagaatacataaagaactacaactctacaacaaaaagacaatccaatcaaaaaaatgagcagctgccttgattaaatatttccccaaagaagacacacaggtggccaaaaggtacaagaaaagatgctaaactttactagggaactgcaaatcaaaacagcaatggtagaccacttcacatcctctaggacaaccacactgaaaaaaaaaaaaaaaaggaaaagaactgggtcgggcatggtggctcatgcctgtcatctcagcactttgggaggccgaggtgggcagatcacgtgaggtcaggagtttgagaccagcctggccaacatggtgaaatcccatctccactaaacatataaaaattagctgggcatggtggcacatgctcatagccccagctactcgggaggctgaggcaggagaattgcttgaacctgggaagcagaggttgtagtgagccgagatggtgccactgcattcc

SEQ ID NO: 49911 - DNA, 3029 bp, Homo sapiens
gttgcagtgaactgtgatcgcaccactgcactccagcctgagaggcagagcaagaccgcatctcgaaaaaaagaaaaagagctacagtgggcctgtgtgttaagtaagagcatgtgttagtgctgccttttactgtctccgaaggtgggagcatcaccaaagcaggccctgagagaactagaggactctaactcgctgagggcaaggagattcttccgggaatttttcgttggcttctcccaaataataacagcctggacacaggatgtgcaggccagccctggctggggacgtcttccaggctggcgccagagggcgctgtccccagggaccacacgggatgccaggccacataactctgcaatgtgttggctgaacttttcaggaaacttggatgccgcacatacttttcctttctttgtgggcaggcaagatgagtcacgtttttctggagtctgctcagccccagtattcagacctcatcagctgccctggtccggaaggctccagctgtggccagtgagcggggggcccagggtgcccgcgttggctgggccagcactggggcttaggggcagacttgggcaagccagagtcaatcttttttgtcgggtacagggtaaagctcacagtaattctggatcatggcaacatctggggacagacccagggccctttgtacaactcacagggcacagccctgagggaggctgggctttggcttcatatagtccctgttctcccgcccacccaaccccctccgccgcacctgactccccaccacctctccaggccctaacttcgagtacctcactctccagcacttcgagctgcacctcactccccagcacttctccaggccctaccttcgcggtcccctcagttcccctgcctcccttccttccgaaggccactgtggtattggaaagttggagcagcgacctgaaggaagggaccccacctgtgtctatctgcaggaagggtcgctgcaggctctctgagaggcaggctctgggatggaaatgagcatgttggatgtacatcagggagtgctcttgggcctgacaaaggggcgatggagaccccgtgaagccccgacagagagttctgaagcccggatgccccttcagagctgtcctgagcgggggtcgggggctggtcctttatgtacatcggccggttattgggcgtaggccggctctgggaggggctgaaggctggcgaggtggtgctccttagctgagggccatctgtctgtcacacccacagctgggagtgagttcctcattcttgaaggaatcgggaatctgggaggcacggcacagcacagcctcaagggtgttctggctccagggtgttttctagcagagggcctaggggacatgctcagcatctcagggtgtttcaggcagagggcctaggggacatgagcctgagcagaggaagacagggggtgggtgtgcacaagacacagtcagagccagcccagggtgacctcagaggacctcagaggccatgtgtggtggggcttggagttttcatttaaatgtgctggggcggcgtcaaggggttgaacaggggatgacatgatgggatttatgttttaaaaacaggagttggcaaattactacccaatggcccaatcctgctggccacctgcttttataaatacttattggaacacagctgcaccattagtttatactttgtctatggcttcgtagttgcaaaagagaccacgtggccttcgaagtctaagacatttaccatctggctttttacaggaaacatttgtcaactgctgtttgaagagactcctctccttgctgggcagagtcatttccaaggcagcaaggggactctcacgggggccacggcccctcacgagccttcccagtttcaccccggtgcctaaagcaactcactttagcagttgctcgtgttctttggtattaatgatataaatcacctgtgcacaccatgaggttcctccaggaggctgcggggccctcccaggtggaagtggagaaaagtcctcagtgtctctacctgtgcgcaaacacaaatacttccactgccctctcccgcctcctctcccatcccccattggtctcctcctcttctcaggcctctccccctggaccaccagtgatgccggcagccacaggtccctctgcccccaaagcaggtctcgcctctgcaccatcggtacagtcccacaggcccctgtggcctccctgaaagtgaggagtaaaatgactcacgtacaggtcatgtgagcaatgccccaggaacacacaccacacacgtgactgcaacgaaggaagtgtgggttccttttaacgtaggagccaccagagcttccccaggaacctctctgcctctgaggcaccaaaggtttcctgtccttgcaatgctgggagggaccctagatggatttgtgggtgcatctcgggcaccccgctcagcacatggctcaggcacacgcaacgactcagtggtgcctccaggcgagcgggtacctgcgctgctctcatgctcaatcctcacccctactctgcctggatgcaggggctgacctctgacccctgctgccatgtgtccaggctcccgctgggcaggagacagggagacaccttgggcaacatctgaccatagctacagcccctttggctcccgttcctgccagacagaccaactgcagctcctggttccagccccgccagggctcccagcgccgccctcttcccttctcccacctggggtgggaaaggattttccttactcatcggtgggtcgcttcccaaactctagtctggcgtctcagctctttcctcacctttataaccacgcagccacataatcagaactgtgacgtccgtgtattaaactccatctgcttttagtacggagagtaaccctcttccaggtaggacccgggctgacagctgagctagggccatctgcaggagacgattcagacggggtcagcgctgcgattcgggggagtaaccagcggtgagcttcag

SEQ ID NO: 49912 - DNA, 707 bp, Homo sapiens
taacctttctttaacccattcccttctctccacgtccttgccctgggggtccaggcctacacccactctcacccagttccctcttgggccacctaattattgtccaaattgttcagccttccctgtttggatctgtgctccaagtctctgcttaaagagcaacccctgaaagggtgagcctcatcacgtcagccccctgctaaggccccagccactcgtaccgtcacctcagcaatggcttccaggcctggctgactgagacacgccagtgagatctcagatgtgcagattccagactcagcctttctggtggtgtttatctccaaagttctcagccctggctgcacactgacatcacctggggagcatgggtagagtgcactggcctgcggtacagcgagggcatttggaaattccaccacagaccagatggagagctgcgtgcctcccaaggaggagtctcaggagtctcagacacagtcaggagctcccagccggccctgcaggctgcaacccaagccccatagatgaactgacctccgcagccttatttctgatgttctctgttccggtctcctcctttcagcaacagcccaggcagagggtttgtcattttccaaacacagctatgcatccatggacatcccacctggaatgctgtcttaactcctcagacacttctgttcatggctaccatccacccctcc

SEQ ID NO: 49913 - DNA, 10621 bp, Homo sapiens
tacagagctcctttgttgatgcagctgggataccccagaaagaagacagacaagagtgcaaatacaggacaaatagaaaggctgccagtagcaggggcccacgatggcccccacctcagggcaaactcgaggtttacaatatcagggtcacgatacaacattcctgtttgattccaaccgaggaagcaacacatcgagaatgatttgcattctccgctcctgctgagcggaccccagcacagagagcaccatctggagctgctgggccttgcgtccgccgaggccagggcccctcccggccatattcaagcccccgtgtccctcaggcccacaagaacacagcctgcagcagggagggagccgggggctgagccggagccccagctctgtgatctgcgatctggggaatcttggacatatccggacttcagtttttcatctgtcaaatgagagggttgaactagagaacctgtgaagatgccttgtagctcgcacgttctctgtttttacccactgaagcggacaacaataggcgagatcaggaacattgtaaaggactcccattagactcagaataagatgcatgttctcatctcctatcttcatcatcaaaataatttcctcctactctcaaacgaccaaagactctccactgctctcagagccacagggtgtttggacggagtctcggggcgtgcaccgccggggaaggaaggagcttcctctgccttcacaacgctatctaggtgagacggccaggacccagcagcatttctgcctttccatcttaacctgtgtcttgatacgcttcttaggttctaacccttaaggtttctcaactgattgttcagctccctcaatcctaagggcctgggctgtgggatccagcaccaggcgggttctatcagacgcccagtgaccccgggaaagctgcgtgtggcatctccagctacaggcccgaggcccgcggttcccacctggaccccgtcctgcccaccttgcctgccctcagtcactgcccggggagtggctcataggttctgaccacggctgagtggtgactgtggcctggatctcgccccaagtggtgacggccttggcaggcccctctgctgggaggcacgggggaggtgcctctggacaggccggccttgcgcaatccccaaaaccaccaaacgggcaattcttggtactgatgggcggcaggaggtgaccagagccaggtcaattggagcctttgaaaaacattcatgttatataaccactctcagaaaaataaggaacaaatattgaatcactggaaccaggcagcaggggagggccagtggccaaatccgggaaggcctaagctccactctcagagaagttccagagccatttactttccacagaggacaccgtagtttctcactacagcctaagcaacttcctgatgtcaaaagaaacatccaactgtttttcactcctatggccacccttcctccctggctccctcacctggtggtcctggttcccacaaccgcctcggggctccccttccccgccccccaaggccaaggaccctggcctggcagcctgagcctcccctggctttgaggaagtcccctgctccaccgtattcccagttcctcgtctggcccgaggccacccggggcttccctagctccatatcagcaccagacatgaaactctttttgctcaaaaccaagtagctgcagaatccctggcccggagtgcccaggagacctcgaccctccccgcagttctgcattcacgtcttatgtggagcacgccctttaaaatccaggaacctccactttccagtgtgtaaaaggaggccatcatccttcttatcacgggctggtgggaaacgagaccagaggacgtcatcaaaggcccttcccgcggtgtgagcccccgtggcactgggcatggcgagggccgctggccgagggcacactggggcctgatgatgaaggctgtggggagcaacaaaggcatcatcaccagggcagccaggcccctcatgcggctcccgcggaagccagggcagttgctcacactcaaccaaggcctgagatcgggtttcagaggcttctgcaaagacactggctgtcccccttataattagagagctgtctttatcccgttcccaaggtgaaagccaagatgattcatgacttgtgcacggcagttctaaagaggatcacagcatggccgctgccagagtctccggctctgtcctcgtgcaaagggcagccgagcctttccttgcccactccgggcagcctttacttgaccagagctccatggaagcttggagggaccccactggcctcctcacgttgtggtggaggatgctctgcaggggccaacagtgcctcttctgaccagctgggggtggccatcctgaccgtcctgacctcaggggcttgtgctgtgggattcctgagagccccttcctagttcagggccccagggcagcctcttacaggcagctgctcccaggccaggttgagtccagcctctgctcatcacacatgcttgtcttcttccagcctgtctgagatcccccagaaggagggagagtggggggcaggggcagcacctagagggacaggttgggtggaggctacaggagtctgggtcagctcccagttcatgaggaaggaggcaagtacctgggaggccccgggacatgcaggttggggggcgcatttgcatggtctgtgcagccgtctcctcgaggaccagcagcaggcagcctcccagctcccttccaagggtgtggcctgggctgcaggttgccgcctccatccggagtagctgcggtcttcacaggtggcactgcgggccccagccagggggcaggggaggggatgttatgggacagggagcgctgggctccactgaccacatcccatcgtggagtcagtaacggttaatttgatgtgtcagcctggcgaggccatagcacccactgattcaatcaaataccaagcaggtggctgccgtgggcgtatttgcagacgtggatgacatctacagtcagtgacttgaagtgaagcagatcatgctgaatgatgtgggtgggcctcccccaatccgcagcaggcctgaagagggaaaacagagggttctggaaggggaaattctgcttcatgattgcagcatcgactgcctgagcttctagtccgtctgcccagtggattcgggactttccagttccgaccaacgcatgagtcaattctttcaaacaaatctcatatatatatatatatatatatatatatatatatatatatatatcacgataatatgtatatgtaatcatgttatatacattatatagagttaatatattatgtgattatatctcaatatacatattaagaaaaatatgtatattaaggagatataatcacataatatattaacttaatatattttcttagtatacatatattaagaaaaataggagatctatatgcttggatctctagtcttggttctccttctctgcagacccctcctaacacagagccctaggccccctcacccgagctggtggggacagacatggggagagtccagggtaaaagcaggccgctgtttggaagctctcagccttcgctgcatagacggatgggtctgctcagtcatcgggtgggctctccgcccacactgtggctctctgtccacactatggaaccctcactttgcccagggcccagtgagacacccacaggccccagctggacgagaggacaaagacggatgtgaagggccgttgtcctggcagtgcttagagaacaacaggaaatggccaaatgtcctcctttgactgtcagggaacattcacagtacgtgaagggcaatcacaggtttagaaaagcaccacgatcacctcctagcctcgtctctgagccttggcagcagagtggggcaatcctcttgccttcgcacgctgggtaacagtcgtgcaagtgtctgtcatggcatcttgtcaccctgtcctgtcactgagggcctgtctcctgccacacccagttggagctcggcaaggaccgcgtctttttcacccctgagtcaccggctcctcccagggctggattccatgagcctctgtccttccccttcgcagagctgacacggggagagtggtcataagctggggcgtaaatgactgaggacggcccgggggccagtaaacaccaagacctcgggataagggaatgacatcctgatgcgccacctccagcccctgtacggagggaacagcccttcatttctaggactgtcttcagctctgacattatgattctaccaagacagggtgtgaaaaggccagctctggggttctggggaggttttattggctcgcaaataaaatgccaaaccaccagccaataccagcatagagccctccgtgggcactaccgactcaagggaaaggccccgaggccccacacccggcccggccagccagctgcagacacaccctccagtcatcggccacccagacttcagagaggaaaaaaccagccacgaggtgaaagtgagatggccccggcctgacctctgctgcagaggcccaaatggccctggtcagatctgacgcttcccccacagtcagcttcttgccaccccccccaccccccaccgccgcctggtgctccccaccgggtacacacccagcggttttggttagtgcttgaagacaaactgcaggagggacaccatgaactacaataaaattgggcaccctggggacatttttgtaaggtcaccgagttgctggctggctctgagacacaccctcctctacgtagaggaccttgtgtgagagaggacacctctgaacgagggctcagagacctcatttctgctcccaaacagctacccaagatgtggctttgggctttggcccagagctgaggcctgcaaaggctgccacctcagtgcttccagaatctcaactgtccatatttacagagccatacatcaaaagattcttccccaacactttctacgggtacccaaggactccttctactccatcttgtttcacccacctgctctgtgccaggcacattatagatcaaaaggtacagggagttcagaggaaggaggaaataccatggacttaaaaagcaagccagggcttcccaagccaagcatagtgaatagaggagctttcatttgtctcctcacttccatcccggggtgagccggccactcccgcagcatctggccacggctcttcacactgacagtcccaacttgtcagtggattatgaaatcaatttagtggattgcacaaccaccaaaaactgaattacaataagaatgtatctcatggttgcatgaagcctgtgtctcaatgattcacacacacatagaataaaatgtactttgtttgtttgtttgttttttcccctgagacagagtcttgctctgtcatccaggctggaatgcaatggcacaatctcggctcactgcaacctccgcctcctgggttcaagtgattctcctgcctcagcctctgagtagctgagattacaggcgcccgccaccacgcctggctaatttttgtatatttagtagagatggggtttcaccatgttggccaggctggtctcaaactcctgacctcatgatccacctactttggcctcccaaagtgttgtgattagaggtgtgagctaccgtgtccggcctgtttttttgtttgttcgttttttgttttttgagatggagtctcactctgtcgcccaggctggagtgtagtagcgcaatcttggctcacttcaacctccgcctcccgggttcaagcgattctcatgcctcagtctcccaagtagctgggattacaggtgtgagccaccacgcccggctaatttttctatttttagtagagatggcgttttcccatgttgtccaggctggtcttgaactcctgggctcaagggatatacctgccttggcctcccagagtgttgagattacaggcatgagccgctgtacccagcctgaataaaatgtacttcctattgtgttgtgggtgaaaaagtctgaaaaattctgcattagataagctttgaaatcatgcaggtagatttcagggaacagagaagagctgaccttctgtccccgaggtgtcaccagaagtgtggagcaaggggtaccatctgtcctcctctcctggctgaagccctctgacccctctccgtactttatgcccagaaatacacatggagttaagaacacagaacatcacatctctttattaccacaagggtgtggtgattccctccctcctcacctctcaccaccacccccatctgctcctcccctggccctttgacatgcagggtagcttggcctcatccccaggccaccgctagacccagaacagcaattacacctttggggacaaccaccagccccagccccctgccgagcggtgcctgtcagcttctgttcccaactggcccgggcctgctgcgggtgccctcacctctagcgcctaaacccagagaactgggcagtcacagggtgttaggatggaaatggcctcagaaattctccaaggcccttctgttacaggtggggtaacagatgtccagagattcaagcaagttgctcagagccacatggtagagccgtgactcagccagaaccaaatcctggtcttgcaacttctaaccaaggtcccttttgatcatgtcatgctcttatagctgcttctgactttctagcttgtgtttccactacataagctggtaacagtaactcttacaggattgcaacgggctggccatccctcgcacgggcctggctatactgggcacatagcaaatgttctaattctatgaagccacttgggttctgcgggcacctttgcatcttgtctccagcgacagcacaaagcccgtgctccaactccctttctggtgtcatttattgtacatgaatctgtgacttccccagagcccttcagtctgtgatcccagccacgcaggcggcagccgctccaggaacttcccaggaaccatggaacctgtcgtgtcctccagactgacgggcgcggacactctgcatggaggggctccagatgccaccggccagcatctagcatctagccagcagcgatgcataaagaccagccaggtcaggagaaggtgtctgctactccccattccaggccacaccgccagggccacgctgcaggcagctaccagataggacatgaaggtgcctgggaggtatgccgccccctccagaacctcacaccggccaaaatccctcacgggtgggctaacaacactcacaacaaccacactgctagctcttttaaaattttactttttagtctttttataagtttaattcttgtttaaaaagataaattgaacctctaccccctcagtgaggcaggcctggatctagatttctgcctaaccagctgtgtcatttgaaagtcgcctcacgggccgggtgcggtggctcatgcctgtaatcccagcactttgggaggccgaggtgggcggatcatgaggtcaggagatcgagaccatcctggctaacatggtgaaaccctgtctctactaaaaaatacaaaaaattagccaggtgtggtggcgggcacctgtagtccaagctactcgggaggctgaggcaggagaatggcgtgaacccgggaggcggagcttgcagtgagctgagatcacgccactgcactccagcctgggcgacagagcgagactctgtctcaaaaaaaaaaaaaaaaagaaagtcgcctcccatctctggtcgtcagtttcctcctctgagacaggaggtgtctagactcaacccctccagctcctccaaggccttcccaaaacaaattctgttccaggccatcccacctcccagcaccgcaatgacactcctccttcgaacacatccaggtgggccccagggccacgctggtcactgccacctggtgggtacagcctgtgttcaggccccaaggcatgagcagttccaggacagaggcaggacaaccaccaaaggatgtgatggcagccagggcttgggtgagggagggagggaagggcaggtggtgcacaggggatttctagggcggtggaaccgctctgcatgagagtgtaatagtggacacacaacatcacacacacgacatcacacatttgtcaaaacccacagaatgtacaccaccaagagtgagccctaatgtcagctatggacttcggttaacaataaggtatcaacagaagctcaatggtaacagaggtgccacagtaatgccagacgcagacaacaggggagattggcatgggggctgcagggtcagggaggggcagatgggcaccctctgaactttccgcttcaggttctgtaaacctaaaactgctcacaagtaaaatccactaaatttttaaaaagcaatagcagcaaatggccagagatggcctcaatttcatctgccaaacaactgcccatcacgccaggcctggaccacccacccagctcctcagagatgctggaggtcataggttccccaggaaatgggaactggagaggtcaattcttcctgtatccacggctccaggtccttctagaacacagagaaaggtgcatgccatgctcccaggctcagggtcagaagattagtgggatccagtctgaggctcagcgctcagaccaagaagataaatgagaccagagacactcagagattaaataccttgctggggctgggcagcaaggaagctgggagaagggtctgagaacccaggtccccatctctcaggcccaggcccttggcccccaggctggggcaatgaggaccaagtacagagggctccagatggaggccagggaccagctgcaggcaccaggcagcctcagaatgtctggagctgggggacccctcacagggctcgctgggcagctggttcatcggggagactacgtggtgcagaaaagcttgagtttcttggttggggactcaaggctgcaaaccacggcgctaatgaacctaaacaagggaatttgctaggttttcttatttttggtgttttgttgccaacaaactcattctgttctagaggggcttgttatataaggaggagagggaagaaaactgctgagatgtgaggccaaagtcaccagaggaggagagacttccagatcagctgctgcgccagctgggagtcaggtacaaaaaacagggggttgtttgcgtctttgttttttcaaacaagaaaaagcaaaaagcctgcatcgcatgtcctaggaatggggttaaaagtcgtcgtctcttgggacagagtttggacgcctctgtgagcagggcctggtcactgaggtgtccctgactcgtgtcctgtgtgcaggatggagtctccatgcagcccaagcctctctgcagggcctggtggctgctgagaggcagaaggaaacccctccctgagtgtggcctctgcgtgtgtcacctacacctgtcagaagggtttgggatctttctttctcatggagaaagtgcagaagattctgggtcaggccctgtgggacatccctagagccagaggaccgtcccctttgtgtagtttgtccctggcattgccagtgcttctggtttcactcttggttctcagcagtggatcctagaagccccctggatcatgaacttctgccctttgcactcatgaggcccagggacacctccctctgcttgtgcaacacgaggctgccacgtctcaggtcttcgtgcccaaagtgagtggactctgaccttccaggatggccgagggtgccaacgtttcccaaagatctgttttcagactaatctgggagacagcctttggagaggtccgtgaagaagaaaggggaactccacaggtggaggggaaaccgaagctacctgagggatactccccacggcccacctggccccctcttagtctgcactgccctattttcatggcttaaagggcagaatcaaaagatcacagtaggtcagttctccccaggctatctgtgtgcccagcctagagaaaggaatgaacattgaacagggacctgctggctgaaaccttcagtggttgcttcctgcctgcagaaggtgtcggactctgcctggcattcagtgcaccccaggacacagccctggcctcagcctctcctttctcccacaccgctcttctgcagcagccacctgacctacacgctgtcctgggacaccctctactcctctttaatccccccgtgccagcattcctcaaaaaagggggctcaggactcccacaaggttaaagttatcatagacatatatatgatatatatataagcaatatgatatatatatatatttttttttttttgagacagggtctcgctctgttgctcaggctggagcgcagtggtgtgatctcagctcactgcaaccttcacctcctgggttcaagtgattctcctgcctcagcctccagagtagctgggattacaggtatgtaccaccatgcccagctaatttttgtatttttagtagagatggggtttcaccatgttggccaggttggtctcgaactcctgacctcaagggatctgc

SEQ ID NO: 49914 - DNA, 2116 bp, Homo sapiens
tgggaatcatgggagttcctactggaaaatgagttaacatatagaagtatagaaccacatatgagttaacaaagacatggctgtgatgcctgggactcatttggaaaacatgagttatcactttaaaatgcttcactgagtttagaggcaatatactatgattactgaacccagggacactacagattcttccttctcagagctttgatgagaggaaagaggcagattccaccttaccttcaggtttgccaagatccttccccaacgtacaagtgaaagggagctcaggaaggcagaatgaagggacacatcaaatccttggtgacaaagtttaggacaggctgggcacagtggctcacgcctatagtccaagcattttgggaggccaaggcaggctgatcacctgaggtcaggagttctagaccagcctggccaaacctgtctctactaaaaatacaaaaattagctgggcgtggtggtggccgcctgtagtcccagctactcaggaggctgaagcaggagaatcgcttgaacccgggaagcggaggttgcagtgagccaggatcccaccactgcaccccagcttgggcgacagagcgagactccgtctcaacaactatgacaacaacaaacagtttgggacagagaaaaatccctgtaaacttcaagccttttggggtgctcttgggtgaactcctaaattgctcaagggctaacttcctcatttattattaaaagaaaaaagaaaaaggcagaggccagtggtgaaggctggcgatttctggtctagggtgagagataacagaaagtaacaatggaggctctcgcagtgctcgcaggcactcaaggaacggaaaggaaattgcacatttcacccgtgactgcataggcaaacgagaacagcaagtctctgctttcagctggaatgttatcaacttcggtcacgctgattatctcaggctgatcaggaaggctggtaccaggagtgagtgactaaatgaagaaattactaattaacaaatgcttgggtggacaatccttcaaaatttaggatcaatgggaggagacagaaggagtcttgggaggatttttaaaatatgccagagctggctgggtacagtggctcacacctgtaacctgaggactttgaggtggagacgggcagaccacctgagctcaggagctcaagaccagcctgggcaacatggcaaaaccctgtctctactaacactataaaaagttagctgggcgtgttggtgcatgctgtagtcccagctactcaggaggctgagccacgagaatcgcttgaacctgggagatggaggttgaagtgagccaagatcgcaccattgcactccagcctggggaaaaaaaaaagccaggcctcctaatgtactcatttaaacatcacttgtgtccacctgggttcagaattgcgctggacatgggatacacaaaggtaagacatggacccaccctcaagtctgaaggtggaggtggggaagggcagaggctgtaaagggtcagagggaccttgtggagtggtggaaatgttccagatcacactgtggcggtggtcacatgactgtgcacacttacgacaacccatctaattgtatactgtcagtcaaagggcattatatgtaaatcacacctcaataaagctgaccaaaaagtggccagtcagccaccagcagacccatgggataggggaagaaaaacaagcaatctacagaacgtgggaaaatgcctatattaagaatcctggaatactccatgtgctttttcatgcagcgggagtggaattttcaggaagcagctgtgctgtgggtgacggtcatactttattctctaaaactctccagtttcaattggcctcttggtgccaaagcaccatggcgtgttacacctatcagatcgggcacactgccccttcttcccaacctacgagctgaaatggccagcactgcgccttccagaacccagcgtagatgcacagctgccacggaggtaggaagaatgattcgtttgccaccaaaagcccagtttctccaacaggtaagtcccagcagggtgcgatgtcccaaacctacacaaccgtttccactgcctattc

SEQ ID NO: 49915 - DNA, 1274 bp, Homo sapiens
tctggaggaaggaagaggctaaaggcatagtttcgtaacccctccctacaaactaccccctttccctctgcccaagtgagcacagggaccgccccgcagcaagacgacggcagatatttaaaatgtgaggaaccccggccacagcgggcggggctccccacccatcacctagtgtcctcactcactgcactccagactttgtcaaagtggtggcagctgagtccagcaccagagattggtgatgctcgggttgatttcattgtcaagtgcatctggcaggactctagtttgtcgacagtattccagacaaggtgtagctggctgaaccgcagtgcctcggcatttgggaccattgaaaaatactctggattctttttttttcttttgcaattgcacaaggatttacttatctctcttcatgggtgaaactgatttggggggaaactgctagactcaatgaccagttggactgtaggcaagaaggcccatgattttgttcctcagataaaagagcagcagggaaacaggaggcctctctcctgcaaagctggtccaaagtgcacacaaggcatggctgagcgcctggtgatgcacagtcagcagacgggcgagacccaggaacgtgtactgtaacaagagagtctagtgcaggttgttgggggggcttgaggctatccgctgacatcttttctccccagtcaggagacagtaggggagatggttctcatagatcaagtcgggctttgagaaggaaggtgaacaggagaaaaaaaaaaatagaggcctcagaaagcccctccctcccaagtctctcctcacaggcgaaccacgacagatggctgcgcggcctgagggccggcctccaggcagccagggaggagcagctgcaagtcctgcagtctgtgagacccccgaagggtctgggccagcatccaaggctaaagccttggctatcctaacgccgcagtggggcacttaaagctcctcacgcccaagcccaggcctggtgggagcacggttctctcccgcgctccccctcctccccactccacggccacccttccttccaatcgtccccctggagttcgtgttggaagatgccagtgagcacgtctcagggctctacgccttgcacggatgagtatggggtgactcagagggaaggggtggtggcagatgcctgcagctggctcccagccaggtttggccatcctgcgtaaatgcctgccttgggtcttggcctaatactaagggcaaatcccaagaggggtgag

SEQ ID NO: 49916 - DNA, 2353 bp, Homo sapiens
gttctgatagagccagacattggggccttatgatattacataacaagtcaaaacagtgacttcaaagaatgacaaatggcaaatgtgacaggaaaatctcaaatgatgcatggtactgcctgagctgtgtaagtggcctagaaaactagacatgcatgagcacacatgtgtaaaaggcgtgtctccagcccccaccccccaacccctgaataacagacctgggttagatttctcagcatcccagaaatctagcacaaatctttgccaaatcccatgccgccctcagcccttcacctaaaagtcaaatgctgcatgccaagctcacgtccctgcgatgaggcattgctatgcaggactacaccactgcaccccagaaccctgtgtccagagccaatctcggcaccaggccggcagggcagcttgcagagggagtatctgcaaaagggctgatggcaactgccctgggcagagacgctgaccaataaagcccatattctaccccccttttatgtgccaatgctgtccctgccctcactgtcctgcaagatctgtgcaggggaaagccagaggccagggcagctgaaagaagagggaaccccctgggctcaaggcccagcctcattgaccacacttttatttcacttgggagctggcagctggggattcggggcacggcatgccactggctggggccagcatttgagattgactgggcctggtgggatgtagacggtgtggcattttactttggaacctcattcctatgacagcttgaggccagtgccctgtactcatgaactctgtgcaatatgccaggtcctgtggttgcttctgaaatatcccaattgggaaccaatgtgccaaagagggctgctctgcgccgtgaacatccttgttgaaattcacagcagagggcttgtcaatcagctccctggcgaaatgagtggtgtgcagagtgagtcaggaggatggcacaggctgcagcccccttggataaagagacagagaatctggccggcccgcagcccacccagccccggtgacctggacgctattggtcttcatcctccacctccgaggacccagctgctgcatctgctgttagctagaccagtcctgccggtcctaacacctctgggtcctgctcggagtgcatctgccagagggcagcgctgagacttcctctgagctacaagaacaggttggacctgccgcctaaaatcgcctatagggatttggcaaaccctgctctaggatttccttttgttgtcataggccaccagtcccaaggctgtcagggggacacgcagcctcacccacctccagtcgctagagactgccaatatttaccaaagtaaccagatgtttgctgagtggctgtgctgagattagattagctgagaatagttcgcccccctgcccctccctgggtacctccatccaggtagaactaatagttctaaaactgcaggattgcaaagacatttggagtcattaagaccttgtgtcctgattttaatggagtctaaacaaaaacaaaccaacccccgcaaaggataacagtttctctatctttcaaggccatgttctgaccacctgaaggtcttgagatacttgggctactgcctggagccttacgggtgaaaaccggtcccctgagcctcaaatgtgggatggggccccagagccctctgtccaaagaagtgccgtgtgtactgagtgtgcatgcagctcctgcggtggctgacttgtgtttggagcatgtcacctgcccaatcagggacccacctctaccaaataagccagcaggtctataaacgctaagtcatatgtgatcaatcagtttaagtgacgtgcccaaggtcacatggctgtgtccttagagggccaaggctaagaccaggtgttcctgattttatgccagcacctgataaggaagagatatgcctatccactggaaaaccggctgagactttgtcccgtgaccccacagtgacttgtctaactccagtctgaacaagctcgatgtgtgcagggagcagaagtgagaggaggaaggactcgctattcacgccggcagctggaacctttttctaaaaaatggtgcatgccaaaaggagctgatgggcttagcataaattcaagagggacaggcttaagcatctgtcagagcttcactccttccaagaacttctctgacctcgctcctacccccatcacgattactcctccacacccactgccgtgggctcctttgacttccgtcattttgatgcttggggcccggcccctgtggcttctgcagggcacactctactcggaacaccgctccgtggcctggcccctgtggctt

SEQ ID NO: 49917 - DNA, 3995 bp, Homo sapiens
tctactctgaacaccgctccgtggtctccaacttcacgtctcccacagggtcaatgtccagtcaaggcaagagctcctcagacctgataagcaggagccactgtctggagatgagcgccaccttcaacagaaggaacttggcacttgggaagccccattttctttcctcttccattttttaaacaacaataagccgggcttctctcctaaccctgaggcccaccctgccctagcagctctcagtggcccatcaccactcccgctctctctctcggcaccccgtctcccagtcaatggatattcttaggaccccccccagccaggtacctgcctcatgctgcattgctgggacccaagaaaagtagaagagagagcctccaaccccacggacctcagtcccggccagaaggaaagctgtggagacagggaacaagcaggctgagagtccacacaacatcgtgtgtggcacagacagcagccaccatcatagaagtttccagaaggaaggggctactttggaagaaagtcttaaaaaataacttcatgaaaggagtaagactgaagctaagataagcaagatcaggtaaaaatcagaggcactgaagggtccttgcattttgtaaggccccagagcatcctcctcctttgttccctagacacactgtcaaggctctggaaggctctagaaggctgtggaaggctcatggcaactcgatctttcttttaagctgggaaccaggattgggcccaggcttggcacacacagaaggccaacaggctgtagcacaagcctggctagtctcaggcaggtgctccggggctgaatgtctgtgacctaaaacagcctcaatggcactgctgagcagaaggccccgggctgcccaggtggtagaaggccaagctgtcgtttagcatgcacaaggctccccaatttaattgaaatcaacataaaccacactgcacaaaaccattttttttctacaaattgccctctataacaatgcccctaagcaagtcctctctaagacacattggattcctcgtcctgagcacaccatgaaggagaaaaatgcctctactcaccctttgaaacggatgctctttttctacaggttcaaattccagctttgctttgccagtgctgggacgttggctaagtcatttagcctctctatgcctcagtttcctcatttgtaaagtggagttaataataattatgcccaccccacagggttactgtgaggattaaatccgtatgtatgtatgtacatgcacacacatacacacacgcgcacatatgcacatctgtaggctgagttttacggaggcgaacagggcctgagagctgctgggagccaaggatctgggaggcaccccagtgcgttccagtgccgcgtgactcaggtgtcagagaagcccatttaaagacctcaccccatgacaactgccactggggacagatacagagactctgaaccttaaggcaaggtaggaaatggcagaaagtaaataatagaatgttccagaaacagacacctgcagcctcctctgggtgggatgatgttctggccagggctggggccagagcacaactgccaccgccctaggaggcctcgagcccaggaacgaggtgggttcaggagggcagcaggccagggtcaagggcggggggtgactttactgtcagcaggccagggtcaagggcggggggtgactttactgtccccaaggcctcctttaatcaactgaccacgatgtacccagcgctgcctgggtgaaggcgctgtgggagtaaaaaggagcaaaaggcagatgcggccctgaagaccctctgagccagtcttgggacatgtctcagagcacgcggcggcccaggtccaggggctcccttggggctgggctgcacagctgagactgtgaaaagccaagggccaggaggcgaggggaaggctgagaggaacggtgagccggccccgctgcccaggcttgggcacctggggcagctggcctgtgagatggtgctgcttccagtggtggcaggtggacagcgtcttcccaagctctgacagacacgcttagtgcaatggccttggctgtgtggagccagggtcaggggtgcagacccatgtggacgccacctgcaccctgggtcaggtgacagggacctgcctccacacctccacgtcacactccctccctccccacaaaaggttgcccaatgaatccacaacacagaatgttcagccctgattcaaaaatgaaacaaacaagaaaacaacctccagcgactaatcagcctggggaagctgagtggccgccaagcccggctctatcacttgaaaatctagggctcctagaattcctcccagcgacctggttttcagaccccaccccaccccaccccacagcggaaaacgcaagctcaactgcagaacctgctccctgacccctggcttgtcacagcagcaggggccaggccacagccggactctgccaggcgtggcccctctcagcacagccgcctggggacactctctatgaagctcaggaagaacaggaaaaatgtgtatccagttttgttggctacagggattttgtatcaacatttttttttccaaaaattgaataaacactaaaacttaagctgaaacttcttaaatgttttaatgattttaaaagaaatatctcagaatgcattatactctgctgttatgggttaaagtgcttgcacccgcaaaaaagacattggagtcttcactcccagaacctcagaatgtgaccttatttggaaataggggctgttgaatttggccccatttgtgagtggtcacatgggccaggcaccgtggtgggtgcagacccctctcctaagtcagtccagggacaagagagtagatcccaaggagatggaacctcactcaccctctgcctaaccagtcctggcctactgggccatctgggggcctcatctctgattaaaatgtcaaactccacatcagaggctagggagagacgtgggaagagatgacaccctccatctgtttctggaaacttccacagcctgatcctatgatcctttaccagggctgggcccagggatgtggggcccagagtcattcctggtggatgggggctggaaaggaggtaaagtccacccctggctaaatcattcgtctacctggagagaaaattagaacctctggggagttttcaaaaactagatcccaattaagaactactgaatcaaaattgctggggctgagaactgggtgattgaaatattctgctaagtaagaaccactgatagcacccacccacctcactgtaaagacggggaaacaggcatagagagaaaatggtgtgtgggaggcccccagttattcttggtataacttatggaggcagaacccaaggaacctctgagaagggaactgtgaagtcggaaatctgagctttccctttaagaaggaatcagcttttgatttaaagtaaactgagaggcaattccttggacttcagggactcaagggcatgccgtaaatcgcccttggttcagaatattcataatattctatgacttggaaagcttcttagctggaagcttcgtaattggttcaggtcaaagatcccagttcagcttgtgttttgctcccctcggcttttccccacttcctgtcatcctgcctggttcctgacttccacattctaagaagatacagaagtgattggattatgctgcttgtgttaacatcaaggtttgtggaaggtagtgcagatagttgccggaactcctaagccgcggtgaatggtatcgactgatactttaaatcgtgatgagattgtaatgagatcctagtagcctctgtgtggagcccctccctctaggagggttattatccccactacccccaccacacttggctgtgtgccttgcatttcccagaagtgatgggtgccacttcccagtggaagcttttggagctgtctgacacctc

SEQ ID NO: 49918 - DNA, 2922 bp, Homo sapiens
cattctagttctgtggtttctgcaaggaactggtgggccaaccattcctaaggaatatggtgttgacaagctgaagacaggctgcaccatcacgcggctacagctgttgttctgaatttcaaatctggtggcttcattgttgttttcccaaaagtttcatgaattatgtcaccaaaaaactcactgatttatggagtaaagttgaagcaatatctagttggtgtgttttcaaagagaataaatggatttctgcttgcacttctattcccagagctgagtatttgagtgtttgttctaggatctggtatcacacagccttatctctatccccactggggtgaggccccccaaggaagtttaggctggaacttgagaccacttatcaccaaattaataaaatagattcatttggaatcagctgactcaaagcaggaagacttggacccaattcaaacatctagaccaaaacctacactctgtttggttaagatcggatagaaattcttcctcttcacatctcacatccatggacatgtcatggcagaaggctccatcgtcctcagagcccagccagggaaggtgagcaggaggcagcacatggctgcccacctctgtagaattccaaggaacagaagctttttaaaaattcagattccaaggcctcagcctgggcctcctgactcctggccagggtttggagatgtagaaggaggtagaaggaggagatagaaggagatggagaagaaggcatgagtcagtttcctcccacactccaggcctttcccaggggttggggaagcccttgggaagctctcctcttttgctgcagagatagagaaagagcgtggctctgaagttgtggcagtgtccctcagagactggtcactcactactacagaccacaggcaggccagtgctccctctgggcctcagtgtactcttctgtaaaatgggaagatcatactgggtgacctcatccctaacacctcgtctctagctctcaacttctaccactccgcgaagtcgtgtgggctggaagtcagagcggcttcctcaaagaggcggaagaggacccatcacatgaaggggctggtttggcgaggcagaggtgggaaggaacgggggtaaaaaccctcccacctgggtgagcgtgtccatcggagcagtggttctcaaatgagaagcccttccccatgagcgaatcacaaagttattttaggtaggtcatacgaaatagaaagagatacgaaacgtagaacagacaataactcagtgcctggcaaacagtgagcactatgcaaacacgagttattatttctatcgtgagtcatggtccaaaagtttgaaatacactaactttctgtggctcactgtctctatttcgtcaccagcatgtgacctccatgagtgagggatttttgacagttctgttcactcttaaagccccgtgtctaaaacagtgcccggcacaaagtaaaggctcagtaagtatttactggatgaataaatcggtatcattccatgcaattgttgtcacatacatatattccctcttgggctagaccgcctgggtctgagtctggcagatgaattctgtgctccccagcccggcaaacctccctgggacacggggacgtcacagctcctcttctcggtgctgttgaaaagagtgtatgcggagctccagggatggcggcaggcagcctccgccccgcacaagggtgctgggagacatctgtccctccccacctgcccctgttcccagctgccccccacatctcaaccccacagttccctttcctggcaggatcactgctcggcatccctctcctggcagcgacaaaaatggccctcttcaccccgacagcctcttctcctcgtctgtggcctgcttgagccaggatgggactcatttccttctcaggtgaagacgttgttagtggagaaaatgaatcttgggctaatgagctgatcagaaccttgagctgcaagagggctccggctctcttcaactcctggcccagtggtcctcagagcgtggttcccggaccagcagcgtccttgtcaacctaggaacttgctagaaaagcacattcatgaacccgcctcagacctactgaacggaaaactcggcggtggggcccagcctccaggtgaccccagagcttgctcaagtttgagaaccaccagcctaactattgttgaggagggaggaagcggtggtggccccacttggaagtctgggccctggcagcatcaggactgactcgtgggggaggcgctgggaagggaaaggcggtggctgccgttttcagatgcctgcctcccttcccaacctcgtcatcctcacaaggggaggtggctgccaagtcacctaaatgctgagggcggcaggtagtgggagccgcatttcccaaaacactgcgggggcgggaaaggccccacctaggagatcagagctcttcccaaacaccaacggcaaccccagctcatcggagccaccaggaataattcttgccattagccccagagtctgccgctccctcagggtccctctcccggcatctgggggctggattttcacacacacagtgtgtatggtcccggaacacagacgggtgctgtcctcagatcgggggctagcagggtctggaggagccctcctcaacagatgagtccctgtgacatgactttccagagccagacctcccggcctgatcagtgctcgcccctacttgcggtgtgtgagctgacacgatttaccctgatgggcagctgtttatttttacaatttatggtgaaccatgttagaagttttccatttcttctagtcttagaaagtttcttttaaaaataaatgtaaggccgggcgcggtggttcacagttgtaatcccagcactttgggggtgggcagatcactt

SEQ ID NO: 49919 - DNA, 1435 bp, Homo sapiens
gaaagccgagtctgacaacacggaataagaagtcctcgatgagccgccgcaatgtgaccttaggccagtcacttgagctccaaggcacggcccacaggggtacccctgctccccaacccgcaaatgggtggtgagacctgagggactctcaaattcctccagcgatcccgccgtctctgtgcctggccctctttatctgggatcgagccactcacacccttgctgccatctaacttttcttaatggcctggtagggaaatatcacaaaacaaacacacacaactcaaagaaaaaagaaacgtcgcccatgccagagttcagcgtggctctgacattacattggtgcctcttgctgggagaggccaaaaccacaactttccggaactggagtgagctttcctgccatgagagctcactggagcattttgctaagaacgggttttcccagtttgagactggcgagtttggggcctctggcaaaaaaaaaaaagaaaaaaaaaaatcacttctgcttttgccaagcagcttccctttttctggaaactgcccgatccccacctcgctgtgggcaactctgccagcaacagctactcctggctggcccaggctggtgcggggatctgagacgtggagtcgcaatggccagtgtgggcaagcagctcttgtgaagttggccacgcacgtctctccagagtcggctacagatggaaatttccatatgcccctgttcagccaaaatcacaggcttttggtttcattatcattgtcaaaccattaaccactaacccctggcacctaggggagagcgctcctggggccccactctgcatgctggtgagctcgaatgtcttagaagtggatgcttctggaaggaaggatgggaagcctccctcctcatgggtccccctccacagctcacgtccaaaatgccttactctgtatcatcatcgtctatgaaatgtgcacgtcctcactcccatcactgctaaaacactgctcagactcaacttccccaggggagttcacaggagagggagccggggcttcctgctctggtgaagggcttccctccactccctctcagctggagggcagggggcagtgaggggaggagcaagactgaaaacgggtggcaagctctcgcctgtcccgtgcctgctccgtcccatgtctggaagaatgccagcctcaaagcaaaccctcaacagtgctgcttactgagtgacaggacggacgcacaggaacccaggctcctacgcaagcctgtgccctgtgtaaggtgccagctcagaccgaggcactggtcgggggtccctggggctaggggggacagaaccctcaagaatgtaagccctggcggggcacagaaactcgtgcctgtaatcccagcactttgggaggtgggcagatcacctgaggtcaggagttcaagacc

SEQ ID NO: 49920 - DNA, 495 bp, Homo sapiens
cagcacacggaccagctggatgcttgtggggcctgagggtggacagctcctccacgccatcagggctgctgtctgagacctgcccccaagagcctctggccaggacgcagccttcccccacacatcacaggcacagggaggcatttggagcgcccgaggatagggctgtgtgacatccctggcaagggccaggcagcgggaatccagccgccaaactcgagggcctcatggaatgctaatggctacggacagcactgccacaggcttgagtgacatcacctcagtttgcacaattgggctgagactggagctcagccttcctggctcccactccttgagctcagggcatgagtacggccacagaatcagggtgcctggtccttagggcgcgcctcctgtgattctcacacaacggcctcaagaagggaggcagcgggggagtcacggaaggagggctcagtcaaagaaaggacacatctgagcagagggatggcc

SEQ ID NO: 49921 - DNA, 4285 bp, Homo sapiens
aaaccccatctcaaagaaggtcccattcacaggtatggggtgcagagggtgtgggacttcgaccttttttttggagaatccaattccatcgcactgttcatctttgtgtcctcgacacccagcccagtccctggaaagcacacagaaacgagttgactggtttctggtcccagcactaaccctgcgtaaacatagttcttagcaatggctctctatttctttattcacaagtggagaatttgcatcctattttctcaaattctcccctcaccctgttgcatccttcttcttcccctccccagcacagtggaggtcactgcagggccacccccagcaatgaactcccctggaagaaggccagcagagctgcagggcacccccctccaggaccaggcctttggctcatggaaaagacgctgggagcctggggttacggagcaaactggtctttgtcgtgcattcatcagcagcttcactgccaggtcagagtatatcaaaacacagaggccctggcagacgccccaaagcctggtgatagccgattggtccgtgaccagccatgggttggcagagagggcttcctgtcaacaggaagtaaaggacagggattaaattattttcaaagtaggtagtggaagaaagagatgagtgagattccaattaaccattccaaggcagggctaaaatacagttccaccaaatcaccttcttctactggggaagctcagctcgttaatagctaaccccttcctctggtctgggggcataagccatgcaatgagtaacagtgggggcttctaagaactccgtatggttaagcccgaaggacgcagctgaactctcaggtggcccctctgctcatctcagagcgagtcacggttaaagaaccaagcaaagtcaccactctgtttcaacgtcacagctcagctgcccatcggcctttgtttgttgcgcattttaaacgacgttgacagaactgtggggttatcaggatgggctggttcaccgtcctgaaaggacggcagacagctggtgcttcatcggtgatcacgttcattggtcccattttggccgaagggagggcggagggaggagaacgggtgagccacattctcactcggctcctgtcagtgtctgtggctctactcggtaaccttagcagcccccataaatgtaaaaaggtgcctagaaacagaaagacactggccatgagctgaatacaccaaaatcagctcttataggaaaacagggagagcaaaagaaaataaacagccaagaaacaggaatatttaagagcacatgtatttgcctgaaggttttagaagatacaaactgatttacaaattacgtaagcgaagtctgagtagatgaagaggcgttggcaaataaaaagtgcttccaaatgatttctttcgccagtctagtgttcagcacagtccaaattgcaaaccctgagtgcaaactagcaatattgttctgagaggttttattggggggggcagttcaaagaaaagaggcaggaaaagacactagcaatgcactgagactcctaacaagtttgtgacatgtgaaaagatgcaatatcgattgaacccaccaactctgctggctgctgcttctgtttatgttaattcagtactcgagctgggaaatcatgatccaggatttaactctttgcattcatcagtaggctgctcctctgcagtatgtagagcctcgtttatataagaatcttggaaccctccacaaagaggtaccaggaccaagcgcgaatagggcagcgggggctagatgagggcagagatgcatatttcacctccactgtaattaaccctgtcatctaccatgtaatgatgaacaggctttttctcagctgggcatttgtgaagtagggataagaggacgaggcagctccaaggtgactcccgcaaggcactgagcatgtgactctgcaggcccatgggtttgtgcaggctccgcactattcccccatgtgagctgctctgtgggtgtccctgcgccctctgtgtggtagagtctttgaggaagtgatcacgcatcactgtctagctgcccgttccctccaggaccagcactgggccgtgctcaagcggcattgggccaatgtgccgtgccccactgaggacgaccctcgctgatcagccctctcacacccagcgtgctgcagagcggcaaccaagcttcatcaaaaaccctggagccacaggccagtctgaggaccccatcaccaagaagcttgactactgaaggttcccatagcatactctgggccctattggagcttacggcagggcatctaagatgcatgaagccactgaagggctgagtcaagaaagcttgcagcgtggcctaacgggctggcccacacaggcagctctggctacaggctggtttgggcattcatctttatttggaagccaaatgttgaattgcctttgttgaatagtcaaaagtcaaggatatctcttctcaatgacagctgaaaaggtgcagatgatagatagatagatagatagatagatagatagatagatagataggcaggcaggcaggcaggcaggcaggcaggcaggcaggcaggcagacagaggaataactcatgggggcagaagaaatggaacagtattacaccagggaagctattaatagtacccagttgtttttaagccccagtaggtacaagaatcaccggagaacttaagaaaaatgcaaactcatgggtcccaccctcaggcattctgattcagtaagtctgggctacgaagcagaattttatattctaaacaaacactgggagcttctacataagctagtccatgaaccacactttgttaaacattgccctaaaccctaatccagcaaatcttgctcaggatggtacaaactggccaaggtcaaagctgacacgtccactgtgccacacagcatcccccttccctttgcggaggcttccatccggagcgtttcagtggtgtgaggggcacaaagcactgtcacggttcgatcctccagccccggggcaggacggggctccccttcccaccctcatcctggagttcccaaactggctcattccagccggatagaggctatggggcaggagctgggtgcaaaggtcccaggccatcaccagctcggagggtgcgtggccttctcgcagcgcggggcttcccttgaggccacgcggcggggggaggcaccgctggcaacaggcccgcccaagcccagccccatctctgcaaacgttgtgactgcccagctccctggctctacttttagtttgtctccagcgactgtgcaggctttctggagcacctctccccagagggccagcgacatgtacattctgacagaaatgccccactcagcagcaaccatctgaactcctccagcctgcctcagtgtccccaaagacttctgccttgggtccatctctctgacgtcttccctctccctgggtctccagctctgtcattggcttgaaacagttccagagacacacgacatggcagccagccttgattaaagcatgtctatggggtctatgaactttagcactaatagggaagctgctttttcttagaccgacataagggagaaagagcacgcttgctaccaaagtctcggcagaacaccacgcacagctacgcttccagtgagttacttcctaaaaccattcccatcaccttcataatcagccatgccttacaagaggcatggaggctcagagcagggagccaaggcgggatgccaacaggccaggactctgacctctacggccctttgctactttgaaaggccagcatggcctcaggatagaatgtgccgtcagtccttccccttcctctccattgcatcctccccctcctcctccaagaccctggagctgtgcccataaaggtgacccaaaatgcccaagaaaggctgaagccaagcaaggcgacaccttcgttaggtccaagggccacgttcccttccccagtacacagccatcaaccgaattcaattgataaattacttagtagttctaggtctccaccaccgtccactacccactggccctaggctgtcccctaaaatggattcttccttcctggtgtcccaaagcctagatgggctgttgacaggaagcgggcagtggggacattcaaaatcatcagagcccgagagaggaggtttgcaacaattgcctccaacaccctaggccacggttctgtttatgatatgggctggaggctgaggtccccaaaacgactcaatccaa

SEQ ID NO: 49922 - DNA, 3841 bp, Homo sapiens
ggctgcagtgagccatgattgcaccactgcattcccacctggggagcagagtgacaccctgactcaaaacaaaaaaaacaataaaaaagagttttcccatgaattactttatttcaatatccgtataaagcaggaaaaatgggtattatttcctgcatttgacaaatgggagaaacagtagttacacggttagctcaagtgatcactgtttaagaggtttgtggcagcaacatctaacttttaactcacgaacatggttttaaatgtcttacatgagagatgtaaacaagaatgtttcattttcaaatagaacacttattcctgcataatcgagtcaccaccgtgggggccacacagcagccaggggtccaagtttccagccccagagctttccagccagggagggctggcccagggcccctgtggggctacttggcatcaggtgtctggagacccgcccctggactccaccctcttcacccaagcgttaggcacgtgtgggccggagtttacacaggaggaccttagcggggcgtctaaaagaagggtggctcagcaaacacggggcagtgcgccctgggattcacagtgggaagtgagtggcctgcctcggccatgccagctgcgcctgaccctgtcgggaaggattagctttaatgaggggtccggacagcccattcactgcgcactcccaccctgccccgggagagcaaaataactttctctacggagcactctggtgtgtgtgtgtgtgtgtgtgtgtgtgtgtgtgtgtgtgtgtgtgtgtgtgtacacaaacatttacttggttggctgaggcggagggtgtgacccagtgggccacacctcccaccgccctaccccgctacgtggaggcgaggaacagtggccgcgggctaccggggcgccttccgaaaagagaaccactacgcggcccgccgcccctctggctggacaaagtgaagccgcaggcagatccgagtcgccaatgtcctcccgggcggctggcgcggacggggctgaagttcaatgcagcctgcacggattagggagctccgagcccccaaataccacagagacccaaagtacactcccggggcgggggaagggaacggcggcagaggagacccccgctccaggcccagaaacgcccggagagaaactggagcggagggggtgcattggaagacgcagctacacagctccccccaacccccgccccgctgctttccccacccaccgcccctcccctctcctccctcccctcccctctctccgtctccagcagccgagcgcgggctccacctccccggagcgcagtccacaccgtcccttttcagcaaaacaacacaacgcaccgccccccgcacccgcacccggctggataccgggctacgcccagccgcccacccgccgcgcccggcgccccctctagtctgcagccgcccagcccccgccccaggcggagccccagccctggctgcacgcgggcagagagagagattgagccccggctccgccagcccagctcgggccctgtccctctaccctttccccaagccgcccgaagtgacaggaggggcacgcacggcgcgcgcggggcgtccagcgttaaccgcttcggcgccggggacgggagcgacaggagggctggggagcaggggaccgagtgctgggactcaccggaatgtgcacgcgcagcgaacgcctcttctggctggcatttttcttgccgccgctcccgccggggctggaaacatcttttttcttcttggtgtccataaccgcgcttcccataactctaaccagaagttgattctgcgaaactcctcgggggttcggtcccctccttccctcccccggccgctgccttcggactggagccgcgcgctctgttacaccctgaagccacctcgtggggacttccgcggagagggagggtgagcagggaactcgcgcggccgccgccgccgccgaagcgccgaattcaagcgtcctttcctacggaaccctcgtaggcaaatcagtcaaagcccgtcccggttctggtgtctccccgggttactcgtggctgaggtctcccgctgggtgacaaagttttcttccttttgcaaagctaagaaacattttccaccctctcggctcctcccacagattcccagaggtaatctgaaaggcaggtgcaattaaaaccagcaatttggaaaacaagcctcctatgcctgtgcccaagtggggaatctggaaccagtaagcccgttcgtgcataaatgtaatcctcggccgcagaataaaccagctcggagcctgcagctgggtccgtcctcctttctgggcgagagggagggcggcgggggaagaggaggtgcaaggcgagccctctgcgcaattaggctacgggcggccgctggcagaagttctggcggcggcgctcgcggccctgcgcgccggagggggcgcccggagtccagcgggccaagaagggcagggcgcccgctcctcgccccccgccgcgccgcggccccaggggaccgcaaggggacagtgaggggccgggcctggcaccgacgcaagctcggggagcgcgggtggtgggaggcggcgcgtgttgaacaggaagtgcgcggcgtgcagcgccaccgtcccgctccccgtcgccccacgccgccctcgtcgccgcgcccagacccctgcggcggccgcagccgcttgggactcgctgcgagctggtttcggatccatcccgcctcccggcgtctcactgtgtgccctaccctttgaaacacgcccccgcgcccgccctgccgtagaccaggcagcgaggaagcccacagtctccgggggcgctgcgcgcgaagtagcacgtgcttctcgaaacaccgcagcccccgggtcccgccccgcccggcgcgcgcactcgaacccgcccagagagcggtgcgtggcgctgggtgcgagcagggtctagccacccccaccctcaccccaccccaccccaccctgcttttttcaggttcatcaaggtttgcgcagtggatccgcggtaagtgcgtgtccccacgccgcgggaaacgtggggctcctgagactgcggaaagaattgggagaaggggagggctcgaagacccgggcgagggttcccggtgcggcccaggtcctttagagccccgggtgggcatccagtaccgcctgctgccgagggccctagaggggttgggggagggggctggtgtgtcccccacccccagatgcgccccaggatggcgcgacctcggctccctggtggaaagtagggggagtgctggcttgggggtcgcttcccctcctgctctagtttctgaggatgtgatgaccccaaaggtcattggcgctcccagaatgctgacgtcagctcagccgctccgagtaatcagtaatgcagggaggccacccgcagaaagaacgcgacaggggtcgctttggggacaccatagggcctttactccttttgaggtgcgtgctttcgcaggactccctccccagaggaggaggcatgatcagcccacccaaaggatcatctcttaggaagcaggcgtgcgcccacgcagggagaagcatccttcctttcagctgcttgccgggtggcttttccaacccgagttccagcagcttgcacaaaatccttacagcttgggtggttccctggctcataggggtgggtttatattctttctccttctcctctgctctctggtccagaatgaagccagcctggaagatccccagtctcgagacagagcctgacaggggcagatgcactggaaggaccctgtctgggtttagcaaccaagcagccatcctg

SEQ ID NO: 49923 - DNA, 956 bp, Homo sapiens
ggctgagtgacttagacagaaaagaggtttatgtggctgatggttccgcaggctgtacccaaagcatggagccagcatctgcttctggtgaggcctcaggctgcttcctcttatggagaaaggtgaaaggaggccagcgtgtgcagagctcacagggcaagaatgggagtgagggaggggggaggtggggctggagagggagcaagggagctgggaggtggtgcgggctccttttcacagtcagttctcacgggagctaagagtgagcacgcactcactcccttgcaaaaggcactgagccacccaggagggatccgcccccaccatccagacacctcccaccagactccacctccaaccctggggatcacattccaacaggagatttggaggggacaaatatccaaacggtatcaccgcctccctcctggatgaagctgtgccctaaacggtacctgaaacctgccatattcccaaacacagaaaaaaaaaatcatggttgatctagacaaagataccgcaaacgtagcgtgctgtcttcagtcagatcaatgcactccctccagctcagcaactccgatttgcgtgcacagggtgtctctcctgccgcctgcagcttagtcgtctaatcgtgtttctcacccttgtttgaatagctctattatatctgtgctttgtattgtatgtgatctcacatattttccttctaagtaggacaggtacaaatcatgcattttatttataactctgcagttaagatcagaatctgacagtgcaaaatggccgaggattatagagaaaaaacactgctggtgaaacaggctgatgtgctcaccttgctttcaccctcttctgggttttgatagtctcatcactcacacaaagacaaatgctcattatgtagttaattattcagccaggaggcatttatcgactataatctccatgtggccagc

SEQ ID NO: 49924 - DNA, 2004 bp, Homo sapiens
gccaggctacagtgcagtggcgcgaccttggctcactgcaacctccgactccctgcctcagtctcccgagtggctgggattacaggcacgtgccaccacgcccagctaatttttgtatttttagtagagatggggtttcaccatgttggccaggatggtctcgatctcctgaccttgtgatccgcccccgtcagcctcctaaagtgctgggattacaggcgtgagccaccacactcggccaatctctctttttactttttgcttcaggggagggatgggagagccagcaagcccctatggcttttgtgttttctagaaacctaaggacaattgggatggggacatagtgccttggccagaagcagagaacacgtaggggcttccctccagatttgaaaaatccccaacagcgtggctagggtgggtagcaagatcctgacagtcccgaggccctatttttctaccacaaaccttgaggaatacacaggtaagccctggacttaccaggggacaagggccccccagggctgaaggcccattatggttgctttagcttcctcttctcgcagtggatttagtgaaacagacatcttaggtgacaatgcactggggaataaagtccaccctattattccacgtgtctgagacatttcaccaacatctcgtttagttttgcaacatctctgtgtagtaaagcaagggcaagcttcactctacaggcatcaagaagtcagacgacctttagaaaaatcccctaagtcagcagcaaacctgggaataaatccagggttttctgattcaacttttgtatctgcgtgtgaatgtttgctctagaccttgctaccttagtaaaatagaacaaagtactgtgtaaacagccagcaccttgtaaattctagataatgaccctgctcagcctagaagagatggtctgttcacaagggaagtattctccttttggggttctacacccattcccaatgctggtggagaaggtgtggctggactgcttgggcacagctggccccaggcatggcaggaacgcccttggctgtgcacagcggctggggttttattgcatttgtttgggagattcttagacaaagcactgcttcttgaagttaagttccagggaaagcagcgcagtataaggaaatcgttttttttccttttggttcctcaaatggagctgcatattcaaggggtaatccagatccacagcgtctgttcacaatgggctctgaggctcgttcactggtgaaaaaacaaattgttgaggaccttctatctaacagagcccaggccctggactagcgggtgcaggtgctgcagggaacacagctgagccgctgtcttcaagaagcattccagtagcaggagtgagactcacttaagcaaacacatgcagagcccgtcagatggggatagggctatggaggtgatgtgtggaagcgtggagcagaggagttgctctagctgtggcacactggaagggcctctcagaaaagactggagagacaagaacagagccagcaactacctggcattggaagcagaacaaacaccaacagggcttcctgtgaaaacaaatgaaatgagatgtctgatgtgccggcatggcaagggtttagtgaaccacagctgccttcgcctcttcccaccctctgagcctcagtttcctaatctgtccaatggagataacagaatcataccacaaaatgctgctttgggattcaaaagaaaacaatagatgtgaaaacaacctgtaaattgtaaactccgataaagccgggcatacatagcagcgtgcacctatggtcccagctactcaggaagctgaggaaggaggattacttgacctcaaaggtttaggctgcagtgagctatgctggggccactccagcctgggtgacagagagagattctgtctctaaaaataaaaacaaagaaataaaagtgtgaagagaatagctgttactgtccaaagaggtgctggatgaatgt

SEQ ID NO: 49925 - DNA, 4022 bp, Homo sapiens
cactccagcctgggcaacagagcaagactctcagaaaaaaaaaaaaaaaagaatctgcaggaattcgaggtgaatctgagatgtgcgtttgtcttggttctggaagtcttcggtcacagcttcagctccctgtctcctgctggtgccgctgccctttggtttctctccattataatcttgcacttttcttaatagagcacttagcttgaccttcttttctggcatttttcccttttctatctcaacacaattgcctaacatattcttgggtaataatgctactgaaaaagggaagagaataatagcgacagagctttgaggattagaaacacggggctaaacctgtaagaacccgtgcccctgttacgcaaagagggaaccgagaggcagagatattagggaacgtgctctgaaaacctgggaagtataggagtgaagcccgacctctttcacttgcagcctgctgcctcaacaccaagctagggtggcacattctggcactttcatcggcaccctggggtgtacatcaaagatgagagaaattcacgcccttgggccaggatccagccttcacttgctgtcttgttattcgttcattttcttatgttccgcaaatatttattaagtgcctattctgtgccaggcattgttaggagctgggctacagagacaaaggaactcaagggcaagacagtctaggaggaaggcagacaaacagacagcagacaattacaatgccaagtggcaagtctgtggggaaagggaggacgtggtgttctacagcagaccattaccaaaccgaaagacgtcagggtgaaacttggaaatgacccaactgctaaataagagaacagctcattgtcatgaccccatagaagaatgttaatcagccatttaatttctggagacatgaaaatggtggtcccaaaatgatgctccttgaaaatggctggctgtggaacagaatctacatctgagaccccttacattttttataaaccaaaattctgctgaaggtcgttagatgtgctgaataccttctgtttgcagattcatgagctgcctcaacgggcaccttgacctctggcttctggtgggcttggaccagtggatggcacccctgggccactggaccgagggaggaggagaatagaagttgggaatgtgtcctccccgttccctccctgcggtggcctcagtgctactgggtaccctggccactgctggcaggtcctacaggctctgggagctgcttccttcacctcttcaggccgagggagccgaggtgccttgctgtcaccagctccaggactctgcaccatcctctggggctccctacactcgtaaatagtccctttattaatctctcctcaaattacgtaaattatgggtgccaactatctcctcctggacccctggtgaatagacacctggtttgtgtgggtcatttttgttgttctctcatgcgtgttgccagctttgtatagtggtcacctttgggggtacgtggccaactcatgacccctcatcttctctgagaactgtcccccaaatcgcaggggtgggcccagcacccatgtttgcaccaagtgcctgtaacggattgggctggagtggagatcaaaggtcaaccaggccagccagctgccctctcctaggtgctcggtcaagactggagaaagcccagccagtcttggtggacggacgtcctgtgaacaaagaaagaggaaaagccagtctgcagagggattaaagggacggcctcggacctttggacccttgttttgtgagaggcacatttacaagtttttttaatccaaattaagataatagcatacatattgttctgccatcagttttacaactcgctatagtgagaacagtcttccttatcatgaaataggcttttacaacatgatttttaatgactgcaagatttttgttgtatggctattatcatgatttacatctagaaccttgtccaggattaaaatcaattgtattggtctatattttgttgaaacacctgcctcttttggaactcaggaccacagttgcttgtctttagttttcctgcacttttgctgttttccagcgttctctattttattttatttatttatttttttgagacagagtctcactctgttgcccaggctggtagtgcagtggcacaatcttggctcaacacaacctccgcctccagggttcaagcagttctcaggcctcagcctcccaagtagcaggactacaaggtgtgcgccaccatgctcagctgatttttgtattttcagtagagacaggtttcaccgtgttggccaggctagtctcaaattcctgacttcaagtgatccacctgcctcagcctcccaaagtgctggaattacaggcatgagccaccacatccggcctcctgcattctttaaagcgcctcatacatccatcagtgtcttctgtacatcgtacttccttcatgctctgaaatcgaattcgttcaaatcagatggtcacatgacctcctcaataaaaattaacatggattgagtgtagctctgttctaggtctgagctatctcattaattgtcacaacgtcatctcgtttgcccttcagatggcctgtgggcttgtttttattttctccgcttagtgccggacaccatcttggaggacgagtgtgggtttcctgcgttaaagcagccggccgggcagagctgagcaaaccccaggacttccgactcagaatctacacagaacacagcctccctcggactgatgtttgctctgcccttcacagtttgaagataatgatcctggatagaatagaagccaaataagagttcagcagctctgtgttttcatctgtttaatgtcaccatctgtcccaagcggggagcctcttctttcttgttcctgtttttctgagcatgactaaaatctattttaaaagttgactcagcatgacttgcaagccttcgttcaggatggttcttagcttttgtgacacggtttagcctctgcccctcttttctgtatgtcctgggttatgatcagtttagcagcagggaagaatctgggtttgaagtttggctgacctgaatttgaattgtgaatcttggcaatagaccagtcagcagctatgtgaactcaagtgactccatcttcctgagcctctgcctccttgagtgacaaccaccacccctgccgtgctccatgtccctgtgcggctcctcccactctgcatccgggctggccctgtgcctcgctttgccaacagaaagcgccagaatgatgctgtgccactcccagtctaggccacgagaaaacctggtggcttctacttttgtactttgggaagctctgcaccattgaggaagaagtctgtctgccctgcttctccacctccaggtgaaaacgctacatggagaggtgtgtagaagagggagaggcccagccatccccaaatcccagcacaacctgaccttccacctgtccctgccagggccccagacccgagtgagcagtgcaggccagtccccaggtggccgcagcctcagtggacaccacgtgggacagaagactgtcccactgaatctagtcaaccctcagaatcctggggcgaactgaatggctctctttaaccactgagatttgggatggtttgtacacagcaacaggtacccaaacattgttaaatgggaggaaaaaccaaggcttatagcgtttagcaaggtgcctggcacacgacaagacgggagctactcttatttgactttgtcaaaactgtgctgggttgaatgctcctttgagactaattccttgaacacacactttgttttttgggtttttttgttttgttttggtttggtttggttttttgtttgagatggaggctcactctctcgcccaggctggaatgcagtggcacgatcttgactcactgcaacttccacctcccaggttcaagcaattcttctgcctcagcctcccaagtagctgggattacaggcacctgccacaatacc

SEQ ID NO: 49926 - DNA, 1748 bp, Homo sapiens
aagaagattagtattaagatattcttcaatataacttggcattattggccaaagatgaatgcccacaccatttttcttaaaaattgccaattccccttttatggtatttgtatacattgcactattatcaccaaggtatgagtgtttttttcaccacttctctctttacaccttaatctacattttcttctatcacaagtggcgtttaacttcttttaatatgtttaagggcatttgtctttttttttttttttcacttatggggtctcgctgtattgcccaggctggagggcagtggctattcacaggcgcgatcccgctaccgatcagcacaggagttttgccctgcccggtttccgagctgggccagttccccactccttggggaacctggtggtccctgctcccgggaggtcaccacaccgatgcggaacacagatgcgtgtcgccgcgcaatgggcacagcgcatacagcgcagagctcccgggctcaagcgctgctcccgcctcagcctccggagtagccggggccacaggcagggcatttgtcattaatggggtcttttgagaccgcgggtgacagacaacaggagccaggccacgcgcggcgcctctgcgcgaacgctagggaggactcagcgcgcggcggccggtgacgtcagggcagcgagaggtttcgtcaccgcggcgcgggggcggggccgcctgtcacgcggcgccggcggacgcgcggcgctgggcggaggcagcggctcggggactgggcgagggccctgggcctgaggaggcgcggccgccactgcgcccagcgcctgcgcgacgcctggctgctgggccccggggcagttcagcccgcgccgctcctgcgggtcggactggggctgtggcgggagagaagatgccgcagcccgagtcccagaaggcggcgatcctgggctgcgggcaaggcggtgagtaccctctaggcggcggcctcccggcgtccctcagcacctcgagagctgcggcggcggcggcgcgcggggcctgggcaggctgggggcggcggcggggcagcgcctggctccccgcgggtcctgggctcccgcacgccccctgggcgaggctcgtgtctccgggagacgccgctgcccccgcgcctcccccagcgtctcctgaggcttgttcgcgggcgtgggggcgaggaccagggcgctggcctcgttttcgcgtatttaggacggaggcacacctgatcctgcagcctcccccagcatttcctaaaatgaagtccagatcagtattgtccactttttaaaattaaaagtgcccagaaatagaatagttcacacatacacaaaactagggagaatagtgtggaaggaaatttaatctcgggaccccaaatcactaagccaaagtcaagctgggagctgcgtcaggcaaacctgcccctaagttttgttcctaagacagctgcaaagataaaaagccacacagctccctcaccctttggccaggaggaaattcgctgtggacctccacatctttaccctgaaacagttgtgtggaattgcaccctggcagtgtaaattgacagcttgtcttcgcaggtgaggaacagggacagaactcaagtcatccttctgctcacctgagacagatgcatgtctgacggcttcctctgccctgtatttatgtaaaaatgcagattcactgagccagactaaggcacaagtggctattcctctgcctgccccatggcgtaa

SEQ ID NO: 49927 - DNA, 516 bp, Homo sapiens
ctgagcttggcatgttcatgttactcaatccctgagcctattcatgctattggaaaggatgctgtgtttgttagggttctccagagaaacagaacccataggatgtgtgtatacacacacacaaatgcacacgcacagatttattttaaggaactgacttaaacgattgttaggagtgtgtggagactagcaaatctgaaatctgtggagcaggccagagacacagggaggagttgctgttgcaatttgagtccaaaggcagcgcgggggcagaattccattggtatgtgttcagatttcctcctcttataaagacaccagtcctatttgactagggctcagcctaatggcttcattttaatttaactattctttaaagactctatctgtaaatacagttacactctgaggtactgggggttaggacttcaacatgaatttttaggaaaacacaattcatcccataaaagatgccaaataatctcctgtgggatggagtgggaggaagcaaaccag

SEQ ID NO: 49928 - DNA, 769 bp, Homo sapiens
atttaggccttaaaaacaaaaatgaaccaatgaaactgtcttggaccctctagaccagcccaggtgtcacctgaatagcaataaatgactctggtggatgccagcagagcagaactgcccagccaagcctgacctaaattcctaacccacaagatcatgaaatatgtttgctttttaagccactgtgttctgaaatgatttgttacgtggcaataagaagctgaatttttcattttaaacttcagtttgaaaattatgtatggcttatcaaagacatataggtgtctttgcttcaccatctcttcaactaaaccatcgaagcagtcagtatttcaaacactgacagtaactacaaaagaaaaaagctcagagggttttgctccagtccagaagtgacccatatgatttccacccacaattcactggacacagtcacatgggcctgtcaagcaggcttggagctgtgtaattccaccacatatccagaagggagagtgccagaactatttgacagacaacaccaatatctaccaccacagtatataattttaaataatatactaaagttagggaaaattttatccaaagaaaaacctgatacttcaaaaagagaagtgtcaattacaaactttcatatcaaaaaaagataagaaaggacaggtaaagttaaattgttaggccaattaatgtaataagaatccaggctttttctttgtgccaaatgtcaccataatctgttgtgaattagcagctagactcaaaatgtaca

SEQ ID NO: 49929 - DNA, 399 bp, Homo sapiens
gcccggcgcggggagggccggccgcggggcccggcgggggcggcgagggggtcgcgcccccggccggccgcccctcccccgcgcgtcaggcccgtcaggcccgggcggcggcggcggcgaagttttgacagctgctccagtggcggcgctgggcgccgggccgcggctcgctcctcacactcgctctctcacacacgctcgctcgctctcccggagcaggggaggaggaagttttgcgggtgtgcttggaccccacacacacgccgcgcgaccgtggccgtcgcgcgaggcccgcgccggggatcccccggggcgacccgcaccacagacctctccaactcgcagccgtcgcgcccacacaccgccgcctcgacggcccccgcccgctcccccacactc

SEQ ID NO: 49930 - DNA, 439 bp, Homo sapiens
gccgctgacctcaccgcccctccccctcccccccgggttccctccccctgtgacgcggcggccgggcccagccgcgactccggctccggctccggctccggctcgggaggtagccaagctgtggacccagagatccgggatcgggatcggggaactgcgggcgagggcgggagggagccgcggacacacgccgaggcggccgcggtcgcccggcgcagcccggcgcgaggagcaaatgtgcgcccgcacggcgagggcagcccgggcttcgctggttctcgccgaggtctttcctcgtagcgcccacactacggggaggaaaaggaatggagtcaacttcgttcgaatccaacgccagttagtttccttattataacgtcattttttttaatccagaaaaggttcataaggatgtaagacgaaaagaacgatgacagct

SEQ ID NO: 49931 - DNA, 2278 bp, Homo sapiens
tgagatcgcgccactgcactctagcctgggcgacagagcgagactccatctcaaagcaaacaaacaaataaaaacaaagtaaaagtaaattccccaggcaaagctgattatattgctgggataatcgactttgtcactgcagtctcacttggtactttaagaaactccatcttgatcctaggtctgggtcgatctgggcgttcctgctaattttctgttttaaaaacctaaagcaataaaaatgttgatattgacatttatcatttttatcctcgccctctgccttgttttgctgggagatctgttccacttggctgagtttagggagggcggggaagcgggggagaaaccgaggcgcagggtggagaaagggagaagccttgcagactgaacacatgagaaaacctggagaagggattcgctgctgcttatttcagggaagaaaaccgagaagtgaagcacagaggggtcaggttccgggagcggcgggaaggttgtagggggccccagggcaggtcctggagctcaggcagccggcaccgggagcccagctcaggctgcggggtgcaaccgggcaagagcgctcgggctgccgaaacgggaggagatcagaaaaaggagagacatggaaaaaaggagaggaagaggagcaacactcaagagggaaggaagaaggcagacactgaggaacgcccgcaggaacccgcagacaagcagagagccgggctgcgctgggagcggggcccgcggaaggggcggggcgccaggcggctcgaggccaatgggagggcgggccggggcgagggcggggcactaggcgaaacgacgccaatgggagggcgggccggggcgagggcggggaattaggcggtgcgaggccaatgggagggcgggccgggtcctctgggctgaggcggggtgccaggcggcacgaagccagtgggagggtgagttaggggcaggggcggggtcccaagccaatggaagggtgataccgagagggcggggcgccaggcggcgagagagccaatgggaggccgagccgaggaccgcgggcggtgggcctccccccgagaggagggagacccggaaggcggtgggggcggggagtggagctgacaacctgtcaaatccactttgggacgaactaggtcacgcgctccgcgggtcgggcacccccgcccgccaggcacggccgcggctccttcctcttcctgcccgcggtagtgggggtggggcaggcctcgggacacctgcctccgccgccggccgccggccgccgtcctcgcgcggcttcccgggcggctctgccccgaccgtagactcccggcccgctcgccgcggcaggagccgtggttccgcggacctgggcgcgctctctccctggccactgggagaccccccgcggcctcgcggggaaaacctcgggactgccccgcgcccccggccgtctctgcgtcgctccttctcgcccgcgaccgtggactcgtcctcgcgagcctgggttggcggaagctgcgggggccggggtcgcactacttggcgcggaagggccggcggtgggcggagggatccccgtccgcggggtgagccgctgggcggagccgggaggagccgcgaggatccgcagtggggagccgggaggaacctggcgccggcacccacccgccgcgcccacgcgtgccgcggtcgcttgtttcccgcgggagcccggccgcgctcggggggaggcgcgcgcgcagctggggctgcctgggtctaggagctccggagccaccgttttgtgcccgtggagccgcggggaaggcgcacgcgctcgggtcttcccggcgggtcgtcctgcactttctccctctccggtacggaccgcggcgttctgtttccaggcaaaggaaaataagtcaaagactcagaaggcagcctgaatccagggcctgggatgcagggtttgctggaacgccagccggtgcgatcgcgcccctgggattccgcttagcccgcgcgtccatttccctgcatggtggactcagtaaagccggatctgtccaacgcctgcagcgtggatgtggaggcggactaatcaactagtgctctgttattatttctacccatcccttttctccatgctaatttgcttagaactttaacattgaatggacagcaaatgtcatgttctgtttaattatcactccttgaccattatgttaatttctttccctaacaaggtgacgcattgttttaagtaacaatgaccaactcatctactcttcttccaaat

SEQ ID NO: 49932 - DNA, 490 bp, Homo sapiens
tattaagcaagagagtgatgtgctgaatgaaagagttaacgtgcctacaaaagcatttctcacagagaggaactcatctgccagggtctggcccagatcctagaattgggctgcttgttttgtgggggaggggggaggggatcgcagcagctgtctgggtttcccgtcatttctcctctcacttccgaggtcagggagataggaggagacatgaacaggtggctcctgacgaggctggctgggatcagccctgatacaaagacaccaaggatttggaaatgaaaatgcaagtgggggagattggcaggctgccctcggaaggagctggtcctagttttgctcctttgaggagttttgcacctgattaatgattctgttcaagatggattaagctgctggaacctttctccatttagcagtgccagctctctcctcctcttaacgctttttttttttctcgtcccagtctcccccacccccagtttgttct

SEQ ID NO: 49933 - DNA, 745 bp, Homo sapiens
aaggctcggcgcaggagagactcaactttcccgccaccaacgccattcaccaactgcgcagactctacggccagtcaaacccgcccacccgcgcgcgtgcgcactgcgccaggccgcggccggggaggcgggagcatgcgcaatagggtgtgcgggcctccccgccccgcccccagttcctgtgacgtcagacttccgcgtcccccgcggcgctctcccgcgtccccttggagatcgctccggggtggcggggacagctggtgcttttcttgtctgttgtaaactttggttcgttattattatattaggtaaagctggtcttatgtattaatttgtttaaccattaaaaataattgtattgcacaagcaggcccctttgtccgttctcgggttaaaagcctctggctgtgtgtgcgattcatggttaattctggaaaaaaagagaaaagtatactgtatttaaaagaatttttaaaatataccgagcctgtggatttatcaagttgctttttgaggtaggcaggaggatcactggaagtcgggagttcgagaccagcctggccaaaatggtgaaaccccgtctacagtaaaaatacaaaaattagccaggtgtggtggcgcatgcctgtaatcccagctactcagggaggctgaggcaggagaatcgcttgaaccagggaggcagaggttgcagtgagccgagatcgcgccatcacacctgagcggcagagcgagactctgtctc

SEQ ID NO: 49934 - DNA, 3074 bp, Homo sapiens
tcattcaacaaacatttgggcacttccacaggtacaccaaatactgtgctaagcacctgctgctcatcaatagtgattaagacagactcaagccctatcctagaagatttgatagtccagtaggggaggcagacaacaaatacataaatataaaaatataaacactttgctttaagggttaggaatgaaaccaacagattgttgagacagaggatacagtaccggtaggggacatagtcagggtgatcaggaacaacttccctcgcaaggtgacattcgagcgaagacttacaggaggagaaaggcgccaggcctcggaaatggggtcacgttcatgtaagtcagttaaaaataaaccccaatctctccagcagcaaggttggacgtatggggccaagaagcctcgctgccagcactaaagatggcgcgccggagtgggggtgggggtgttgggggaggcggggcgtgcgcgcgttctgattggccgaccggggagtgacgtcacgtgtcggccgccgagcatccgggctcccggcagcggcgctgcggcggctcgcgggagacgctgcgcgcggggctagcgggcggcggagcggacggcgacggggcgctctcgggctgccggcggggccgagcgccgcgcgtcccgagcatggcaggctccctgcctccctgcgtggtggactgtggcaccgggtaagagcagctcggcgcccacccccgctcctccgcggccccgctcccggcccctggcgtccacctcgcctggaggtcgagctgcgtccgtcgccccgggcttgagccccgcgatcacctgggcaggtggggcgccggccgccgcttccctccaagccttgccttgacgtcgtaaaaccccctcttccctgccgggaagggccacaagaggaaaagcacggagggtagggacgcggtgcccactctgagcgagcccggcgctcctcgcctcccccgcccacgtggccgggcccctggacccgcagcccggctccggccgtcgccggggtggacaccctgagggacaccgggagcgcgggatctcccctcctaggaatattcgccagcgtgaggcacagatcatcactgcagatcctttaacgtcactcatctcctagtgaacggtgtccctgccttccagcgttctcagcactggccctcgttctgtccccgcgtgtgcgtgtcattcctcctggctgaggattctttaccacctacttgtggagagaatagcatcgatctcccaacttgataccatttttactgccctccctgcgcttttccagtatgaaatggcacactcaggccaagctgtccctttggtttgcatagatttgccttttcgctgaaaaatgatgtgtttaaaaagactccattttgaaaaataccctaaatttgggagagcatgtttgtggaattgtggtagaggtttttgtttttaactttttgagtgtgaccacttctttcgttgccgttaagctattaaaaagagatcttaggaaatgccctgaagtatcggtgacccaagttagctggttgtagtaaggtgattgctgaatccatgtagctggtagtttgggaatacaagcttgcctgcctgcgttatgggtgtagtgcttagtaaaatagcctggaagtaaatttggtctcttagcgatttttttcaagaagggattttaatcatttttgccacaaaatgtaacatggcatgttcaccttacccttgattcttttctatagaaaaatgcacttggtttggtttccttgacaaccttgtgggggtgccttctttagtttgctacagtccatctcctactgttagttccttccttttgctgctgaagcgaccagaagtggttgtggactggaaaaatcctctttgcttgtgtgaattctttttgaaatacacgtcatatcaagctttgtagctctttattttagaacttgcttttctacctaaaacacaagccaaaatcagcgttgtcgatactacagctcccctccctcaattattgacacccttaactcatgccctcccccaatgggttcacctcaggtcccctcaggtctggttgtgtcaagagtgaaaccagtgggtgaaagtatttttcatttccacatttgcatgtgagatttttgctttgtagttttagtcttgcagaactattaaaatataaaggaattcttggtagtagcaataaaataatgctcacagagttgtcatacctttaagattagtaagtcgtggaccttactcatctttcttgctataaatacctaaaatgtcgtgctcagttttgaccttttgaggtaagtgattaatgtaacttggctaacttggagattcaacttctatagatcattgttttgtggcccaaagtcatgcttcagaagttggtgtcaagacttagaaacggtggcagggaatctccatatgaattccccatatcgagtgtatggccagaaggagcctgaaagagcccgaatttaccaacttgagcacatcagtagttcttacatttcccagagagccaaaatgatttttggatttagttttgcctcaaaataggacaaaaagtggtaaaattcagataaaaataaccaagccaaaggaaaagaacggacctaggaagtcaccctgagctttagcccagtggctgctgaagttggtccgcacattcgaccttagtcttcctgtctgacaacatcataagagtcatggttatgtaattcctgtcatcagaaatcaagagaaatacctgtttcttgggtgaaaaaagcctttttttgtagtactaaattgtaaaagcattgagctatacatagtgggcactaatgatttattggacagtgtgataaacagtattttttacaaataaatttcatcccagtatccttgaatcctcctcaggtaaaccccgagactacctgagtaagcagtgatgtgctggaggccaggataatatggacaaagggatctgctgagtccaaaaataaagcttcatctatttaaagggatgactaggctgcatagttttcagagaatatttcacaactcc

SEQ ID NO: 49935 - DNA, 1100 bp, Homo sapiens
ctttccagtaatggcaaataggcattttcagacaaccaaagatgcgaggtggacaccaaggacaacttccttttgcctttttgtggaatacaaagggtgcatttctccctgatttattacttttctctgggcagaaaatgtccaccttggagaaatccagttacagctttctttgtctctaatctgtactgttagagcgaactaaatgtgtcctgaaaaggactctgtgctgctgtatttgagtccttgtggacaaactgcaacctaacttaataggtagacaagattgaaaccctaacttaggagtgtgtgcctgtcacaatcaccgagtcttgctcaatcggagcagccacacttcaaccagtcattccctgccgagtgctcggactgtgtccaaataagccaaatgccgagctgtaaccagtccagctgcttctgtccctcacctccgatttctgtaggtcactttacttttttggtctgtaagtttgttctgaccacgaggcacccctggagtctctctgaatctgctgtgattctgggggctgcccgattcatgaattattcattgctcaattaaactcctttaaatttaatttggctgaagtttttcttttaacagtacccacaagaaagaacaagtaagcaggattcctgccagtgggagcaaagctcagggacgtgtgggtgctttgtgtacttcctgagcgcagtgtagggcctgtcccgggagaatgctggtacctgggctgggccttgcttcagagccagggtcagatggtgaggcccacttgctcctgaagatgagaaaaggatgacaaagaagcaccatgcgcttcagtcccctttaggagcttccccaagtagcaaccattacatgatttattagtccttcagatattagtagaggacctgttatctgcctgcactggactttgctgtggctgccatatcaaagcaccacaatctggatgctttaatttaacaacagagatttcttgccttgcagctcctgatgctcaagaccaggctgtgggcagggctggttccttctgaggcctctctccttggcttgtagatgccgtcatcgtctctacctg

SEQ ID NO: 49936 - DNA, 686 bp, Homo sapiens
gttctttgtattccactagtgtaaagaagtattctatattaaaatatcagtgaagatggcctggttgtcatatggcttcacaaacagaatataattccgatcttagacatggagactgctacccttggaacttagtgaaaagggcaggggattccctatgtacgaacagagagaccacagcctgaattagaaaaaccaggactccaagaatggtcttgagagacctttccttagcctgatttaaatttgccaccttgatatgtcatagccaattataagcttgggaggtcattcattcattaaccattaatctgttcgtcaaacatttttatacaacgctgagtccaaggttcagaacaggtggaggggatgagacatggcttcgtggcccaaggatttcagaatgtgtttgtctttctgtctgtgtgagatggggttggaacacggtcagagcagctatggctttaaaattgcaactcagtgtgacacttgctattattggtacttatggcactttcttcaatcacaaattagaaagcacacgggagaaatacctgcagcaacgtggtaagaaacaattagcttctaaataacataaaaaacagcaatgccattaaagtggacgaaggatgagagagggcagtttgtagtcaggaaaacctatgagaaatgcaaatgtcaagggg

SEQ ID NO: 49937 - DNA, 731 bp, Homo sapiens
tctctgtccgccaactcacgtttcttgaacagtctttggaaaacatttctgggcagtggaaggggtgtatctcttcccaattattcaagaaccagctctgtgaccctggacaggtcgctggaacctcttgggcttcagccaatgggaaatgagatggttggccagagggtccccaagaccccaaacctgtgaaacccagaccaggcgatgtggccacaggttcccaagcagcggaaactcttagatcggcctccgcgtctgagaacagagcgcagcggaactgccgcgtggccagcacctgggcctcccccggagctgctcaggagtgcagagttcaggccttgccccctgctgaacttgaactggactggccctgggaggccactcctcaggccttcaacctgtcatctgagagccgccagcagatggcagcaaaggcccagctctggcaggtctctgaggcctcccggctgggccgggccctggtacctggaggaagattgcacgctctgggactgcgagttgcaaaggtaccatgaggagccccgggaggtgaaaacacttcccgggctaacgtggcgccgagagggactgcggacccactcttggcttcctctttagaggagagatggagcggggtccgaagcgcacaggcttcgaaggaactagtgagccagccgagggcagcgggagccgcagaaatcagctcggagagagtcgcgtgcaggctg

SEQ ID NO: 49938 - DNA, 2003 bp, Homo sapiens
ttttattttcttcctctaagggaagaattctgtcaaaacctcttttggatgcttctgggtgccattggaagtaactctcttaattattttatttgattccatagctggctttttaaaattgtgcatataaataaactaatctagctatttcaaagataattctctttgatcattgtaatttaggatcttcttaggtcaaataagaccatttctccaactatcgacaggaggtggcgccataagtcttgtacataaaccccgctggagtttccaaaggtgcattgcttaatgagggcttggttatagatggataattgctcataatttggattctcttttaaaatgcccaaaggctaaaagggaaaagtgtttggggtccagtgtgctgcttagtagggattattcctggaggtatcacctacaagtagcttcttccctcttacctacctcagagaaacccagacatttctgggagttcaaggcactgggtgacgaaccccttgtgtgttgtgtgccccgggggttaagcagctctccctgtgagttcttctctggggtttgttgtgagcttccacacccttgtgttacctccattgcctaaggtgcctttcagctgggagaaagagtcctttttgtcttcagcttatcacgtcctcattccaaccttttacaaattttgggtgactcaggaagaaactttaaatctcaatgttaaccaagatccaaagcctggctggtttaaagccacaaatttggcttaagccacaaacattcactttctccttttacaaagaaaactgctttctctttaaccaaatgtcaaatgagagaaaaggttacaaacttgagcaagtaaaaaaatgtccaatgagagaaaaggttacaaacttgagcaagtaaaatgtccaatgagagaaaaggttacaaaagagcaagtaagacgaacgaaaacttaacctaatagaaaagtgaaaccacaaacctgccaatagcagaatctttagagaaatgacgcgaaactcctgccttaaagccctaaatggcggcttcaatatcagtcccactgagcatgaaattcatttacttaaataaaatctgaatctcagcccaaacctgggagattcaaaacctgagagcggtcttaccaaagacgcccgtatgtctggtgaagtcagttggatgcaagcagtttgtgctggtaccagggccccagctactgatgaagtggcaggagtccacagaagcctacttcgaagttcccggggcttccaggggaggtgagaacacaagtgatgggagagcctggggagggactgtctggtgagtaaaggttgtgctgctctgtggatgaaatgtctctgaggtcgtaaacatctcagagccgccttcgggagaacgggtgatagtcatctgggctgatgtcacctccagtgtcctctcctgtgatctgtgttaatcctcccagattgacgagattcctggggaggcgattcatgacagctgagttccttttggaggatccgtcttcaggcaggtaaggggagctcagaggaaacctctgcctgcatccgctgattcccaagtgccctcagctcacagggatcagcactcccaagtgccatgggggtggcatttcctgaactccttcaaagcaataacaacaggctgggcgtggtggcttacgcctgtaatcccagcactttaggaggctgaagtgtgaggattgcttgaagccaggagttcaagaccagcctgggcaacatagggaaaccctgtctctacaaagaattaaaagaaaacttagccaggaatggcagtgcacacatgtggccccgcctactcgggagactgaggtgggaggagtgcttgagccaggtggttgaggctgcagggagctgtgattgcaccactgcactccagcctgggcaacagagtgagactctatctcaaaacaaacaaacaacaacaacaaaagtgaaacaataacaacaacttttacaaaa

SEQ ID NO: 49939 - DNA, 1008 bp, Homo sapiens
taattcgttatcatgttgacaagttactaaaataatttttaatttatgaagacaaatacatccctactgcatcttaataatacagtaatagccaaggtaaggttattaatttgacataccatcaacaactctgcagacacttttaagggaactctccaagcatctaaagagagaaacacattattttttatgatagatacgttgtttaaataaaaaggcctttttataaaagtcttccctgataatcctcaccagacaggtggtttagctgacaacacttaataaggataaatgtaagtactataatgaagttttaaagaaagctttccaggcaaggtgagggcatgctgctgctttcgtttcacatgctgtctggatgaagtagcactaagaccatcggcagcaaacaacaaagcaaacgttgtgtcgaaacccatggcattcaccctcccaccgtgggttgtctgggtacacatttctaggcctgtgtccaagtctgggtttcacatagtctggcttctagcaggcacaaaccttcttgccttatcacaggagccatgatggcatccaagatgtaacagcaagtcagtcaaagctcaatagtgacaaagaggacagacgtcaattctaggaaagcagggaatgttctgtagggtagggagcaatttggacaaaagattaactggcctgagaggcaagactatcaaaaagctttcaagcgctccttccatctctaagagttcatcaaaagcaaacaaaaatactaaaccatggcacatgcctgtagtcccagctacttgggagggtgaggtagggaaatcacccgagcccaggagatcgagctgcagtgagtcatgatcacaccactgcattccaacctgggtgacaaagcgagaccctgtctcaaaacaaaaacaaaaacaaaaacaaaaaccaaccaacaaaaatcctgggcagagtggggagaaagaagaaagagtatagaaaagaaattggaaatgagtcaaa

SEQ ID NO: 49940 - DNA, 3124 bp, Homo sapiens
aaagggtccaaaaagttgttacaaggacgaacctcaagaaggccaagatcactcagccttctacaattccttctacaccatccaagttcatctgcgaaatatgagtctccgcccttccaggcctaactctgatcactggggatccccatcctccaaggtgggggccactgatgtcacacccaaggcaacacaactgtacagctaaacttttaagaaggaaatattttgaagattaacctgaagaggatattcaactaagatgcattcctaccacggactgataactgtgtgacatcaaacagatatattattataggaatactaaggaaaacccacaatatcctttggcgtgagcccaaactacacaaaattaaatgtgtaatgtgatggtgttaccagggtaccgtaaaattaatcgtccaagtgggaaaatcaaggaagacgaatgccagcccccacgtgcagggacacaggctggaagggagcgctcctcagccccgcacaggacggcagctgcccgggtggcggaggcggccaagccggtgcacggccacgacccccgccggccgagcgaggctggggtccccgcgcgagctgccccggctggggatcccggcgcccctcgtccgccctcggagctgctctcccgggagccgagacgcccggcgcggggaatggggagacgcgaccccgcgcccgtcccgctcagcaaaggagcagagaacgaggcggcccggtgggtcgggggcggcgaccccagggccgcaggccgggggctcagggcgcgcactaggggccgaggtacagagccccagccgccttccctcccgcactcccccgggcccgggcctcccgcgcccaccccgcggtcgcccctgccctcagcgcagtcaggccagcggcctcggcggacccgacgctctgcgcccggcgcgcgcccgcggcaggagcggggacggggacggggacggggacggacggggacgcggacgggggaggaggccgcggcaggggcgggcgcggtacctgcgggtcgatgtcgcccaccgcgtaatacttgacctccctgaacatctcctcaggaactttgggcgcctggtccgacatgatcgcggcggcccgggaggctccgcggcggcgcccggccccgcccaccccccgcccccggcccccgcggcgcccggcgcccccactcgccccgccaacggccctgcccgcgcagcccgggcccggtcctgcgaatcggggtccgctcccccgccctccgcgcccccgcccgcgcccgcgccgagcgcccgaagcgcgggagccgcgcgcgccctgcgggacgcaccatcccgccccggccaccgagggggagcgccgaggagccgcccggcctccagtgacgccccgcgcctctgccgccagccacggctccggggtagctggcgccggcagcccgctctggcccttgcggttccgtggccgccgctctgcaacgagggggccccgaggacgaggggaaaccagctcccccctcggcggggccggagtgagccggtcccggggaggaggggagctggcaggcccctcccgtcgccacatgcggctgctcgggggcggcgcatgcgcgcggcggaggggggggtggggccttggggccgcgagtgggagcgggagcggttctgcggcctcctcgggcttcttggccctgggcggagtgggattgggtgtcccggctgttcgcagtggccgcgagtgcggccggacctggagtagtacctgagccgctctggccgagcaaggcgcggggccccggtctacaccgcgctggacccggctatgccgtgacggaattcccgaggccgtagcgccacgcgagacgcgcactggtggcctccgcggcgagtcctggggtctccgcaaggcctcagtgcccgagctggggacgtgctggggggaggcccggccccgtcgctgcccgaggccccgctgtcccggccggaccggcctggtccctggcgtcctgtcgggtccgcgctggaggagagtcccagacagcagagcccgcggtgcagctccagccccgggaagccccgcgctcaacaggttaatactacacagcggcgattctaatggtcacgcttttatttacagctcgcctcccttccgccaagattcacagaacacggcagagtggcctcgggatcacctgcccaagacacctgcacgaccggaagttgggagaagaaattaaggccatgatgatgaacgcagcctttctcgtttatttccaatcccacaacaaaccggagtccaggaactcatgggtgattatcggactattacctagtcgtaaaactgtggagcattggtgtctaaaggaatctgagacagacccgcagtgtctcccccacatgccttaagtcacttctgccaagcagaaaatcatttttaagtaaatgttagtgaaattggttttaaaaaagagaaggggccgggcgcggtggctcacgcctgtaatcctatcctttaggaggccgaggtgggcggattgcctgagttcaggagttcgagaccagcctgggcgacacggtgaaaccccgtccctactaaaatacaaaaaattagccgggcgtggcggcacgcgcctgtagtcccagctactcaggaggctgaggcaggagaatggcttgaactcgggtgggggaggttgcaatgagccgagatcgcgccgctgcactccagcctgggcgacagagcgagactctgtctctgaaaaaaaacaaaacaaaacgagaaggctttcaaaattactctgcggtacactaatttaacagattagatcactttccaggctttaagttggcctttgttctaccctttttttagtgtatgataaaagttgtgttggttcgttgatcagcatgcaatgaactctggctcttgttaatcaggtgactacagttttgtccttacatttgtatgtatgtcatgagtggttttgtatgggcaggaggtaaacaacgcacatttaaatatacttaatgatttatcattccaatgttttctggttgttttagtctttcatttgtctcttgaacaatctgaaacatccctattctaaggctaaaaaatttcc

SEQ ID NO: 49941 - DNA, 502 bp, Homo sapiens
ctatcttagacccctaattcagaactcttgcaggaagagtaaatacttatggaaagctgagaaagcagtgtctagggcctccagtccacccctagagggacgtgtgggggtggctaggggaacgttttgaggaaagttcattggtcaacttgttcaacgtggcaaactcatttcaggcaagagaggcagcaccgtggacagcgccaaccctcctgctcccgggcggggcgaggtggcagcaccgcggacagcaccacatgtggtggcgcacactgggagccgccaggcgcggggagcgcagcagcaccgcggacagccccaaagccgcgcgctctgagccaggaggcggggagagatggccttatcagctgatggcttacgtagggctagatctccacttggataaggcaggtctcggtgggcgcgccagcattcgctctccggagctgcagcctccgaaggggtggcgggggcaacagggacagaaggcaggtcccagaaa

SEQ ID NO: 49942 - DNA, 540 bp, Homo sapiens
taaaagtaattttaattttcttttcttctttcctgtattttccatggtaagcatacattgatgttaattttttgattgaaaattctactggctccacggcctgtcttgtgtaatcacagctgagctcactcatcttctgggctttggcaccgtagggaggaaggcagcctttccccagtgtgcccttgggcaatccagatccaccccgagcctgggccctgctgggtactgcccaggcgatgccaggagagggctgagtggtggccgcagctgagtgcagacacatgtggtgcagagcacagcatgatgcagtgtgggacggtgggctttgcaaaccccaggaagggacagcggccaggtgctccgctccaagcccagtcccccaggcctcagtgagcacccccggctgtgacttgggccagccctccattcactcagccactgtctctctgaacatgccctgccctcctgccgggctggctgggctctaggagggggtgtcctgtgcaggaggcacatgtgagctcaagggcacaccaa

SEQ ID NO: 49943 - DNA, 561 bp, Homo sapiens
cccccggggggaagacagacaccaaatggggaacacaataaataagtaaattgtatagtatgtgagaagattgtaagtgctttgacggaaaggaaggaagggagggagggagggagggagggagggagggagggaaaaaaataagagaaagaaagaaaatgtcccctttccaaaaacaagaacgctggcttccaacagcactggtggaatcttgtatttgctcaaccctacaagacagaaaatcattacagaattgctaccttgcaccacagtgaaagcaaacccacaagtcaagttcaatatttgtttgcaggtattttgtctgcaggacaagggttataggtcaaggttccgtgttcaatgttacttgggttagtttctgttgtggtggtggggttggtttgttggtttggtttcttgccttgttttgatttggtttggttttggcgtggtcatgttactatctgaaatacagttagctcatatttcccacatgctgtgataaatgttgttaataagtcagcctctgtggaccagctggattgtgtgttctccctgcta

SEQ ID NO: 49944 - DNA, 3474 bp, Homo sapiens
aaacaaacaaacgaaaagctttctttaagtagctttgaactttgcactagacagatccaaattcattggcttctgcactaaagctgtctccaagacatccctgttaggttcgtaactaaatcgcccactaatatttatgctctgtcttaaacaaaggaaataggagctgttgtcaaggacacggtggggcaggcaaggcgagccggtttctggtgcagacacagcccagagacaagcttcaaaaggacagctctgcctgggccctcagagacgcgcagctgcgtcagcgtggactctgggtggtgccggattgtggataatttgagggaatgcacagcacattaaggaggctgggaatgccgagggtctggtgggccagggtctctgagcccgacgtcctctcagccaccgttcagcctgacccaggacaggcctccaccctcccatgcgctcgacttctcactcagcagagacacgcagcttcagccagtgcagcagcaccacgcagcttcagccagtgggcagcacgtgggcagcaggaccacgtgcccaccagatgcctagtgtggtacgtcttggtcataaattagatccttaaacaaaaatgtaagtatacaaaaccacggcctcaccccaaaacgcccagaaggcaaacacactctcagccgaatggccttctgaccgagagcccttttgcggctgttaccccatttgatgtttagaacaatcccaagaggcagctgtggcatgggcatcagtcagggctccactggagggcactgaaccacaaggaaccagggccagggcctcaaccatccagcaaggtggccttgggggaacacacgaggatgacagccgggagacttcagtccaagtctctgctctgtcccttcatccccagacctggcttttcttatctgtaaaatacatggagggcctgcggtggtgtagacacagcatgagaacactgcttctcaagttttattgcatgttttttaaaaggcaatatcccagaccctatgtccagcgttttgttttgttttgttttgctttttgacagagtctcactctgtcgcccaggctggagtgcagtggcctgatctcggctcactgcaagctccacctcccaggttcacaccattctcctgcctcagcctcccgagtagttgggactacaggcgcccgccaccaagcccggctattttttttggattttttagtggagacggggtttcaccgtgttagccaggatggtctcgatctcctgacctcgtgatccacccgcctcggcctccccaagtgctgggattacaggcgtgagccaccgcgcccagccatccaagggttttgatgactatttctgagatgaaacctagaaatccatattttagcaagcttctaggcacttctgacacaggtggttcagactactgtcaaaacctggaaactttggagagcaaaagtgaggtgattaatgattaaactggggcaacagcatagcctgaggctgacgtgggcaagtttcaatggaaggtcacgcgagggccggccatgctttcggaagacgttcctctgtgtcattggaggagcagcgttggctgatctggtcagggattgcactcatgcctgtcataaacatcagaagagggtttactgtcagctgtggattaaaactcaaaggccagagatcaggctactgttcttcttccccatgagtgcaaatgcttttcccctgcatcagttggctccaataggctgattcttttaagggtcaaagtcccacactctcctttttattattaccctgtttcctaaacgaataagaagcaacagcacatttgagtcaccttttatcatcctaagatgccgctctttagtttctctttggggcacagccaaccgtgtccaatatccattctgcctgtcctcctcagtaaggaaaaaccgagtttgagctctctctgtggccatctggaatcaagattctgtttcccagctcctcatgcagtgaattgtggccacgtcgaagttcaggacatgggatggaagtagacttggcctgggcaccttcttggaagtgctccaaaagagaagggcataatctttcttgccctccttcctccctgttggctagaataggaatgtaagagctggcaccctggcagctctcctgggctatgagcaaccttgggaatggaatccaagcacagtggaacagagggctaaggaggaacccagttccctgccccaggggcacgtttcagccaaggatgtaatgtttccaggcctcctagctgtgacagagaagtcttatatcctttacacaatgctgttagttggaattatcctttgcttgctgtcataactaattctgacagacacaccttgcctgttccctcttctgtcagccaaggctggggaacagaacagaaaatcacgatgccgctgcgggagcaagagataccagggtggtcacgggaagagatccaccggggcaggttcccagaattccttttctccaccataattccacgcatcagccattgtatgaggcatctgtcatataagctcagtcactggagatgaaggcacttcacaaattcaacgccttttgcaaatgtacccactgtctctctcaacagctgtgctaggtggcccggcagggacagtaaatgcactgggcgctgagatgaagctccctgttcaccattggcgggcacgtgctcggtgtttcactgtgcgtggagaatgccaggctgccatgtaagcatctgaaggaggcaaagcgactctaccctatcacctccgggtccagcatcactgaggatccccccaagtgtggctcctgtggtgacacccagactcaccacctcaaacgaccccacctctgaaaccatcagctctaacttcacctccgtgcttctaggcccaccgaggcccctagcaccccctcagcccactctagcttcacttcctctccagcctttcccagagtccccggcccagcaccgagggctctcctgcaccctgccctgtgcacatctccatgccacacaggtctgttccggcacctgcccgcctgccaccgccttaccctggtgttcccagaactcctagagaaagcttcagtcacaagggtgccactgccatccctgctccagcccagggctcacggcgcccagcagtgctgctgccatcctcagagagctgttctgccctcctgccccaggctgccaggcctctgcccacttcagctggagcaacagggcttcccctggtgcacagagctaacgagaaagccagagtgaatcccacattcagccttcctacgcctctctctgtccctatgtctacctctgtctctctgtctctatctctctctgtccctctctgtctctgtccctctctctttctctcttgcttgctctgtctctctgtctctgtgtctgtttctgtctctgcctgtctctctgt

SEQ ID NO: 49945 - DNA, 3485 bp, Homo sapiens
tggaggccgaggcaggtagatcacttgaggtcaggcgttcaagaccagcctgaccaacatggtgaaacctactaaaaatacaaaaattagctgggcatggtggcacaggcctgtagtcccagctactcaggaggctgaggcagagaatcgctagaacctgggaggtggaggctgaggtgagccgagatcatgacactgcactccagcccacgtgacagagtgagactccatctcaaaaaaaacaaaaacaaaacaaacaaaagaaaggtgaagagactccagaaggcaggtggcttagcaaactctcagctgccggtcttgtgcctctccgttccatggcctcagggtggggcagaggtaaattgcaatccctggacaggcttggatccacagtcgacccaacgtgaacacaggctgcgattccatggtctctggtgaccacatgtcctcctggtcccctccctgatggagcaccttgtatcctacctccactgcccactcgctctctcaggtccagccaagtcctctgacagaggtagtgtgacctagggagtctccggaatggcacaatctctcccagggggtgttcccatggtgcacagggcaaggttatccaagttccaagaaaacattctgtttgtggacctgacttaccggagcacatgagtgaaagcagataggaataagcagatcacggctcagctccgggtgcggggtggaaatcagggttaaccagagggcaatgggagaaaatgatgtggggcactcatttaaattatctgcaggactctgtatcatgaagataaacttattgcagccctagctcatgtttccagagcagagtcctgaggagaaggagcacttaccaaggacgaatgggtcactgcgtggtctgcaaatagcatctggaaaacaagaagctgggaccttggaaacagcaagagtcagagttggtcggggagcttgccctggacacagtgggcttcagtctagaagacaccgaaagacagagcgaactccctcctcctacaaactgttcacacagtgggaaggaggacggggtttagcaacacgctgtctcaaaaatgtgcactgtcaggcaaatatgtgcttgtaacaccagccctggagaggaaagtctctctgggcttcggtccctaacctttaccctaaacattaatatatcaatcggcagcggccctggagaagttgctgatggcatcagagaatgagggcattcactaagctgtcacagcagacccagatgcagtggcggaattaatttttccttcattaatcatatcctaatttgcatgattaatatgtcatagttgatgaacacgggcggatacaaataaaatcactgaacaaaaatgccacctgctgagcaaaaagaataagacaaacaagtgagttggcacagctaaatgagcaggagtcactttatttcccaaaaacaatattccaaaagcttgaaacaatgccactattggggccgcttgccgaggactgtggagacagacattcccagagttttccacggtgggatgagctccagggtacacacaactgtcacagcttgccattggacaattctaaaaactcacctttcgaacctcgcctgtttcccaagcggaacccaggccaaggggcgggatgttccaggacaaagtggtgccacctcgtcagcccaggcccacttcctccagctacgaacctcagccatttctggccagcggctctggggcagaaactggggcagggcattgccaaggacacaagcaaggggagcggaggaggagaggaagcagggagcgaccgtggaatggcctcggacctggggcagagccttcgggatgctggaagctgctcaggggccgtggctgaggcccaggcagccaccaggggggactccgactggggtccaggggcaggcaatgcccagcctccctggagcgtgggtttccttcaaggccacgtggcagaagcagccacaggagaagcagcgcagttttccgcagcggtgggaatgtcctagacctggcacatcccgacagtagtcactggcacacgtggcagtggaacacatgaatgtggccagggcggctgagaagcagacattttcatttcattttaattaatttaaattgaaaaacccacgtagggctagtggtccctggcgggcagctgaagggagtgtggggaccacagcacttccctggctgtgggacctggagaggtattcctcctttgcagctccgtcctcctctgaggctgaggggttggatgggggcatccctggagcccccagtctgcacttcctgactggagtgtggaaggcgcctgctctgtttgtttccactatccttccacaaccttcactgtctccctcccctctgcttaccgaaaactgcctcctgccagactaagttcctggcccctcactttccagccgcatcccccacgtctctaccacgtgaacagaccctcagccctcaaacacacctgtgcctcccacaccaccccgtaccttgtctgtgccattccccatggctcttccccacccactcaatactgatggagacccacctcaagcctgatgttctggaagcttcccagagctccatggcccacaggcttctcactcccccaccatttagaaggaacccagcctctggctgtggtagcttgcagggcagtcctctttatctcactgttacttgatagcaacaatgttgcaatgtcttggaaactgtgtaacaacctggcaaggctgagcacacctgcccacagagcggggaggtgcgcagcctgtcctcaacgccaactagcagggcggcctgaggaggtgactgcatctcctcatggtctcctcaccggaaacatgaggatcatgctgcttccttttggggttcatgtaagagccaggcgctcacctgtgccaaacgccctgcccgccctggcctgggttcagggttttcaatccatgctgtgctccctaaaagacaggccactcctctgctctccagcacctgaggaaacgttgttgctggttgcaggattccttagtctaatcctaacacctcagtggcttcatcctggcctcatgcattgtgctggagcctggtttctggtgcaggaaagttgtaagaatgcgttccctgccatctcgtttctattttgaactatctggcccaaacccttttctttagttttctcctcttcccttggggaaaaagaaaaggagaaaaaaggaaagaaaaggacaaaaaagaaatggagaagagaagcaagacagaggctgctctgaaatggtttctgcaccttctccaatacaaagggcagtaagattgagtaggatgagacagctatgacttcctattcccttttcccagcccccaggctaaaaaatatggtgggtctgaggttctactccccaaccccggccaacgctcaagcctagacaagagttggatgctccacgg

SEQ ID NO: 49946 - DNA, 1708 bp, Homo sapiens
ctcccagcacagataggaattgtgtccatagtcaagggtcactccagcttctgatgctgcagctaatatgattggacttttgcccagattgtttcgaattgcccctgggccacatattaatttgtttcagatgctaccttttcccactgttagacataaaagaatcaaagtgaaaaaacaaagatgcaaagccctgggattgttaaaaagttaattgctcagtgttggcctaaatgacagaaaagtccccaacttcctcaaggtcagaattttacgtgtaaaaaaggaaaccttgagaatttagaaaacacttgcctcaaataagcatcattagccattgcaccagtggcttctacacaccaggttaagccacatcaaagaactcccacgctcctagacccagaaaaatagaagaaaataattaaacaaagtaattggaagcgcctggcaaggtcaaagtaccaggaaatgtccttgagtaaaaagaagcctgggactaagctgagcacatctaaaatctctcatatccaaagcctgtattttccttggcacgggagatggagaacttgatcctgaccattgacaaggaggccaggaggctaaatccgccacatgcaggcttcctcctaataccctgacgggacttccggcttctgtaaacttctgtgggaagtaggcacacgccgacttggggaaagttgaccagggtaagcctagaggagggacaatattataaactgtgtggaaggtcccctgagacgttcacagactcagagggaggagcggcagtgcggacttgaaagcaatccaggcggagctgccaagaggcttagccacaagcacggatccagccacagagctggggcgaggctgtgaggagcaagccgagccatggcatgccgctcggtggtgggggaatctggcggcactgtccaggaagagcccctctgcctccccggaaagctcccaccgatgatccactgagatgcacagacacgacccagaggccggctgggctgatcccacacgtggctggtggccaagggactcagccgtccacacccagccacacacaggaggctcgtcctatgagaccctcctaggatcctcgctcctgatgtgtcctcattcggcctgagcagtcgcggccatctcgcctcaggctgtccccatcttgcctcctacccacccccacggtctcccactggctcgagcccctgccctccccaggtcacttccaggtctgtctccatctggctgtgccactgtgctcccaaggcctccccagggagccgtccctgcaggggacatgtggcatggttttgctttgtagtcgtgatcttggagagagacactatgccctaatctcaaagacagtccctaaggctgtgaatgtcaggcccttaccaggcctggtggtagcaactatttcagagtaggcacattctttgggctccttccaaccacacgcatgagtaacactgggcctgcccagggtgaagatccagtggaagacatcatgtggatgaattcaagctggaaaataatcccaatgacatgaatatttcaacctaaactttgatttgtaccacaattatattttttctgattacaaaagtaatgcaatggcattgtaagggattaaagccttgttttatatgtatataatttttttttttttgagacggaggctcgctctgtcgcccag

SEQ ID NO: 49947 - DNA, 1172 bp, Homo sapiens
gtgttcacacgaggaagctctgacgagagaaaaatccaagctaatgaagacatgcagttaaatgagaagttcaggtcctgaaactgtctctgttatgtccatcaggcaggttcttagctgcaagcaacagaaactgactccagcagatttaagccaatatgagactaattgaaaatctcatattgggagtaattcacagaactgctggagaacccggctcagacgtgagtcagaaacgagggagaggccgagcagcagcaggaccaggagcccagccaggggcctggggggcagcaatactgcagctccagggccagcacaggtcaggactggacacgggcccagtgccactgacccactgctcctgaagaggggatgaagccacctccgaagccaaggatgctggccttttgccttgtgccaccagcttccactttagagctggctgtgtgtgctgttggctgagtctgggtcctgcacctgcacccagcaaccagggcagctgggaggtctgtatatccccaagattcaccttgccaggccggcaggggggtcaggggctgggagctaaacatccagtgtctgcctcattgtatggtctcaagtaggtcgcttttgtttggttggttttttaaggcagaagaaaacgcactgaagacactctagacattgtgcaatttcatttggggtttgttttctttattattttccttccaagcccatgacagtgcatttggaatgtgttgtttttatgacgatgcacaaaacagcgatgcataggttgaagtaagggatgaactctgccccattgcttcacggacgatgcgtgccgacagcacactctcggtctcctccaaacatctccacgtgacggcaccaggagtgaagggcagggcagggaaacaaaagcagaggtcattttgcagtaggggtggcagcaaatgcaaatgacccgcgatctgcaggtgggaccactggcacccaaatgtgtcacatctatagaaattaaacataagccgagcacagtgactcatacctataatcccagcacttcgagaggccgaggtgggtggatcttctgaggtcaggagttcgagaccagcctggccaacatggtgaaaccccatttctactaaaaatacaaaaattagctgggcgtagtgatgggtgcc

SEQ ID NO: 49948 - DNA, 2109 bp, Homo sapiens
gaaaaactgtctccttccaaggagaccagggtagggcagttgagctgcaccacggataatgtcgcagttctctcgagcctcatttctagaaacacaattttaaattaataaaagctaattaaatcaaatttttgcttagtaacatatcacagtacataggaaactgggcacacatctatcctaatatttaatgccttatgatcactaagcgtttcctgaagcgattcctttaagtgagctccctgagagcagaaactgagcatcggatgcagcgtctagcccaataatgtgccgacggagtgtttgattatcttctgtcataagcacgtcacatgatgcagatgctccatggttcaagggctctcctgatttcccagttcacaaggaaatacattacagataaggatttttaaaatcgtctcccaaactggcttaccaacgtctgaaggaaagagatccagggaaaagggagaggaggcggagaggagacagcatgatgtatgtttctgaatgaatgtttttccgtagaagtctatgctgactgaaatcgtgctcacgttctcatgggagacaaagaaaacacacaaggcaggttgcgtcatttgtgacacgggtttccttaaagcccacttctcaaagtggggtccacaggcccacagcttcagcctcaccttggagcttgctggaaatgcagaagcctgggccccactcctgacctgctcacctgcagaatctgggtaccgaggccccaggggctgtgaaggcacgattcggtttgagcatcagcttccacttgcagatgccaccgtatcttaacacatgttcaaagaagctgaggggattgcagacagccacctgcctccaagtgtactgccccacagccatccaaaatgacaaccctgcaggctacttgcagtggccggtgaagcccaaatctctgggaagagggcctccttggccatatcccaaaaggttgactttctttaacttgctgctgttggacctctctcagttcgggaaaggaatactgcaggataaatcaataatgctgagccaaacaaatactcctgacgcagtcaccacaggtcatgaccagagaggacaggaacagggaagccttccaaacccagcagggaggacagtccgcaccctccagcctcgccttgaaggacctggtgcctgcaaagccatcacagctgatcgagtaaatctgctctgctgtgtttgaatacctttaattgctgtaaccacaattttaccttgagagaaggcagaatgggggatggggaactgcagaaagctagcaggaggggagggccgagcaggttccggggtctccaggctgtctgcaggcactgcctccccgggccgcaggactgttctgtgagctggggatgactcctttctccctttactcaatcacgggagcactgaggcactggagatgaaaccacttcccaaaggtgcttgaaggcggagccagtgctttgtacctggatttactttctatggttacaacaattccacgaagagggtggggagcgggtaagctagtgagggaatctagctgccacagatgttaagttccgcacaaaaggacttagtgtgtttcctacgcaagcacaagattatgaaaatatttccagccttattcaaatttcctcaatatgctttcaagggaaatggttttacttagataattcttcaaagactttatgcaataaaactgtatacctcatacctttttgtaaaaatggttaaaatatccaaagcccagaatgagtatccaattcctggaggtggaaatggtcctaaacattatctgatgactttttaaactgtctactgacttttaaggaaactgtagttcaacgaagtgtatgacttattccaggtcacgaattgagtggccaagtcacaaccggaactcagaacctctgactcacgggccacattctgccacacacactgcaactggaattaaagtcaggatttctgatcacagcaggggaaaaggggttttctcttggtttgtagacagttctgcagagcgtgcatagctgggtgtcgactaggacccctgtactaacaccccagccctgtgcaccc

SEQ ID NO: 49949 - DNA, 1959 bp, Homo sapiens
aggtccttctcccccattagtttgtgagcagctccaggaccatgcagcaagagcccttgtgtatctctagcacagtgcctggggcacagcaggaactccaggggtgagagcaatgggggtgcggggagcccagctatggactcagggaggctggatctgaacccctgctctgcccctcagcattgtcacagctttgagcacattgcttgcttcaggactccatttcttcacgttcttcaccagatagagagaacactcatctttcaggtgccgtgaaattgagtaacacagattatatggtgtgtctatattttgggtggtagccaccgaccgtggggccaaggcctgacatgaccacacaggtggcaagcccctggcccctccgcccctcactccttcctgctccatgctccacatccctcccagtcccggaggacagaaggctgaaagcaaggtgtttccaggccctgctccctgtgagagccctacgggacaatccttccttactccttccggcctctggtggctcccagcaaaccatggcgcatgtccgcctccgtcctcacacggcttctcctgcatgtctgtctctgggtctcacctcctcttcttaggaggaaacagtcatgttggatttgggcccaccctactccagtgggaactcatcttaactcattacatctccaaagactcgatttccaaataaggtcacattctgaggttcccagaaggacatgaatttgggggcacaccatcccacccagtgcaccccctctgccactgctatctgctgccttcactccccagggactcagacacctgacacacagtctgtctccatatcccaaacctgtcattgtgctgaggacttcgtcccactcaagcatgactcatccaaggcctcgcctctgggttccctgacctccttggccctggtgactcactccacaccactccagccacccaatcccaggctcatcgtggggactgccaccctctgcagtggctctcccctgacgccatgtgcccacacagcctcctcctgcccaggctctcgccttcagatcacccatccagtaatgaatctgtgggagcttgggttgcattaatcaatgaatattgctacccttgtagggccaatacccagtgttcacatagggcaagcctctacacactgacccttccctctgtggggccctcttcctcccggcatactcctttcacctccatttcacctgacccaggttccatgacgccaccagccgcctgccgctaacctgccctccactgctccattgcccctccttggcaccaccaggaaaaaaccaattctagaggcccctcgaatgctctgccattgctacccagcctggagtgtcgtagagaagaactcccacgccaccctgcagattgggccctgtgaagtcgccatcacaaacctccaccaggcactccacaccaaagggtttacactcccagtttccaatcgctcctgtctccctcttaactcaggagctctcctccttcttcagaaatgacagaaacttcctgaggggaaggcgaccccaccacaccgcccccatctctcccacctacttcctcagtagagggtgtgcctgcccaggaatccccactaggattggtcctagacaccaatctcctcctctaatcttctcctcagggacctcactctccactgcctgctctcactccctcttcttcagtctttctttattttattattattatttttgagacagagtctcactcttgtcacccacgctggagggcaatggagcaatctcggctcactgcaacctccacctcctgggttcaagcgattctcctgcctcagcctcccgagtagctgggattacaggcatgtgccaccacgcctggctaatttttgtatttttaatacagacggggtttcaccatgttggtcaggctggtctcgaa

SEQ ID NO: 49950 - DNA, 4288 bp, Homo sapiens
tgggcaaacacacattgggaacgcagtgacaatctctacctacgactcagaggccacgctggaggccctcagcaggaaccccacgggcaaccttcccacattcccacgggacatcttggtcggtgtaagtgcaacagccacagagccacagggtgcctctatgactccaggatcttccatggttcataatgtcccagtacagatgagaggagggacagagtcagagaggctgggttgtatgaacactggtttattaggtagataggaaaagaagaatgaagtcaatagtctttagcaagccaactagctcaaggaatagacagcccctttccattctggagacaacacataaatctattaatattaaatattgtcatgaggtatgcacctgcccacaggggtattatgatggaaatactggggtagtctgcagggccaggtacaaatgacgggaaacaaagccagagaaactgaaatacctcttggaccccagaagacagatgtactgatttctgggatgtcaggagcccagtgcagagcagctggataggtcgctaagagctttcccttctgcttatcgggtctcacacacctggataaaccagttattgaaagctgacctgctaatgagaagcttctggcacttgctggtgtttcctaattgaatgggtgactgccccgcatctcagggccggggctcccgtgcggacgcctctccatgaggttagcagcttgatttagatcagcgtgcgggacggggagctcacagtggggtcgaggagacacagcacaggcttctgaaaggtgccctgtccattagggagcaccccatttacagatgggtcatccttcagctcactagtttcccagcgcatgacagtgggtagcttttttttttcctattataaacaaatcttcgatgtgactgcgatgatctacggatgatctacgtatctggttgtgtgatcctcaagcacttatgcaaggtggagtgtaaacaatggccaagacccaaactgcaatgttccctgaagtccaacctgcttggagtccttgggaacgtgtacaatggttaacaggcttgagaggagtcagctgggagagtgagagcgagactgccctgcagaggggccgctgaggatggacccctgtaggccgtccacacccaccacgcgtgtcatcctcaggaaatgcaaccggatgctcggaatttcgcccctaaagcgactcagggcagtctcagctcaggaagacttctttttttgaccttctggcttaaagccacaaccccaggctgaggatgccacatcaacggcgtttcctcgccacgctgcaggcgtgactcacgtttctaagcctgcagggtccccgggccaagcgcggctactgagagcacagcgtcctccctcagcccctgctcatctgcacggagcaaagccgcagctttctctgctgtcagcgctttatacgactcggatgtaggctctgagcgggcacgggcccgccctcagacggcgacccgaggggcaaacaggatggaggcgcgctcccttggaggctgtggtctcgattttatctgctcctgggtggtgcgggtggtttgctctctaggcgtgagcaaaggccacaaggggcccgaaaaaatcacccaaggatgcaagcccgccattgcgctgagcaggggcctccccgccgccagagcccgcgcccctccagggaggcccgcgcgatcgagacccgccgcctcccggccaggcgcgggacaccaggcgaggggagccaggagccgggaggggcggcgccgggcccgcaaccccaccctgtcctgcctccgcctcctcccggcaggaccgtcccctcccaggccccagctccgcggccgcccactcgcagccggccagtcccgctcgggcccgcgtgccccgcagccgccacgcgccccgcagtccgtgccgaggctcccgcccgagtgcgcgcgggccggcggtggcgtgtgcgcacgtcatatgggccgccggcctcccattggttgcggccgcctcaccagaccgcgtgcggacgggctcgcgggcggggcggggcaagctcaggccacgcccctgggcggtgcgcgcgggcggtgggtaggccgggcaggctcacgtgatgcgggccccgcggcccgccatataaacccgcgcgcccgccaggcgctgcggccgtcccgggccgtgactcctcctttcccccgccccgcctccgttcggagagccggcgggcgggcgcctctcggccaggtacgcggccggctgggataggggtcgcgggcgggctttggtcgcgcagcagccggtcctccccggaggtaggcgggcgcgggccctgttgggtctttgggacgcgggtcccgctggggccggggatgctgctcgctgtgagcgcgggtcccgtccgccgctggccccgggcgggcgcacgggggtctaaccttggggggcggcgctgccgcctggcccgggtgccggggttcgcgtcccgcggggccttcctcgctctttgtctcttctgagtgaacttgatgacccccttcttccaggaagcgcctcttggacgcgtgtgaccgatgcccagattgcacgaccacttctggagctgctcctgtgcgcacagcgcgaggcgccgaggccccccgcgagccagcgccgcggggctggcggccaaggttggggagatgatcaacgtttccgtgtccgggccctccctgctggcggcccacggtgccccggacgctgaccccgcgcccaggggccgcagtgctgcgatgagcggccccgagcccggcagcccctaccccaacacctggcatcatcgcctgttgcagaggagcctcgtgctcttctcggttggggtggtcctagccctggtgctcaacctgctgcagatccagaggaatgtcactctcttccccgaggaggtgatcgccaccatcttttcctccgcctggtgggtccctccctgctgcgggacagcagctggtgagtacccctcctggttcttctggaagtaaaaagggtgtcttttcggttgaaagtacttttcagcctataagaaacatgcatttgaaactggaactatccacagattgaaagtgtgcatctccagtcttgggatttagagaaatgaaggaggggtagagaggacctggcacccccgagggcgggttcgggccacagctctctgaagtttgaggaagcacagtgatggagatgaggcagggagataattggctgttcaagcaggtgctgtgccaagctgactgagggcccttccctcctggcgtccgggtacagccccagctgtcatcccgcgccagccgccccggattggccgcctggggaactggtgagcagcgggactgaaaggccattggtcgcggcagcaaacatgctaccctgctggataactgaaaacaaacccgtcacatgggttcaggaggcggttgccaggggagcaacttctcagcacttccttttgccgggtcgctgagtaaactgtggtctgaagccaaaccgcctacaccctgaactgttagagctctgtagattacgttcttaaggaaaagagtaacccccttacggcgtttagattttcgtacacccaagcagtagcatagatgctgtacaacgtaacactgagtcagtctgaactgtggacacggggactgctgggtgtgtgtactagactttcttggctatcattgaaccgcttttatagaaatgttgagttgatcttggctcagcagatcacttactgctcctgtagtcacacagcatttgtttatttaacgagcttgtcgggtgctttctgcaacctcaactctataagctgttgaaatgttaatccaaaagtgagcaccacaagcccctatccttaagcagcttagagtctggtggggaaaacaaaccagtatgtcagtgactccagtgcagtgcagggagcatcctgtttgctttgtggctgacgtttgtcagctgactgctgaccataggcttcagatgctttgctgtgttcattccttacagcaataccatgtgtagcttcatttatagatgtggcaactgaatcacaggtgaagtcacatccaagggtgcgcaggtagaaaggggccaagccatcgttggtaactgctcctgctgccttggtaggtgtgtctcctgcactgtggaaacacattgcctcagttgactcactgaaaacagcaagcagcagagaggtttgtagcagattaacagagggctccgtgttgaag

SEQ ID NO: 49951 - DNA, 721 bp, Homo sapiens
agtgacaactactgagaaaagcttatatttaaaaaaataggtaatgatacccaggtaattctttgctaaattataaaaattcataatatttgatctagaaaaggaactagagccctcgcactgcccctttgaattgcagatgtggtcagtgttctgaattcttgaaatttctgtagtaagcagtagagaaagtgactggtgtgtgagtgtcccctcctccttcaccatcggaagcagatctggatgacctcatgcagtgatactttgctccctgagcatcagtccaccagtgtttcttttcacaaaatcagagtggatgcagatgatgctggcctcttagtccacagtcaagcaaatcgagcctgaggctgcagagtctgtctcgggccagggcagggactaatgtgggtgggcaaggggacagcctggttcaggcaggcagcacctttctgtggggcaggtggccctgggcatggagaagtggtgatgagagcaccgctgcacgtggccgggtcaccatgtagacggactgtcctgcctgaacattgcatctgttctcagctgcaggagaaagcagtgctaccccgcagagcttctctcacagcccccctgagggagacggaaaggtagtgaactccaggatggctttagcagttctcattagttaaaaattgacatcttagcacttcaatttaaaaacatagaggtggacttttaaatg

SEQ ID NO: 49952 - DNA, 1441 bp, Homo sapiens
acaagtctttgaagtagaaactattattagcccatttttaaaaggggaaattgcagcttaggaagattaaacaacttggccaagtgggtggcagaggtcgacgtggcaccgtgcttctcattagcataccacactgccctttcaacacatagctcgcacctgccttcaccctggaagcaggtttacagcagcctgtgttggtgtctgggttgccatttacaatgtgccaccattaggcaacactgctggaagtccctgtgccacgtgtcaggtccgcccgggctggctgtcgttcgtctctggcgtctttgccaggcctcactgtggcctctgtcgaccagggattctaaaagtccacttcccatttatttatcagcacattagtgaacagggagtcaaatgtgatgaccagttttctttccaggttgctgccaagagtttgctcttttgttttctcaccgcagtttgtatagaaccctcccagtgttcatatctaaaaattggcagtgctttcacatgatcaattcctaaaagcatgtatgtttcctagaaggtcttattgtgtgtgtccccagggtagtaactggcatacctgggtgactcaacccagactcatgactttcttacctgtctgttcagatgagaggctcttgctgttttctggatgagtaatctccgtcattgctgaaggtgaggagctcagctccttcctcttaaagtgagtggagggcaattaagtaacgtgggaagtcacgattctgagggaaaaaaattctgtatggaggtttctcttttgccctttagcagaagctccgtggcctcaggaaggtcatttaatctctctggctttgcttcttcatcagtgaaatactgttctccattaagaatttaccctgaggtgcctggtcatagtagtaactgtagtgtctacctctcagaagctctgtgagggtcagatgaggaagaacatgtagaaaggatttcccaactgtgaagctctgtgtgaattgagggcacacagagcttcagtattacaaagcatgacctatttccaatgtctgtttcaacaaactgctggtaaggtgggttataacacaggcatcagatactaataaaggtttgtggcagaaacctcccttcagataaaggttcaatcccttaaattgcagttagaactttcaggaacctatcataccctaagcatcaccatgctttgataaaattgggtgtttcctttatatagatattaatttagttaaactttcaccaatatcttacacttatataacaggctttatataagggcctcagcagcgtaatttcacctgaggcagagaattatcctaattttgcaggtgagagctgtggctcacggggccagagccatgaagacggtgcaggggagctgggagagctggcctcggtctccagttctctgcac

SEQ ID NO: 49953 - DNA, 1280 bp, Homo sapiens
actgcacaacaacctgggcgacagcgcgagactgtctcaaaaaacaaacaaataaacaacaacaacaacaaaacaatgaaaaaacccacaccctacactgtggggccctacggccggccgtggtgcaggcaacctccccttgacaccactcctgttgctgcggggcctcccgacctggggctggttctgcgctttcccttttctggggctttgccgggcgcttcctggggccctcctgggacctccctggggctctcccgggaccttcttcctggggctctctcgggaccttcctggggctttctcgggatcttcctcgggctctgccagggtcttcctggggccctcccgggacctccctggggctctcccggggtcttcctgggggctctcccggaaccttcttggggctctccctggagcttcctggggctctcccgagtccctcctgggacctttctggggctctcccgtggccctcccggggctcccccgtggccctcccggggctcccctgcgcccgtgtgtccttagtgggagggcgctttcagcctccttctcccacacacctgtcccgccagcgcaatccaggggccagggcggctgctgaggccccggcccgaggaggggcggtcaccccgcagtcggacgccgccgcgccccacgccgcagggcagcgcgccccaaagcttcccgcgcggggactgagtggcgccctgggctagtccccgccccttcgcccccgccgcgccgcaccagcgccccctggcggccatccgcgcgccgcgcgctccgactcccgcccaccctagagagagcgcggagccctgccggcgactgacttcaaggcacaaggcagtgggaatttcgtcgctgagaaatgcagcgtgtacgtcggttgtctttccttaagctgtatacacactagacggagctttcggcaatgtattcactgaggttacaagagacagggacttggggcttgttttctagattgctgaaaatgaagctttgagagcagggatgacacgtaagtggctgaaacgtaaaaaactggaaggtcaaattacaaatgtaatagaaatagccaccgggtccactcagtccccagccgccttgcaatctgcttttttaactagctgctctcatccgattataacaaccatccgccccttcagtggttccagggactgcagagtcacataagagagcatcgcatagagcaagtaacacattgagggggcactcactaaagacagcacccacataaagagagcacc

SEQ ID NO: 49954 - DNA, 595 bp, Homo sapiens
gcgaccttacagtcagagtctgtgtttagcttgaagtttcacagcacctgtcctccaaggcctccgggttatctgagggcacttcctgtggacatcctgttccaggcatggcccctggggtctaggcagtggtgtgtgggcagggggtggtgcctggagcttcctaacactcttagtcctcctgcaaaaccaagaccccacctgagatcaggaaaagttctctatcacacagcctgggaacacttgccttggattttggcctaggacaaagcctggctgggtgacgcattctgggctgccatggggtggggggagggtacaaagtccccttctggatcttcccagctgggtgaggcattcaggccacatcgggggtggggtggggggaagtcccctcctgggtccttccaactggatgaggtgttcagggccgccatcgagggtgtggggaagtccccttccgggtcctcccagcaggtactgatcttactccttcgttctcaggcgggacactccaaggggctcccttatccccgacatcactggagctcttggcctggcctccttccctcatggctaccacaggccacccaac

SEQ ID NO: 49955 - DNA, 1308 bp, Homo sapiens
gcactgtgggaaaagtgggtcaaaactgggccctcctccaaaagatacatttttgctggatttgaagtcaaaggggactctctgaaatttatttttatgggaaatgtagctggttttgtcccctaaaatcccttctccccaggctgtggctgcccagtggaggcggctgagctgtgccttagggtctgaactctcacaaataaaagataaatgaggtgatgcctccaatatcggcctcatttgctgaactgaaaactgattctggctttcctctctgtggttggaagtcagcatgtcaggaccagcccaaagggatgtgggagaaaagagacagcgatgtcagtgtcctgaatggccacggagcagaggccgcctgcccatgtggaccgctcccctggctgtgaaacgagacccaaagcttccatctgagtcactctccctctgtctgtgttttggtccctgttagaacagcatagcctttctctgcccaggacatgactttggcacaggtgacattgcgtttagtgctcccttctcatcctgtgtccgaatgcgggcactgagggcacaggctgtgtggatgaggacaaaggccagttgtgggcgtgaagctggaacaccagcatgttcactgcctttaggtgttgctgggtgttgcattccacgtgtcgtgcccttgtggactccaggaccctgtggtggtgattccagcactatccccatttcacggacgtggcttggagagatggagagactttcccaggtgtctcccttacccaaggtactacagaaatcagcagccgagccactgtttgaggacacagatggcactcagtcctcagaggcacacagcccgcgctccctccctaccctgctcttaggggtcagtgaccttcaatccatgtatgagatcattgatcactatgattacctgttagtgagcagtacatctaacgatgtactgggctcctctggggcctggaggtctctgacagagtagcctgtctctctgaggcttccaggaggagaaggaagttttcatggcagaggcatgaaaacctgtgtctcgggtgtccacatcagcacttactgtttggacttgacgcagtgcacaggggctcaaagctactgaccacaggcaagcccctcttctctaggagcaggacttacagctccaagaacaaacacttcctttctggctcccttgaagctaggccagggcctgtaacttggttctacaaccatgtgttctggaatcttcctaaagagccagtgctcgccctctgccctctctgacccactataggt

SEQ ID NO: 49956 - DNA, 725 bp, Homo sapiens
ctttacgtttcaccatgaatccctctcccccacaaaagctgtaatccagcaaacaggtggagaatagcgtgctcaaagactaaactaaatgggagagatcaggtttaaattaacatctgggatggctgaaagggaagggaaatcacacagaggcaggaggggaaggaggaaggcatggagaacagtggatacgcccccaccggagggagagggtgttgtttccatccactcccagttccctttacctgactgaatgttgtaactacagatttcctatgttgaaaccctaacccccaagatgaaagtatttggaggtggggcctttgggaggtgatgagatcatgagggtggaaccctcggagcctttccaccactgaggtcagagcagaaagatgaccctctgcaacttggaatagggccctccccagaacctggccacactgtgctggcaccctggcctcagacttgcagcctcaataaatgcctgttgtttatcagccacccagcctgatacattcttccagcaactcaaacaaactgagacatgaaagcagtgttgtccgtctggggtagtatctgaggttcattgcctcatgccaaggaaatcaaggacatgcacacacaaggagtgaggttaagagcgaaagtttaagaggcgaaagaaagagaaaagcactctcctgaagagacagagggtcccaagtgggccttctggtctgaggtga

SEQ ID NO: 49957 - DNA, 1306 bp, Homo sapiens
ggtggggaacgttttgttttggtttggttttggtttttttagacggagtctcgctctgtcacccaggctggagtgcagtggcgcgatctcggctcactgcaacctctgcctcccaggttcaagtgattctcccacctcagcctcccaagtagctgggactacaggcacatgtcaccacgcccagctaatatgttgtatttttagtagagacggggtttcaccgttttagccaggatggtctccatctcctgacctcatgattggcctcccgccttggcctcccaaagtgctgggattacaggcatgagccatctgcctgacctggaaggtgaggaatgttctttttgctgcccaaagcaggcaggattcctgagacttactcatcggccaaaaatattcctcaactgcaaatctcttaaaggccacctggatcaccttagtcccaagcctcacccaactggacacatcacacaagcatctaccaacagggtgtctagctttggagttcttccgaaccacagcagcaagctcatgaatgcctcctcagcactgagcagctggggggtgtctgtgctgaacatcctgtgtctccgtgtcccatccaagctgtctggggttggcccctatgagaagggctcctcactcattaaaaacacgtaaacatggcaatgtggggtggagagtgacagcccaggcctacgttgaggtttggttcccaaagctcattttgattttgttttctttcctaatagccatttgatggactgagagctcctaatgagaacacaaacttagactaaataaactactaagttgagaacttggatctacaagcaggcatatctttctaaactgtgaatcattaactgggtctcagactggccttgccaagtgtactgcatttttgaagtggcctaaatgggcttgttctgctcccatagatcagtcctcatgctttcccagcaggaaattgattgtgaaagaaaatcttctgactagaaaggaaaagaaaaatgtgcatctttcatcaaatactaaaaggtatttgatgattcatatttcagtttgaaactgacttgcagatgcgtctccttttactttcaccatttaacccatgcaaaatttgcatctaagaataataaagattgataagatcttgcatttcaaagtaggtttaagatactggtgtttctgcaccccccaaaatgaatgatgttatgaacaatgtgttaacccaattattttaagtgaataaaagatatttgaaagaaataggaagcatattttcccaaacagaagaattcct

SEQ ID NO: 49958 - DNA, 2499 bp, Homo sapiens
gggtactaattatttgttagtcatatgtgttgcaaatatcttttcccagtttacaacttgcttttttgtatttaggtgatatctttagatacagagcggtttcagattttactgagttcaaatttatctatctctgcctttatgttgttttatgttatctttttaaaaaaatccttccttatctaccaaattaatgtgactatactactaggcagatgttcatcagaacattgatatgttctcagtaccagtgtaggtcaaggtgagatttactcctggctttcccaacatactagcattgattatctgtctcatcactttgtctaaaatgttaacacactttttctagcagcaaaacatttttgtaagtggatttaagttcaaacaagatatctgatatagaaatgatttctttttacagaagatgatgctgatggccagatcttggaactgctctggcaaagagctcaatactgagggcttggaaattagcaacggctttgctgtgtgcattttgatatggatcacgctatggtccttggccgtctacgctgcccttggccgtctacgcggctatcttcagagtgcttccctctcttctgccactcctgtcgctggctgtttttatgttcactgccccatcatctctttagccaattaaaatctccgtctgggcaaaggtagcttacactgctctctccactccctgtgctctgcggggagtgctacgtggtagctgggaagtgagaaacaaacactaggcaaatgccttttggacgggactgttcagactttgtactgctggctaatatttatctactgctcggaagccagcagtccaccttcctttcatttcctgctggtgaaaattccatcttctgggttgcacaataagttaacctgattttgaagtcgcaaggagttttttggaccctagtctctcctttcttgctcttccttcccttcttctgagcctgggatcccctggggaaaggacatgtgtggccgctggctcctctcaggccacattctcccccgatctcactgcttaaaaggctggggacaccccccagctgcagcagacagtgtcttgagcagggcctccagcttgggctaaatgcccgccccatggccagtctctgaagacaaggcagggagagcaggcaggtgatgagattccatcatgtgctcagttgcttgagtcatgccatgcctggccagccacagggggcaggggtcagcagcccagcagttcccactggctacatgtggggctgtgagggcaggggagggagcagctcccccaaagaaggagagtggttttcctctactagatggacagaacaataaatgttcaccacccaggaaatcagtcctggctcagacccttctaggtggtgtgaccccagccaagtcctttattctcaaatgacccccagttgccttacactttataaggtggccttccaattttgttttgtgttttaagaaacagtatcttgctctgttgcccagcctagagtgcagtcgtgtgatcatggctcagtatagcctcaaacttctgggctcaaggaatcctcctgcctcagcatctggattacctgggctacaggccagcctaattctgaaatcctgtcattctggccaggcacagtggtgcatgcttatgatctcagcactttgggaggctgaggtggaaggattgcttgatcccaggagttggagaccagcctgggtaacacagtgcaaccttgtctgtacaaaaaatttaaaaatcagctgagtatggtggcacatgcctgtagtcccagctactcaggaggctgaggtgggagtattgcttgagcccaggagttcaaggctgcgacgagctatgattgtgtcactgcactccagcctgggcaacaaagcgagatcttgtctcaacagaaacaactgtatagtacgctaattgtggagtggggatgtcgctgtgtgccttaggaagtgttaatctctccactttaagctccaggcatgttaggtgaccaccatgaggtcgcttcacatcataaaaagcacccaggaaatgctgaggacactcatggaggcatggcttcatgaggtttgtcattagccaaaatgaaaaattagtttactttttaaattataataaaaatggccagatttatttattcaaccgttaatatttgaggaattaaactcatggttattagaatggcagcaccagcttttgtacatgtccctcgctgggaggggaatttaacttctttcaataagaacaggttttaataactcgatcctgcagattcgctccatgactgggctgctctaacatcagctgccgagggctgttggttgatgctcaactgagactccctgtagtggggaacactcttgtattcacttttgtgccccgactgcccagccccaggcctggaatatctcaacgtgtgtttgctaggtgaacatccaatgttaacgagaagcaaatacact

SEQ ID NO: 49959 - DNA, 2212 bp, Homo sapiens
ccacccacctcagcctcccaaagtggtgggattacaggcgtgagccaccgcgcccggccagcattttattatacgtaccgttttatcatctcttcacccatccaccaatgcatctcctgtatggacgtcttgattgttaactcacggcactggacctccagtttcatgcctctccacattgcagggtcctctacgttgttgtatcagtcacctttctaaaatacaaatcttaccatgtaaattgtttctaaaatctttcaatagaccccatagactcagaaaaacgtcccaaagtccggaatcctggcccctgcctacctttccagtttcattgctgggtcagaacgcctcacctaagccccacattgaccgatatggaatcaatgtttacagccggtgtgtacttaatcaacccccttccccgactgcgaccactcagatgcgccttcccgggccccacaccccaaaacccctgagccctttcgtccacagctgtctgaccacccagcaccctttcctttatgtcaagtatgaggatttcgtttcttaacctttctcactgctcaaaatgcaaactcagacatgagtgccgggcgctatccgtcctgctcacgtcttgttctcagggccgcaaggcgcaggggcagtaagggccgagagcccatcagggtccggcgctgcccgctgcccagccgggcgcggagaaggggacgggggtccggggtcgcgggtccggagggtctcgggttgtaggaagtgagggctcgcgggcgccgcacgagtgcgcgtgcacgttagcccggcgcgcgcggcactcatctcacctcgcggaagcacctgccggagctgtgtgcaccctttcctgccctcaacacaagccgtcggcgttcactactgtagctcattcagaccccactctccaacctactgtccaggcacagaaacgacagttaaggttcccccggaccgtacgctggaccttgcctccccggctcctaacgggagacgggctgccgtaaagcttcgctttgccgactgctgcaaagcgccttacgactgaacccggaatcgacctatggccagcagtcgtccccgccctgcttcaaacatttgggtttcaggagccgggcggaggtgactgccgcgtgtttgcgttgcacgcccaccgcccgaaacacggcggcggcctcagggctgctgcggcctcggcgggggcaggccccggcgcccgcccgcctcccggcctccatcatcccagggtgcaccgcggcgggcgcgggcgcgcggccatgttgcggtagtttgttgttttcttcctgcggaggcgaagggccagctgtggaccgcgaagcgcccggcttcgcctctgcctcctgcagccccctcccttctctgtcctccgtcacccgtacccgggcccggaccaggcacgtcggcccaccagctggcttggtgggggaggctgaaggccgggccccgcgagtgccatggcggccgccctgggagcgagcggaggagcaggcgccggaggtacgtgaggcagccggactctgggggccaggaccgcgccgcggtgggcgggggtgtaggccggggggcctccccgcttaggagaggacgaggctctccccggctccgactctctttgtgttcggcctattccgttttctccctcgccttccctcgctattgtcattctccctttctcgctcctcctctccgctgtgcagatcgtacttacctgtgaacttctgtgtgtcctctactttgcaaggctgcctaagtgtcaggcccatctctggcgttggcgggcattaagtgccgaagccggcctggtgtcctatgggtaggagagcgccccccccaccccccgagacagtgtcacttagggagagcggggcaggtcgctgtagggtgggtgtttaagattgtggggccatcctgacagatttagattgatttgaagcccattacaaaaacataacgaaaagattcacctgtgtgaaggaatgtgcgacagtaggccagtttggaaagtgagatttcttgagaaagtctcaataaatccctgttttaaattaacttatttgttgtctaataacctgttagtgttttatgtgcgtcttccaaaagtgaaaacgtgacacaaaaggtttagatactgagtcagttcctttggatagtttttcttgtttgcaagcataaacagtat

SEQ ID NO: 49960 - DNA, 2878 bp, Homo sapiens
agggtctaggttcctgggaaaagaaatgagtgtcagttcctatagattttaagtcatgatgggaacatccagtaggctgagctcagctcacttgcctcttctcggctacccaagtttatagagcaagcctttataacttccataataggaggggtcctatctcatatcaagcaggaattctattatgattgatttttaaaccctgaatgatgaaagtttgttgaaagacaaacaaatgaccaatgaggactacacttcataaacaaaataaaaacttcattttagggagaacctctcctggggcccgtgtaacataggagatttttaaaacagtgactacaaattatttctaaagcaacatggtgtaggaactctttctgaaaatttggcttggctattcagaacttactagttatgctgtaaggctcatatgttcacttcgaaagttattggacattacctgatttgtagttaatatttaaataaaggatctggatttcctcatctataaaataaggaattttgactattagtgatttggactaggaacatattatacatgagtgtgatattgaggaaaaagaaggttgagaacctttggaatacaaaggtcagcaaactttttctgtaaagggtcagatagtaaatattttaggctttgcagggcagatgagttttgttggaagtgctgaactccgccgtttaccttgaaagcagccatagacaatatatgcctgaattggaatagctgtgttccattaaaagcttatttacatacacgggtggtagctaaatttgggcagaaacaggtggcaggccctacttggcccatgggctttggtttgctgacccttagattagataattgctagaaccctatcacaagctaatagtctatgtggtatcttatccaagtcgaggattctggaaaagaagaagaaatagaatggtaagtaaaagtttgtgttaactgtagatgtctgattgctgcatgatagagaattgtagaaatctagtagatatcttcagtcttgaaggaaaattgatccccctattaaaatagaatgtcttgtacaatgtttaggccttagaaggagattttccaggtaaggaggtcattgacctctttcgttttgctcagttaatattttaccccttggctttcatggatgtgctgttcttcctttaaagttctggactaatggggacacattttttcttcttggttctgtttaatatgactgctatgaactggaactttaaaaagtatttgtattctaaaggaaaacagagggaaatgactcagaatatattaagaatataaacaggctgtacagggttcttgtgttagcttgccctgtaagattttgagtcattatttcacttagcatgatgtcttcaagattcatcagtgtcgtagcatgtgtcagaacttcctttttaaggctaaataatattccattatatatctatactatttttttttaaaccatatatccttcaatagacacttgagttgcttccaccttttggttattgtaaataatactaataggagcttgagtatattaatgtgtcttcaagtgcctgctttcagttcttttgagtgtatacccagaaatggaattgccacgccagtccttggatttaggggccagtcttaatccagaatgacttcattttaactaattacatctgcatagattctatttctaaataaggccacattctgaggttctggtggacatgcccttttgggggatgctgtggtatgataaaaaatgaatatttttttctgcccaggttccctcggcagaactttggaaaccctttgaatttactatcttttctacactaatgagatggcttatagcgggggtgggggccctagatagctttggggtgggggcttgtcagaaaaactaaccccatgttaagagggttagaacgttcaggctcaacccccagcctccctcgaggggaggggctggagattggtggtaatcaccattagtcagtgatttaatcatcaggtttagggagcttctgagttggtgagcacctcctcgtgctgggagggtggtgcaccctgacccttcagactggccctgtgtacctcttcatctggctcttcatttgtatcctttataataaactgtaacagtaagtacggtgttttcctgagtcctgtgaattgttatagtaatagcaatggggggaggtgtgataaccccagaatttgtagacttcagccagggagaagtgtgagtagcctgggcacctcattgcagttggcatctgaagtggggcagccttgtgaaactgagcccttaacctgtggggcctgcccgaactccagatgattagtattaggattgaatggagttgttggtattgcagtatgattgtgcaatttggtacagtcagcaagtcaaacttttaaaaaatattgcaaaagatggctgagtgaagtgtaataatacacatgcagcattttaaaaaccaaacttattaacttctaccccaccctcaaataaaccagcacgtatatccatcaatccacaactaatccagattcaaaatactgatgttttcattgacttctccttccttgttctattcagttagtcaacatgccttggaatttctaaattgacagtttctggttcatgcatttgtcttattctcccttctgtttcttcaccgtgatgctaaccacatttttttttcttaatggttggtttgtagttactttgttttaccattgtttatgttttatcgattaattagttcttgcttcttgctactagattacctttcctaaactgaggctgtgttgcatatgaagtatagatttcttacgttgcttttctagtaa

SEQ ID NO: 49961 - DNA, 1396 bp, Homo sapiens
tgtttcaaaaaaatagtttagaagttgctgaattgtggtcatgtgtatgagtaattttgaaaaggattaattgtttatgtggaacctttgaatatttagttccagtcatgattgtatttaggtgtctcagtagtttttttttttttctagacggactcttggtttgtcgcccaggctggagtgcagtggtgcgatctccactcactgcaacctccaccttctgggttcaaacaattctcctgcctcagcctcctgagtagctgagattacaggcgcccaccatcacgcctggctgatttttgtattttttgtagagatggggtttccccatgttgcccaagctgatctcgaactcttgacctcaagttatccgcccgcctcgtcctcccaaagtgctgggattacaggcatgagcctcggtgcctggccctcaatagttttaagatttaattttttttggttaatatttgctctttggtagatacagtaatgagagatgtttgtagttttggtaaatagaatcatgtaaaaggcatcatggggaacttgttatttccataaccctgtaataatttgttctagtaatccttcgctaatgtaggcacgtgccttctgctttactggtgtgtttgtatgctcttaaagttagacactgtaatttaaaatgctttttgaaaattaaaccaagatcttttagaattgtgcctagttattgcctagttagagtattttattatttctgttactcatcagtaaagtaagatgattggctaatcgtcctgggttctttcctcctgtaagttcagcagtccaacaagtctttactgatgtctaagcactgcggacacaaatattgctaaaccgtgtcatgaacattggccctgcctgtgaacttagtactaggtggcacagatcatagcgtggaaggtgcctgatagaatgcatgtgcacagccacacgggaggtctctttcactttggtgttcttgcagagtttgttgtaaagagaatttccaagtgaggaatttccctctctggtattccattgtcaaacttgagattacacataggccccagttgtaataaaatccaacttaattatccaacatcttgtggtctaagattcaggtgttgaagaaaatgtggcaatttaataatactcacggtactcttccacattaaaatgaatttttttttcagaattaaagtcttgaagtaaaaaaaaaaaacttagaaattctggaagtgttctgatgttttcacagagagttgtaaagtttaaagttgagcagtagtagttcaatgtctttctgtgagcaatgtcagttcatcttgatacatgtgttctagccgtggtcattcttttcttgctttatgatgatcacaatggtaacatc

SEQ ID NO: 49962 - DNA, 620 bp, Homo sapiens
aaatgccgtggaaagctggcagctggtaatacgtacagattttctttagcttcactaaaatagtcttagaaatatagggtggtaaagctgtcaggaagccccaagatatcctctatgtatgaaaatggtgtcccctgcaaaagtcaacagcctggcaagtgtagaatgcaggccttgcaccccaaagcgcacgtgtgatttagcaactactccaaggtcagctttctgacaaaagtttttaaactcagaaccagctagctttttctcaccatgaaactaggagctttagtgccgcatgtcccttatctgtcatttacctttgaccttcagaggtacactgacacaggagagaaggacaaagtgttcttgctaggtagataggcaacactttcgaagcagttgtttattctctaatagatgaatgagcttaaatagaaatgcacagttcctcttgagagagactgaatatcaagatgtctcctgtaggtaaaagatacacagattaaacctttgattctcagagccttacacagatgaaaggtgctttttaaaaaagctagcaatatatatacatcttcttctgatggcacagactttctgaggatgaagagtgttccgtt

SEQ ID NO: 49963 - DNA, 3451 bp, Homo sapiens
gggcgcaagttcccagaaataaagaaaaatgcactgcgcactgcttggagaattgaaggccttgcatttatttacctcaggccctaaccctatccgaggcagaggggaggcgagaagccgctggcggggctgcgcggtgggcgggagcctgggtggcaggcggctaggtgagttgccacttgcagcacaggccggggccgggacagacattctttatctggacagccacattctttttgcccgtcgaacccttttctgcctggcttttctgtggtctgattgtgtttcttgttttctttaacctgttcccttcctccgctcttgtgttcttggccccagcatagaatggcgtccagcaagtttgaagagcaaactgaagaggtggagggagggggaggggtttgagaggagggggaggggagacaggaaggcctgaggtctcggagtcctccgcctggggagtttcccaggaagttgcctgggaggaggcaggaaacactgactaggcagatgcagacggggttacctgggattcagattgtgggggttcccctggaattctggggtcaccctcagataaggatgcgacagaaagcagttgaatccactgtgtgtgtttgtgggggcactgacttgcttcctggatgtttaccctgctgctgctggtgggacatgggatttaaagagggggaactggcacagatgacgatggtggcatcccccaagaagctgcgccaagtggaggccgaggggcaatttcaaggtgacttctgcagagggcggggctgacctctaacctcctccagtctggaaggatgctctgcttggagtctggttgtcgccatggagggacagcttctatccagggccctaactgtagcgtgggttggggggactctttcgagagggtggggcgaggacgctggccccactgctgcggcgctttaaggggacgtgacaaattgcgcaacaggaaaagtcctgtgtatctggcagcaataaaacccagtaatatggttgtagagttcaacatgcaacaactgggggtggggtagggctgggggccgccctggtaacaggtcagtgcctgcatgtttgtgggcctgccagcagttaaaaaaaaaagtcggaagggcagagtttgagtgaggtcatcttgaggattgaacgcgttttacatgaaaatcaatcagtaaaccagggtcagtgtagagctatgatgtgaggcccgttgcgcgcaggcgcacaccaccaacacgcacagggacccccatgcaagccccccaccccaccgcagctccctcccctggggctgtgccgaagaagctttaaacagcttcccaggagggcagccagggagagggcggcagggtgaggatgacctggcccccagctctgtgagctgcgccacttgggcaggcatggaggaccccgggcagggagacccgggtccagccgggccgcgacgggaggtggctgcgcgagtgaggggcggaggccgagggttgctggagttggcgcccccgccccttgcgccctcctccggcccgggctccgcgcggcctcggctggcggcctctcctccgcccgcgctgggcgggattgtcgcaggcaaagccgggaagcccaggccggttattaattcattgggtcgtgtgccgcgaatcaagcccgactctgtgcagccaccgtgaagcccagcagggccgccggggccgggctttgtgtcggcggaggccaagttgttccccacgcctgagctcccgcctacctccctgatctgcgagccgcgccggcgagtgtcaccgccagcagccggtgggcttcccccagcgcgggggcgggggcgtcccagcttcaagacagccccagcccctaaacgcacctctctccactgtcctttcccccaagcttggtggaacagcccctccccaaccccatacctgagcgtctttcctggcggccccagagcgcacattaaatctatttagtgtagcggctcgggaccccactccaggcttcagatccggccctctggcctcctgccccttaggagccccctggccgccagcaccctcgcctggcacctaggcccgcgcggggagagcgtgtctgtctgcgctttcctctcccgggttaatattaaccggcagctcctgcgttccggaactgctccgaaagttccactggggacgatctcgccatggttgagggacttgggcggcagtcacattagagacccagagacagggagggagacagaagaagagggtcacgcacctggggcagagcctaggtggttatttaaaatgagggcggccgagcaggctccccaaacctcccgccggcctggggctcccctgccgcctcctgcaccccgcccctgccctcagcacccgagcctccgccttccccatcccttcctcccccacccttaactcctggaatcgggagaaggaaggtaggggagggatcaaccggggatacctcacagactgccagcccctacccccctcggttttaggggacctttgtggggtctgcctgataatcccggcctggctctcctcacccaacccccacttgggccgtccttccccctccttttgtgttgggaacgggaatagccactgcccaaggaaaaaagtatttgttttcgtttcgttcgtctgagggaagttgacagaaggtcagaagttcaaatgctgcctgtgcgcgcggcggcgagagtggccgggcgcggggccgctgggccctgcgtcccccggcagggcggacgggggtcggggggaggcccccgggctgggggctccggctgggacgcggaggcctagaggccaggcaggcggcggactggggatgggggcgcgtcccagggcaggccggcggagcccgcgatgcgccccggcccctgcgcgggcgcccccatctccgcgcccccgccgccggggacactacagcgagcccggcgctgctgttagctcctgcggtgcctgcgctcccgcgcgtggagcagcagagcccggcggctccagcccagcccctcgcgcactgaaaccctagccgcgggggatcgataacccgggagtaagtggggctgcaggcgtctgcctcgctgcgcggctctgtgcgcttgcagctttgcagcagggctgcaaggcccaagccctgggaaggtgtgcgagcccaggaccccttctgcggtattggcctcccgcagagcagggcagaagctgacccactctggctctgggacctcgggtatccacgcccccgccgctctctccgcagtgcctccctcctctcgggttccgagggaccctggcaaggcccctcctccgcggggagtgagggtgacgagaggatgggcgcctcgggctagccggagaactccctccagccagctgcacgcaacgggcaccccatggcccgtgcagagttaattgtggat

SEQ ID NO: 49964 - DNA, 361 bp, Homo sapiens
gtctgttaccgtcctcacccccaccacaccctaaacttctccagctggacccttgacctccattctcctccaggaagaggaagagatggggggcgggcaggtgggtggggaaggagcgggtgaaatcaccttcctatctgcccgaagagcaaacagagttaagtctggaagtgttcggcttctcgtaaccccctggaaagccacacattccacgccccggcgctgggttcctacctgagtcatcagcctgtccgctccggtgttttcttcatccttaaatatgatgtcggggttgtaattgggggtgagttccttaaatcgctcggagtttctggagatcttcccttcataccttccgctg

SEQ ID NO: 49965 - DNA, 933 bp, Homo sapiens
agtgtgcatgtgtatatgaatgtgcatgtccatgttaatgtgtgtgcatgtgtgtgagtgtgtgtgtatatatgtgtgagcatgtgtgcatttgtgtgcatgtgtgtatgcatgtgaatatgtgagtgtgcatgtttgacttgtgcaaatgtgtgtgtgcatatgagtgtgcctgtgtgagtgtgtgcatatgtgagtgtgtgtttgagtggcaggggcataagcgtggggcaatggaactagtaataatgagtagttaccatgtgttgagaatcactgccagccagccaccaagccaagcacttagcatgagtcattgtcttattcctttttcccggtcagtggagtgactgtgtgagttagtggacagtgctggactttgccttggggcaatcacttagccacgctgcccaaatttttcccataccagtaacagaggattcttgtgaggattaaatgaattaatccaggaaaaccccttagctaagagcctcacattttaagtcttcaatagctgctataattattcaattcttaaggaaaccctgaaggggttattgttatctttatttcatagttgaggaaaatgaggctcagagagactaagtaactttacccaaagccacacagctaggatgaggaggagtggggatgtgaactcagtccatgtgactgtaaagctacagtccttccatacttctctgaagaggtctatctctgcatctgtatcttcatctgtatttgtaatctctgtgtctgtatctatgtctgtaactgtacctgcatcgatctgtagctgcatctctactgtatctatctgtatctgcatctgcatctatatatatctctgtctctgtaattgtatctgcatctgcatatgtatctatctctgtatctgtatctgcatctgtatctgtatctatctctgtatct

SEQ ID NO: 49966 - DNA, 2211 bp, Homo sapiens
atctgtatcccagcttctcttcctaagcgcccaatagcagaatcgtctgcttctccttgtccctatctccctgaaacttggctaccctcggctctccccagggatgatgtctttgttgctgatcccaagagtgggtctcttcttctgtacctgcctccgtttccttgggggttaactggggcagaatcacagggaccagtccctgggtcatcaaatggtaaccgggtatcaacaacaaagcagtgtaggatgaatagtgccgagcccatgatgaagaatgtcatcaggctttcaggtgtcttctctgtgtattgggaaagtgtctggctccaggagcactgatgctttgaaggcttctatttttaggcagcctactgcctgtgaggtctaaaaccatcagcgctgagctcctggtcatctgagaccccaagtggcctgggcagtgacttctgcatgggagatctgaacacagctgtacctaggagttaggtctcctttggtccaaaggaatggggatgaaggagagagtgtattctgaatgacctcatcctgctaccaacctttagcctccaaagagaaagctgacgtctgctcatatttgcaatcatttttcctctttcttgcaaaacggccccttctgctgggagagcatttggcaggcagcccgctgcgggcttgccaaggcacggtttcatcattgagagtatttctcagtgcccagcgagggggcagtgagggattggccccttgtgagtgcctccctgggggtaattccagtacactgggtgcctcttgaggtgcctcctccagtcctgggtgaggagacgatgtcagagacgagggcacctggtgcagctctgcaaacactgcagaagcagcaaagagctggcccctgtccagtcatgaaaagggctctcagggagatcactaccaggcttgtctctgtagataagtgaaaatcacggtcatgcccactgagcagatatgccctggcacgaaatggggagggaggcagggcagggacgggaacaggaaaggccccagggccagcaccagggtggcatggcagagctctggtcctcaggagactgcagaagtctgggtcctctgtccaggaggggtgaggtagagatgcacaccgaaatggtggcattgcacaggagccaggcagctttgcaaggtcgtaatgacagtcgcgcgtggctgctgacaggaattacagtggaattcacattctgagtaatagttccaattttgtaagtgcatttctcctgcaggctggctccctctgcatgccctataaatagtgagttgttaagcatgtcactctgctctgtcgcacaggtccctactgctgacacaggcatgcagtgaagaagggtcagccacacacattcccggagctgcccagtgtcagaattcactctccattcttctctgtcactgtcaccacggcgatgacgtcgtcacagtcatctttctttttattggaggcactgtccttcccattccaggcaagggacacttccccacatctctttcttactccacccaagatgggcatcatcacccacctcagtctacacattgaagatcaggtgttctcaaagacaatgatcaattaaccccaggagtttgcagatatcagcacatatttactgagtgttgaatagttaagatagggggctaattaataagggtgccttattctcacatatttgcaattgtatatctcatcttcatttagaatctctttgggaaaaaaaattcaccatgtccatatgtagaatgttgaaagctttgggtcatatttttacttagcgaaaagaatatagaacattcttatccagtcacctgtcataggattaagaaaacatgctccaccctgctgtggctcaatttcagcagtattgattttattactcatactttataaatgagaatgctattcttaaagaatgcaaacatttgctttgttgtgctattgtctcagccctgcataaacctctcactcttaatatatgcccatcgattattattcttgtcattatttcacaacaggaggcattttaatgatgatttacagggttacatattgttggaccataaacttctgtttgcaattaaaaaaaagttaaatgcaaacttcaacttgaaaataactcttaggtttagcatgatgataaaatgcaaagggtgctgcctgccctt

SEQ ID NO: 49967 - DNA, 3555 bp, Homo sapiens
ccttgaatgcaaggctgtggcatttctggcagagatcggtggccttctggacattaatatctgcaaagcttgcctgggagctccacaggaagttctgacccatggtcacctactccattttcttagggctcatggaaagccttcagcagtatcctctgttgatagctcatcccactctctgctgaccgccaaggtgcctttcatctcttctcaatccaatgcagatttgaacattgcgcccctccatttaaaccttcagtagatccctcattttcttaagagctaactccacacttcctcctgccctctctggcccacagtagccgatgtcctccaagctccagaaccctggtgtccactgctcctctgtgggacctccggttccaacgggcccctctcctcagcactctgggggaccctcaacgccatcctctgttgatgccactgctctcacctccaccttcctagtgtcctttcccctctctcaccatcccctccatctgcctggttccttgcagcctttgaggctcagctcaggggagacacttctgtctccatggtcttctgtgcctttgcttctgtctttaccagtgataccacttgccacctcactattgctttgcaatatctccaagtgttgagtagtttgaggcccaggccacatagcctgcaaagctggaagtatttattctctgattgtttacagaaagcatttgctcgccctgatctggaaggtgaccaagtgacgagccttcagtgatccgtcgtgaacacttatctcgactgtgtgtttggtgagggcttggtggaaggtgcttgtggctgcagcctttggcgaagacacagattcctcacttattcgagggcagatctctgtgtagtagagaggtagaagcaggaggtgcagaggggccactctccatggccccaggcagacagcctcttctccttttctcttcctctctgttcatatccccagttttcctaatttgggccacatcactttctcctggcccctgccagcacatgggtagtggcaggtaggcaggcagatctcaacttttgctctaaaaagcatccctcatacacaacaatggcaccagtggggagaggtgctccaggaggcaactgattttgcaaccagaggttatttctttttttctatttccagttatcagagaaaatatggatttgctgtatagctttgatgtgtcagagcctgtaattgtgatcaatttctgtgtagcagattaactcaaaacccagcagcttaaaacaacaaatgtttaacacctcacactatttctctgagtcaggaatttggaaacagcttagctggtagttttgttctgggtctcaggagaccgcagtcaagaactctgaccagggccatgctcacccgaaggcttgaccgaggccagaaggcccacttccgagtctcactctcaggactactggggggaagcctcagctcctccctgcaggcacccacgacaggctgcctggtgcccttgataaggcagctggcttccccagagcgagggattggagagggtgaggagaaagctacagtgcttttgtgacctggttttggaagtggcccaggatgacttccatcacatctgtcggttagagggggagtcattaagtcatgcctacgctcaacgggagggtctaagcttcccctcctcaatggagaattgtttgtggacatcttttagaaccactccggaactaaataaatatgaccagcacgtgtgtttgtgtgtgtgtgtaactgtgtgtgtggagcttatatctgtgtttgtatatgtgtgtgtggtgtgttgtgtgcgcattttgtgcacctgtgttgtatgtatatgtgtgtggtttgtgtgtgtatatgtatgtgtgatgcgtgtgaatatatgcgtgtggtatgtttttgggtggtgtgtttgtgtgtgtgtattttgtgtgcatgtgtgtatatgtgtgtggtgtgtttgtacatttttgtgagtggtgtgtggatatatgtgtggtgcatttttgtgtgcattttgtgtgtatggtttgcatgtgtgtggtgtgtttgtgtgtgcattttgtgcgtgtgtgcattttgtgtgtttgtgtgtgcattttgtgtgtgtgtctgtgtgtgtattttgtgtgtgtctgtgtgtggtgtgtttgtgtgtgcattttgcatgtgtttgtagtgtgtttgtgtgtgtgtttgtgtgtgcatggtgtgtggcatgtgtgcatgtgtgtttgagtgtgcattgtgtgtagtgtgtgtgtttctgcatgcattgtgtgtgtggtgtgtgtttgtgtgtgcattgtgtgttttttttggtgcatgtgtgtgtgcgtgtgtgtgtgtgtgtgtgtgtgtgtagcactggccacgccggatactgaactatgcattgaggatgcaaacgtgatctcagaggagctggtgagatcactgggccccggggtgtacagtcatgcaccagacagcagcacgcggtggctctgagttccaagataaacacacgaggctttagaggagaaaggtcaccacggcttggcgtgttccaggaaaactttgtgggagggagtcaaaggcgccagtgaccactgactgccttgggcagggtcccgcgggagatggagtgtcactcagggctaagagtttagggtggggggccctgcagaggccagcatgggaccctccaagcccctgtgggatgtgggagcagcagggtggagggcaggagccaagtctggatggggttatcagggtcatagggcctggcaaggacggggtcatagggcctggcgagggcagcgatggatgtggggctgtgctgctgaggctgcagccaccgccacagggccgctgtgatcgtggcctccccacccccagggtcctgcctgtgtccccagtggccagccccacatagcagcctgagggcctgggtgcaggctcggggcaggagaggctgggagagcaggtctcgcccctgcagactggggtatcaccttagagggggcagcagctcccagccaggaggcggcagcaggggtgggcctcagggctttggtgaaaaccccccggaaaaggattcctggaacctgagacagtcccagaagcgttgctcaggcctccccctgccgtcctgctccatccatgggtgtggggtctgtgtcattctttatttggtgatgactttccagggatgcgttgcaataaaaatgaacctgaatgtaacaaaacatcctgaatccaggcctgaggtgggggtggaagaactcccctaactttgatctcatgctgcttatttttgtctgaggatctgagacccttgagagaaaaatttcctggtagggtgtcgtccagacctagtttccctttctcttcaaaattgtgcttcatcttgtgaaggctgcactatgctgtccgcggcacgctccacctgcctgagagaagacaaatgcccaggcggggctgagggatgctttgcttgttcaggactgaggggccacagagacgtgtggccatcggggttcagc

SEQ ID NO: 49968 - DNA, 3144 bp, Homo sapiens
gatgccatcatttcagattttcggtgttgctatttcggagttatgtgaagctgaccttcagtgaatacacagggtcacggtattcgatgagtgggacccacttgtgtgccatttgaacgtaatgtggtgggttccaaaacaggagcaacaaaaagcttctcgaagtaaagtggaagatctgggagggtgaacatttaatttctatttggtttggtagccaaacagttagaaagacatttttattcatctgggcccacagttctgcaggattctttctctcgagatcccccctgctccaaatactactaatgcatacaacctggatttatagctgcattacagcccctttcttcagtctattctcaaagaaatgccagagaagagggtgggggaatagagacaaggaactgcctccaaatgtcaagggaagacctgtgtttttcttggacggaaaagccgcatgatttaagtttcaaggacatctttgctttaccccctctctccactttgtgtgtgtgtgtgtgtacatatttcacttaaaagcaagctcttaaagagtcgggcttccaagaccctgtcttcaaatattcattcacattttatttgtttggaattttgtggcagtttggcctcaggaggttcagaacgagttctaactcttctggttataagtaagcagcagtttgtcctggatgacaatcatggacaggattgttaaggtccttgtggggaaggagctgggctaatttctctacatgaatactcactaagtactcagaagaaaaccctctaaagtaggattcgtgagtgccccattttgctgacctcaggcagaacaggggcaccagggttggaacaggggggtctgatggcagaggccccgtgcatcacgctcacgtgactgcccttgccatcaaagagcatagtccacggccagcagagtgagcgtggcctaggaaagttctacctacaaacagtgggaggaaaagtgtgctggtcaaccaggattcggtagaggatgttggctggtgaacccgtctgccccgacttcaggagcagaaatgatgtggaggacagattctttgaggatacctgaggatctggccaggccctaggggaacactgaaaacatgattttattgttccgcaggggtcagagctagaagtgttttgttttcagatgaatctggaacctaagcccattctgtaaggaattgccacttagtcctacacattgaatgcagaaaattctgatggtttaatgcctctcatttgggatatccgaaaacaattagggcttatctggattactgcagcgaaacaaaaacactccgtgatggccaagtgtggagctgggaggaacaagaggaaggagccggtgatggctttgtgactctttccccaaataacatgcccatgaatcagaggctctgggagaaggctgctggtgactcaaggccgggtaaccagcgagccctgaccgtccctccgtgcaggactcgactcgacaaggaatccagggaattgctccgacaacatcaggcccggactcttatttgttttcatgtttgagggtggatctaagccctgcaacatcatcaaaacattgttttaatgcaggtgccggtgccacacgttagagggcttgtgcctgccagcagtggaaaagtaccgccttgagtcaccgcggtgctgaaggtcactgggcctccttacgcaagccctggacccggcgcccatgaactcgctaccctgggctgcgattgttctttctttggtttccctgtgagccccagtgacaaaccaccggaacccagagtgactcacagacagtggagtgtcagagccaaaaggggccgtgtgagcttccaactcgacccacagctctgccaggagaggcagctgtgtccagaggggcagggagacctgcctagtgacctggctggttggtgacacagccaggcctaagaatggagtcttctggtgacagtttagtgtgtttgatcatgaggagagcactcagaccccacatcctcgcggttgtctgttcgtctgggactccgggcccctgcccacctcctctgcttctctcagtgacaccaggtggtttctttgcctgggatccccacacctccattctcttgagtgcttggagctatgacctgtgaggatccttagaactcaagactactggatggagaggggagtgaagggggccagcggaagcctgcaggtgcctggcaggtgggtttccccttcactgcctcaagcgatgaggtggggcttctgcgtcttcaaggataagaatccctgtggatgtcctcttgggtctgatggctttaggctgcaaagccctgaattcctcttctgaaataggcaaagatgtgggtgtgctcacgttgccttttctgagccagcccccaagcccacaagctgagccttcagctctgctaacggtgcctgccctgggccaggtgtgggggcttagtgagtaaggagcccaggaggggagaaacacagtggggagggagtcctggaccacgtccgcgacagaccaggaagggctcagccagtaaactcacctggttttggtgttggaaagaacacctggctcttgtattaaatataacgtgggtgcaggggaagcccagcggtggggagacagcggggaggcagctggtgtggcctggtaggaagcaaggatgtggctggggctggagcaccatgttgcagagaagtggatttgctgcagatgtggcctggcgcgagtgggacagggcttggatgtgagggcacgtgagagaaagtggtgagaggacatcctgtcccggcatgagcggcttgggatgagcaggcatctcctggtgcagaaggcaggggagggagagccatgtcagatgtgggtgcatagaatgggtgggctccatctcgggtagatgaagttggatgagtctaaggggtaattggttggagatattcaataggaaggtacctgggaatacacagtggggcccgggggaaagatttgggttgaaaataagtttagactgggcgcggtggctcacgcctgtaatcccagcactttgggaggccgagatgggtggatcacccgagggtcaggagtttgaaaccagcctggccaac

SEQ ID NO: 49969 - DNA, 425 bp, Homo sapiens
gccatcggctctcttgggtctccagcttgctgactgcgatctcagaacttgtcagcctccatatttttgtgaggcaattccttataataatttctttcttctctttatatatgtgttctgttggttctgcttctctaggaaaccctgactaaccgtggctgatgatcacccttgaccctcttggacagagtcccttccccagcatagttgtcagtattctggcgaatggaatgtttgccctccatgtccttgtgcaagacagagttggccagttgactttctacccttatgaagcacaggcatactttggaatattgcaggttcagttccagaccactgcaacagagcaaatgtcacaaagcaagtcacatggatgtttttggtttcccaaagcatataaaagctacatttactccatactctta

SEQ ID NO: 49970 - DNA, 910 bp, Homo sapiens
tcactgaaaactattgcagaagactgaaactgtttaaagccactttcaataaaagttcacttagcaaaacttaaatatgacagacaattcctcatggcccattccaagcacatagacgctgtccagtgacaggggccagggtattaagtgggattaagggtcttaattacactaaagatgtaaaaacgattcatggttggacattaaataggaggattggagtgacatggcactctctccatcccacgggaagaattcactggggagatcgagaaacttactggaatctctgggcttctgaactggggtgtcaggttagttagtgccatgactctcaaatcctgaaggcgcttttcaccaggcacagtgaggcagaggccaccccagcttaccgcaggagtcaccacagccaaagcctgattagtgggaatgcgatttatcagaagtccaaagtccaaactacatttttcccagctctgaaatgactaagaggctggtgctacaaaatattgtatctaaagaatacgatgcagccactctttccagctcagccttcccttctgtatgtcagggcacaagtccctcctggtcttgggtaagtcacaaagcttctcagagcctcatgtaaaattagccactccctaacattttataaggagagttgaaatcatagatggtgacccaaggaactttaagagccttcattgcagaaattaagtatatggaattgccatttttgtggtcaaagatggtcaaatatgagtgctccacaatggttcaacctaaggtatttgattttagtcactagactcctctaaaaagaaaaaaaaagtgagaatgcaggtaatttgcaaagatttttacccaaaattgaataagctctcagtctccatcagcccccactgccatt

SEQ ID NO: 49971 - DNA, 947 bp, Homo sapiens
ctgtatgatctcagggaagactgctttgatgaggtgggacttaggagctcagtaagatgaaaggcacctcaccatctttgctgcaactccaagctgtggacccattgatgacaatgtcaagcctatctttacctctgaacaatacctacaccaaaaaatctctttaaaatctttattactttcactttaaaaaacctttccctcaacatttaatctttcattagacgtgccagccagtcacttgggatgcccaggcagagctggcaggcggaggacgtgggacactggaagggccagctgtgttaggcaatcactgtaattgccaaactgtttttttccactccagcctaattttctgttgtaatttatcagttacgcaaaggttggatcagctcttggaaaaacaaccccctctctgaattagaggcattgcaagaggtgagttctaaagagaaggttcatggagcattcgacggggaggacattgcagggaagtggattcctctcagcacagggctgcctgcagagtcatcatccttcccttgccaaagccttaaaaactcatctctgctttcacttttacagcaattattaatcttctgccactcaagtttccatccttcttaaaccaccaatattttaacctgcatatcccctaagtcagttatggataaactaggacaatttaggaaacgcacacacaatacaggctattaaacatctgtacaataattaaacccaagtaagccaggcctgcatggtgcaagattgctgacatgctgggccgcctcgctcactgcttgtccccaggcgacaccctgcaagcgtgcatgtcaatcaagcagtgaaaagacagtcattgagcccttcctgggtgcccagctcacttcaggtgttgtttagaacatgagaaatgatgctcaagggtttgtcattttcgtaaggca

SEQ ID NO: 49972 - DNA, 1616 bp, Homo sapiens
catggttaatgtgctttttaatagccctgcttgaagagctcctgcctgacatcataccagagccgcatcggaggggattacacgtgtcagccccatcaattggtggcaattgccacacaaaagatctacctgaggactcaccacaggaaactatgcactatattttcctgccttgtaaaaggaagaattaaaaaacagctattaaattaattggcactaaaagcatgtaacggttatctaatctattaattttgagtttaacattaactccagtgtctgctgtgacacgcatttgacccacacaaggagccagcgcaccgttccagcctttgaagggagacgagtggttgggggaagccagagggagatgccattctttcactttgaccttgtattcgaagattgtatttgcttttagacaagtattgactttatgcaaggccggcctcgttgagcctgatgtagcatgttcctccgtaaattttaaaggactgcaggttcaagaggcagcttttaactctcagacatttgaaaaagttaaggtgatcccatcattcttcaaaggaggagaaagcattagtttctaagtaggacggaggaagaggcagagtccccatggcttttttttccccatgtttctctcatttttgtttaatcataaccacagaaaaagcactgcgactttctgtcttgcatttcaggaacaatgctcaactctagaagaaaaatcgtagcaataagactcatgcaatttgctcctacttttagaagacatgtccccaaacagtcactatttaacccatcaacagccttcagaaggacgatggtggaagattataaaactccctggaaaatatttgatggtctaaaccatgtaaaggacttcctgctgagtcactcgggtgcttgaatgaaagtagaatggcctcttggctaaggctacctgagacctgcttcctggctgttcatcaaattcgatcaagccctggcacaggtcatttcttacactgtgcagtcctgggtttctgaatttcgtaatcttgggttcatagtacaacaaaggaagttgagtgttttcatgaaataaatcttcaccaagcaattatatggctctattttaaaaaatggtctccacctgataggtacataccaaagttacaaaacacattcaggaacacaggaaagcaatctgggaggcaccttgctgcacgtttcaggaggggaaaaaacgaagatgaatttcttgttctctggaaggaggcatcggttgacctaagccgtgcagcagaaggctaaggatcaaccaagttgttctcctaaactgtccatggtggagacaagcctggcttgtgggctattctctgagaggccatctattaatcaaagaccacctatcagaaagccattcgtcctgaaatcaagtgtgtttgtgatctgcttcgcagcggcagtctctaaccgagggccacccttctatgtgaagggggtgggcggactcaaggcaggaccaccccaggtcctgtgcaagccactctcagcccagaacatcagaagctctggagcccaagctaccagaaccacaggtgtgtttccagctctgagtgacagctctgaat

SEQ ID NO: 49973 - DNA, 590 bp, Homo sapiens
gatgggatttgttttgactgcctcactcttaaacaccacacctggcccagggtgagggctctgtcctgctggctgaaggagtggagtggggtcaggttgccttggatggcacctgtgaggtgtctcacgtaagccattctcatggccagagccccagggacttaccttgggaaaagcacattcctctctctcgcttgtgttttgcatactgataaagtgagacctgtcccagccgccctgcccacctcagcagactgtaccgagggctaactcggagctgcgaaagggcctttaaatgcatggcacccaggaaataagatgtcattgctggctggaacgagtccacgatgagaacatggctctcttgcctaatcattaactaacctggaggcttctgactccactcctgcatcaaagcctttgtaacacatcccagcttttgattccaggtcaagactgcgaagccttcccaagtttatgggtaaatttcgaggcgcttaagtgcaatgtattattagcttcaatggcttaatgctctcaattccatttttaacggatacgtgtttccacatcacaaaaccacatagcaa

SEQ ID NO: 49974 - DNA, 1391 bp, Homo sapiens
atagtttctgaactgccttgtcactgagagttaaaaatcctctagcaacctaaccctttgcatctgacattattttttgtgactattcctctagtgaaataagtcactgacactttagtgtaagttactcctagtaaatcacttttacacaggttaaagggaagcacaacagaaaaactgtaaggaaggtggtgcagatatccagattttgcccaggacagcctaagcagaaagctgcttccctcacttccctccaaagtcaagaattgagagggaagatggccttccaattccagccactgatgagaataaattccggaaaaacatattaaacatagcgtttgacgcttctatccacagctggaaacattacacaaattttagtgagccctgaatgccagcagccataattcccaaattcttttttaaaataatgaactaatccaggtgaaggacctgcggcttggcgccatctggtgcctgcacagagaaagaacgttccatcgaggctgcagtgctgagtccctttgttagtccaagtggggaacactttttaaaaacacaaccgttgtctttcatcacagtaaatcctaaagtgctactaacaacaaactcaatctgaaaataaacttgaaaattatttatagtttttccaacaatgatcttattttgagagagaatacattaagttctgctaataccaaccctgggctcttacaacatagtgacttctactaactctttctatgtgcatatgtttttttaaatgataaaagcattttccacagggggatgccagtgaactttctttatcattgaagtgtacagcacaaatgagaactttttcaaacactgttcctaaggcaacaagatgctacttcctaaaagatatatttaaggggctaaatctaaagttgatttgaaaattggaaaaaaaaaatgaaaatgttgattatccaaaataattagggaaataaaactgcaaagatctcagagtagaatatttttacttctcaaaatatgggcctcgtttcctagttgtatctgcctgcaaaggaacggaactaaaaggccaaagctcagggtcaacccggcttcctcagccctggttggatacattcatctgcatgctcagaaccaagctgacacccatgaatggagatgagtcactgcgtttacaaagttgtggttaaacatagaagggtttacttcgcttgtttcatccttgcttctaatttcttcttgacttcagttcatcgtacagacagccactgagttaactcttctccaagcagtagttggcttctgggatgatgctgacccaccatcttatttcatcagttttctccatggttcaccccatattcttccacacaaactcagtatttcag

SEQ ID NO: 49975 - DNA, 558 bp, Homo sapiens
catgctcctgccacactgagctccgtcgcttgacaacctcagagctgcttactgccccaggaataacaaacctaattctttcaggacgtggcctggcccatttcccttgcttcccacgtgcaatgtgcctttctggaatgcctgtccacttggcagactcctactcatctggatgactcagcccaaagccagctcctcccaggagtgtcctcaagtccctaaacagggccagccctgcctccaccccacccccccatgctcaagcagctccttcctccattttgatcttatttcatgcctgatcaacctcattgatgtgtcctgagccctgggctgcaggctcttgagggcagagttcgcatgcttgcctggtacaaggtgctcagtaaacgctgatggaatgaatgcacaaatgcacaagcagatgagagagaaggaaagaaaacaacaagaagagatggagaccaggagaggccgtgagaagggaagaaggaagaacaggaagggaagggcacgtggcctaggacctgaagacagcaagtgggcacactgccatcc

SEQ ID NO: 49976 - DNA, 2581 bp, Homo sapiens
ctaacaagattagaagggcctcgaagtgcagagcagggctttcatgtgtggccctgctaactcccagtgccagtcttcaagatgaaatagacatattgcatcgagtgaaacggttgttatgctcgcctcaaacaagcaggacacagatgaaaaagagaatacagaagctattttcctagccatgccaaatctctccactgtgcctctcttatgtcaatttcatttcagtttgaaccccagatgttttcccaaaattaacacttttttgtttctattacattggctttcccaagaaatcattcacagggcattatttttactaataatttaaaggaaaaaattaacttgcccaaattcttgggtgggacagtaaggtttggaaaattgaaaagtgagtttgacagtttgattccttcaggctaccgatgctctctaaggggccttataattattaaagcttattcttcccccacaaaagccaccaagaacagtgtgaatcacaggcctgggaagtcagtggcagtttggggtttcctgagtccctgagggagaggagcccttcccagaacaaaccagcggggtccagagctacgtcagatgagggaaggcaacagaaactccataatgcgcgaagagtcagacaggatcaaagtaagagtgttctcttgcatccgagagacacttcccccagacccctagggaaggagagctgggaattcacactccatcccacagtcggtattcccacaggctgctgtgtgggcctctcgcagctggggacacaagttctggaggccatcgtctggctcacatcctggctcctgtacttcccatctgtataacctcaggaaggaactcggtcttgactcagtttccctctaagaaatggggacaatgaccgtgcttaaccccactgggcggctgtaagacatgcaaccatcttagaccagtgcccgacacaaagttggcactccataaacgccacatgctaatgctgccattactactgttcatgctcacattagtgcttgccattctcactgcactgtataggctcacccagcctcatcgggacctttggcaccagcaggaggttccacgcagacaatgccaggcacagctgcaggcagcacccacactggagcggcccatggggctttttctatgaagattctgctgcccagacctggagaggccggagaagccgaaccccaccaagaacgctgttttcacaaaagccgtttgccttcacactgggtggcagcacatgacactaactcattcaaggtcagagcgaccagactctcaacccttattttcgtttgcttgttcggcttttttttttttttttttgcattccattttgttgacatttctgttggacatgaccttaggttgactatcatttcagtcactcacgacactgagcgtctaaagtccacagtccttttttaaaccgtttctactcattcacttgccttacaactccacagcccgccccagggctctccaaccaaaacccttcctggccccctccatcctaacaaagcctgagtcgaacacgaaaggaagatggtcgctgaagcgaaggggagtcatttgtgtccgttccataaatcaagactgtcgcctttcgaaaaggggaggtgtcgcagtctgacagcctgatctgtttctaggacggcgtgtttccaggaaattctgagcacatatatatgcagggagcagtcatcgttttcctcctgtccagccttctgcctcctgctcctcctctagctgcctcccttgtttccaggctggaggttcaatccctcttcaccatccctgctgagggaggctgtgtagcaggctgtgtacgggaggcatgtgagagaggctatgtatgggaggttcatgagggagactgtgtgagggaggctgggtgaaggaggctgtcatggaggctgtgtgagggaggctgtctgggaggcatatgagggaggctgtgtgggaggctgtttgggaggctttgtggtaggctgtgtgagggaagctgcatcagggaggctatgttggggaggctgtgtcggggaggctgtgagggaagctgtgtgagggagactatgtgaaggaggctgtcatgaaggttgtgtgagggaggctgtgtgagggaggcatgtgagggaggctgtgtgggaggctttctggtaggctgtgtgagggaagctgcatcagggaggctgtgctggggaggctgtgagggaggctgtgtgagggagactatgtgaaggaggctgtcatgtaggttgtgtgagggaggctgtgtgaggcaggctgtttcaggggggctgtcagggaggctgtgtgagggaggctgtgtgggaggctgtgaaggaggctgtgtgagggacgcatgtgagggaagcccgtgagggaggctgtgtgaggtaggctatgagggaggctgtgtgagggaggctgtgtgagggaggctgtgaaggaggctgtgtgaggtaggctatgtgaaggaggcatgtgagagaggctgtgtaccagaggcccatgagggaggccatgtgggagactttgtgagggaagcccg

SEQ ID NO: 49977 - DNA, 1543 bp, Homo sapiens
gataccatagtcactcactcactcactcactcactcactcactcaagagaggtcagggatcaacaagcaaataattttgaaaaattctgagcttaaccaaattatacaggtttctctatttcaggacatttaaagacattgtgattctccaagaggaagataaaatgtttggcgtttcccaagtctatctgatcatgagactctttttccacgaaacatcttacaggctaatgttgcaaagaagacatttgggaaccactcctcagatctgctcctttacattgagagtgaggaaatagggaccagggataatcggcggtcccaggattgaaactcaggtctccaccttccccctcatcctccatgaatagtccaccttcctgagtccatttggctcccctctactttgtaattagctcagccatgcttggcatagcccctttcaggctacaatccagtgccacacatgtactcagtaagtaagaaaactcttcttttcattttcaaataatgaaaacagctcatgttcgctgggcatctactatgtgccaggcactatactaaacatttcacccacattatctcatttaatgatctcaacaagctacgagaggggccctattgttatccccatttcccatttgaggaaatggagccttaagattgctgggcagttagaaagctgtggacaatactcaaacccaatccaagcactcagtccccacacacaaatgtgcggctgtctctcccacttagtgctcagtaaatgttaatgatgacagatggtgagtgacacaggataaaataacaggaagaggtgttgcaaaacagggaaaagattggccacagcttagagactgtcttggttttccatttaagtgtgctgttgggccgagctaatcattaaaagaccttggtcttatcctgaatcttgcatttctacctggccgggctgctcttcctctgaaactctgccagtgggagggttccacagagactttggtctcctgtccttaatgcctctgatttttaaactgaggtcaaattcttcaaggaagtaaagattgcaaaatatttcccagaagaacggtgatgacagaagccaggtgccttatgccacattttgtcattaaaaagccttaggtttttcttttaaggatgacactaatcaaaattacttatgagattggagttcctctcccattctttgctcactattcaaaaatgaaaagaagggctttctcacttactgagcaatacttatgagctgtaactagcacatactcatatcagcatggagactttctgggacataaaaagtgcatatggaactacctcttgccttttgggggctgatagttcatttgcagagatacgacaccctgaacatttaaaaaatgcagaatttgaggtgtgccagatttcataaggtaaacttttatggtaaatgtcacatttctgagttaaagtgaagaacttgtgttcaagttggggagaccattgtgggctagtgtgattggaggctttctcttgatggaagcaa

SEQ ID NO: 49978 - DNA, 642 bp, Homo sapiens
ctcaaggcgtcctcggttaacactaacagttacctgtaggcacagacccaggcaaccacagaactccagcacagcacacagaaggcgcttccgtggctcccacacacctgaaggtcagctaggggtcagccgatctaggctgggttcagctagagcagctcacctctgctcctccagtctcttcctgggaagagtgggctatcctgggccaggtcccaactcaaaggaagtgggctatcctgggcaagtccccaacacaaaggaagaagtgcaagaggctgggggaaaaaaggcctctgagttctaggcttatgccccgttccatacgtcaatgcaactcacacatctgaatccaaagtccagggcaggaaaatgcaaagcaccccttcagcaggtggagctgcagagtcacatgtgtgaagtcatgtgaataacccgaagtctaaggaggagtaaaggagggaacaggaaggcaatctaccactccacactgggagaaaagtgaacggaaatgcagagaccccatctgcatttccattgttccttgcacagtaaacgctccaaccaacccaactaccagaacccacttatttgatttaatttaataagtatttgttttgactctgtctgaccaagccttgg

SEQ ID NO: 49979 - DNA, 723 bp, Homo sapiens
ccccttgaaggtgttgtggaatcattattagatcagaagatgagtcgacttcgtgctgatcataatctacaaccttgtccaatttacttactttcttctcaatttactcttctacaaaggaagggcgatgagccaagtcatcttaattgttcccaaggggatttttattctgttacatattttcctcctatctgtattacaggagggcgagcactcactacgtccttgcttattggggttttttcctctttaatatcttacaactaaggcacactggaaggtaggaaaagccctggtccatgccaggggagctctcccaggctcccagccccccaacaacatctacagaattctagagataagaggcacctaagcgagtctttatctaccctccccagtgagcaaacaggaaagctgtcaagaatttcagaacgcccagttctgcacagcccattgtttgaaactgaactctggaccaaagtgcttacagtgaagcccaacatttatgacatgatcttagcagggtcagatggctctgagaatggttttagctggtgattcttttcctactaaagaaaatagtatatctggaaaattctgtttttggttaattcctaaataaacagaacactaggaagtaattactcttggcataaatctagtgtttagaattttaggatttcttcccacaaaatgtcaaagttggacttaacacatgtcaca

SEQ ID NO: 49980 - DNA, 2758 bp, Homo sapiens
gccttgacttctaaaaggtcacactgtgcgacactgctctaaatctttgtctgatctcacaacaaggtgagtttccttaacgctgccacgaatcaggtaaaaggcacgccaaggtgaaagttaaataagaaacgatctcaaatagcattttttaaaaggcaaacatcaaccttgtaagtattaaaagcacgttctaaaatccactctgatgacagttgaagaaagccgcctttatgtgcacggagtcccggctctgcgcggtcttttaaatgcgagtgtttacctaaggctgcaggccaggaccaggctctggccttgaggaggtgcctttgggttgcacacagtgaacccgatctttaactcataaatcgctctacacctttgtctcccccgagaaaggcagaggtctgctctctcacaagaacgtacaagcctctttaaagtcaggtggctttttactccgcgtctccatgcttgttgatttagagtctctgagtgacaatgcacatcactggcttttttttttttttagctctgtcatctgtgctactgagtgtactttgcctcagatcaaagttgaaagcttctagaaagatacacaaaccacaatgtgacaaatagcatgctgtgtttgacacagcaaacaataaattactttcatcaatccagataaagaatcccatgttttcaatgctaattctgatgtctgaaatgatagaactttactacactctcaaagaatgaggagctttaaataatgaggaaaagacacaaaactcacataccagaagttctgaaattgccattgttcaaaaacctgtggtttcaacttgctaaatttaaactctgcaaaacttaaatggaatggtctatattcaaataaaaaatgttcatttgtctctattttcttagtttaaaaacaatttttctgtggtatatctgtacccaaccagactgtatcaaaagaaggtttcaatattatttaacaattctacaacagcctatttctttcccatgttaacttttgccacaaggtgcccattaataaggaatggcattgaataaagttgccacataatcactcattagacccaggtggtacgtctcatcggccatagtctgggccaaagaacaaaggacactgcgtttcctgagcactgctgcccactaggccctggcaaagggtctcacaggttacctaatttaatccctccacaatcccccgaggcggatattatcactctcattttccaaatgagggactgaagctcaaaataagtgcaataagttgcccaagaccatacgcacccagtgacagagccgagctctgcacctgtccttttacttgtaaaacccaaactgtatgggaacagttccttccaatgaatgagttactctaacacttaaaaacggatgccttcaccttttctttcagaacccttcctgaatccgggagaaaccctcctgttatttcacctgttacaaagtagtttaatgtacttctaccaccggatattatgaattccacaacatccttcggctgcccactccgggtgggtactgggccgcgtggtgaggacaaacagttaagaaaacaggaaaacaatattttggatcccaggagaactgtgttttccacttataaaaagtatatacatatatgcactttatatatatatatatacacacacacacacacacacatgcactatatatatacacacacacacatatgcactttatatacacacacacacacacacacacacacacccctatatgtttggattcagacgtcccgccagaacctgaaagttcaactgtggccagccgtcacccctccacagtctcagcgggctccacccgcacgtgtcagcgcccgcgacccgggatcctccagaaccacaatttgggagtgggccggtttagggtcagcaaaaacgctgggctgaatgtatcatcacagaacccaggagggaaccagcaaagcggcgttggcgccccggtctttcctgcgttggcgctggccgcggggcccagcacccgggacgttggcggcggcagaagggaaggccccggccgccctgctccgctccgctacagctgcaggcctctgcggtgacgggtgggggcaaaaaccctgcagaaaagtcaccgtcacacgcagagtccaaaactcccctttccccgctggaaccactttctccaaggagctccgccccgcgctctccccgaccccgtgcgcccccagacctcgcgtcccccgcgctctcccccgccgcgccctcctgccccgcgcccctcctcgccccgaccccgcgcccctgcgcccgggctccagcccggtccctgccgcctcccgcgccccgcgccccgctcctgcccgcggcccgtcccctccctgcagcgcagcgctctgggttcgggtctctgccctctccacccgcctttcccgcgagtcttcttggcttccgtgtccccctccccagccgggcgtcacccccgcaccccgcatctgcgcccccctcccgctaacccgcggcctccgcaagggcagcgcgctcagccgggtgaacctggaactgtgttcctggcccagcgctttcataaaagggcgcggaatagtaagtcctagttcaaggaataaacacggatccccactggccatgccgggactgacgcaggaaaagacgcgaataaaagcattcattaaaatatgccacgaccaaaccacggagagagttacaataaaacagaa

SEQ ID NO: 49981 - DNA, 2029 bp, Homo sapiens
gtggccttctcgagtcttcccgagcaggtctgtgcagcgaggaaacatccgaggctggagtgagccacgcggaggaggaagaacagcccgagctcacaggggcggggaagagttctagctcgcgacagcccctgggaggaaccctgcactatttgtggcgtcgagtaaagcaccggaaggctctgctcaggagcgtgaacgacaccgcccgctgcaagcctggaaaggaacgcgttgcctcaattcactccgatgtgtcacacacgcggctcagtcacctagggagcaggaaaaggccagcgggccacgcagggctcacccgggcctgcatccaaacgcaaacggccaggcccacgaagcaggaaacacaacccgcaacgagaagcaaagggatccacagagaagggccaggagtcacggacgacgccaggcagtcggcgcctgcgcttccgcgagccaagacgcctgagcggcgcggggggatcgggggatcccccagaaaactgccctcgactaacagcgcagcgaaggggcggtgcgctcgagaccctggaacgggaacgaccacagccaccgcagggaaacaaccggggcccaggcccaggtgggcgggcggctgaggagcgtggctgcgcccacaaagccgccgggggctgcggactacagcgaagccggcgcggggctcggccctcactacacgaggcctgggcgcctgcacgcccccgtgcttcagcccgcggctcccgaacacccccgccaggcgatccccaaaaacgcccgctgcgcgagcctcgacgggaacgcacctgcgtctagacgctgacgccgtgcgcggggcgggggccggcgagcatgcgcagtgtggtgtggacagggcgtggttggcaagcatgcgcaatgtgggccgggcggggctggcgagcatgcgcagtatggggcggggcggggcagggctggtgagcaagcccgcggggagcgagcgcggaggcgggcgttgctacggcaacggtgggcggccagggagttgcctgagggaaaaggggcagacgtccctgggttccggtgttcgcggaggagtcgaggcacggagaggcttcgggggagggacggaaagaagggtggcccgccaggcgggcggggtccatggattcggggtgagggccgtccgcggcctcgctttcgcctcctccgagccgggccggcgatggccgcagctgtgaggcgaggtcgggtcccgtagcggcgcgcagcctccttgggggactcggggtcctggttagtttccacagctccttctatctgaggggtacgaatttacggctgcctaaagccttagaacagtgatcccacgtcggtaattttagaacccggtaggaccggctgccatcaggggccccaggtgcagggtggtgtcagctttgagaggaattggagcctcgtcaccgcgcgcttcctgcatgagtggaacctcagaaaacggtcagcggggttcagaaggcaggagataacaccaagaccctacgtaggattgcatctttacgtcgtaggcttggtctcgtgtatttttattgagcgtgtttaattagctgaggttactcgctttggcaccccagtgatcgtttttgccaccaagctctgcctcttgagcgtttaatactgggatttacaaagcaacgggttcctgttaatcttagctttcaatactgggcaagggttacgtttctaaccctaccagtgccgcaggctcattatatattgaaggactcacctggtatttggttttctcatttataaagtggagttggagtaggtacttgaagggttttcaatacctttaaattctgaattttaaactctaaaacttaatgataccgtaggactttaagagagtataggttttaaaagctcttaccttgatattaatgacagtggtctactgtgtagaaacttgagattaaattgcagactgcagctatgaccggaccatttttagtgtgatgcaaactgtatcttctgcaggttataggca

SEQ ID NO: 49982 - DNA, 609 bp, Homo sapiens
aaaaagtcaaattagcctcagactacaaaatgtttctgaatagaactcttccgtcttactttaattattcaaatttgaaatactttgtccctactacttgtagcaactaagttcttcagacttcaaacaagctccctgaagtacagttagcacaatccaagttactcattagcaatacgttttctttagaggaaaaagagtcctttcaggagccttctatagctagttaacaagctctgcagttctccgcatttacagtgaatggacgccatccaaattaaacagggtacatccctttcccactcactcagcattttgaaaatcttccagtttgtgtttacgcaacttacaaacaaatacctatcactgcaaatgaaccattcagaatgactattaaataaagcagtctgtcagggaaggcaaacgagaggccacagtcacctaagattctaccttacctttgtcatagttgtgtcatctttcttgggagtaaagtttccaaaaaatcgaaggctatagaagccgacaacagaggacaccataagatagctgtgagaatcaaggaaaaaaactctccaacagaatgcaagtttcctaagttctcggcag

SEQ ID NO: 49983 - DNA, 734 bp, Homo sapiens
aggcctgaactatcaaacattatgagacattagttagtaatttaatcatcatataaaagggtttgaagtttagttatctattaaacaaatacctatttttttacaacctatactgttctaaaacagatcctatttcaaaaaataaaataaaagctgaatatgtcaataccaatgtaatttttcatgtcactttgctgttagatataaaaagtaatcctacacaagttctcctgatgtttcatcatcagctttaacatagttggtgcatttaagcacctaataataactgctatttaaaatgtgtcttgggtactttaccaaccttttaggtgaggctactaaatccctcagcaaccctggtagacaggtactgttagactcattttataaatgtggacacaatgaaatatgccctaagtcacagtcagtaagaagagtgaagattgaagtccaggtattctgaattccaaagttcacattttttgccactgttatgcaaataaagagacaatctagcctttaagtatagaaatttatcatttttcaatactgagaggcaaagatgaacatactatatagggttcaattcaaagtataccattacagtgtatatggaaactgagtgatgtttttaaaaaaagctgttacttaacagtaacagatactataaagccataatttagtgccctcctagatccaactgtattaagaacagtgacaaaattaatgtcatt

SEQ ID NO: 49984 - DNA, 2351 bp, Homo sapiens
ttcacctcaaaccaagtgtgactgaatcgtagacaacttaggagaggcgtaaatataaacataaaaaattgacatattttacaacagttatgaaaacacagataaacccaattacaatacattctagagcatcatgaaaagataaaaacatcaaagtagactttccaaggtcaagtccgcttcctgactcctgccaacagcacacatggaacatgggccaaaaaagaagctgcttccctaagaagttgcttccatagcaaaatggacttttgctgaggtcctcactcccaaaaataaccaatattctcatcccaaacggtaaggtttcgaactcaacccacgtgggggctgggggagatgaaagagggatggaaacgtgaggcgccaggagggcaggaggtgttgaccgggacaaggtaaccggccgggtccaaacgcgagaggcgggcgggctccgcgcagcccggcccttcccggacccgccgggcccacccaggctctccgggacgcctgcgcatccacctgcctacctggcctggcggcggagcgcgggggcgcgcactggcggggccgccgtccacaccccgaggcgcgagccgcacacccgcccagagaggaagcccctggggtcccagagcgcggcgcgcaccgcagccctccccgcgggaagggaagggcagcaccgaggccgcggggcgggggcggggtcggggctcgaacggagggagcgcgagggggcaggggaggcaagagcggagcgggggggcaggcagaggaagcgaaggggaggggaggggagaggagaggtggggagggaaggggaggggaggggagaggaggggtggggagggagagcggcagaggccggggcgggaggcgcgaggcgaggcccggaggtgaggggtccggggaccgggggcccgggggcggggacggagggcccgggcgggcacgcgggactgtcagggctgcctcggtccccacgcaccgtggactcccgcacttggctgtggaagtgctgctcccgcgccgacacctcgtcctgcccttccatcctccttcatgcccgccgccgcgccgcccgcgtccgcgtgctccgccacaccatcgtccgcccgccgcaggggctcggacagccgcgccggggaccggagccggcacgggcccgcgagccgtgttggaacaggtaccgcgaccacgacaccggccgtcgcctcagcagcctcagacgagcagctctgactaagggagggcgggcgccgcgcagtcgggggcggggcgggggcggggcagggaggggagggggcggtgcaggcatacgtcagacgaaaggcgccgatgcgtcagaaaagcgcgcctcgcggtcttccgagctgctgggccgggaggcgctgagggggcggggccttgaggtcgcggggcggggctccgcccacgctctcaggggctaccccagttaaggaggcgctgtcctggcgtcggatggggacggggaacgcggcgagggcgctgcgacctctgcccacctggcccggccgcagtctcggagttcctgttcctcacaggagctaattatttatgacagctgcatggttcccctcccccagttactcagtgcttggcactcggcaccccttactcagcactcagtaccgcactcggcctcaggggacctgggcagagggaagcagggagtctcccgcggaaactcttgctctgccaaagtaggttgaaaggtcggaaatcggtggtttggggccgggctttgggcggaaacccagcttctctgggtctgagaagggtcttgggctgccccacctggaaaacgcagataaccgagctcgctagacccttgccaagtccttccggtagctcggtcactagggtcagttttatgactctcagtggaccctaaacagcacgtaatatatgtatttttcaccgccaaatatatcaaacacaataattcaccctccgttccctattatctttctttttgttataaaatttgaatttaagggaatgtttataattttaccttaggatttatttggctacgaggaagtcatttaaattgctagtggctgcgatttttgtttttggcatctttgagaattcttaggaagtgtgaaaatctacaaattgctttcaaatgtcatttagtttttgtttttgttttttttttttttgagacagagtttcactcttgtcgcccaggctggagtgcaatggcgatctctgctcacaacaacctctgcctcttgggttcaagtgattctcctgcctcagcctcccgagtagctgggattacaggcgcccgccaccacgcccagctaatttttgtattttta

SEQ ID NO: 49985 - DNA, 1666 bp, Homo sapiens
ttcggctcactgcaacctccgcctccgtggttcaagcgattctcctgcctcagcctccgagtagctgggattacaggcgcgtgcccccacgctcagctaatttttgtaggggggtgggtgggtttcaccaggttggccaggctggtctcgaactcctgacttcaggtgatccacccgtctcggcctcccaaagtgctgggattacaggcgtgagccaccgcgcccggccggatttcccttttaaatgtgaaggcacctccatgctcatcgcgagcctgacgtccacgcggcgcccacccgcgggcgcgcctgccccgggcgccacctgcccggctgcccccgcacccggctccgcgcagctctgcacgctgtcgccctccggccagcagggggcgccgcccgcccgccccgcgcagccgcctcttccccggaagtcccgcctcggccggaagtcgtgcgtccacgcgtttcgaaagatggcggcgtccaggagcgcgggagaggccggcccgggcggctcccagggacgcgtggtccgcatgaagcgcagaggcgggcgcgggccgcgccgcggtcctgctggcggtggggagaaggccctgaagaggctgaagctagcggtggaggagttcgtgcacgcgacttcggaaggcgaggctcccgggggttgcgaggggcgcggcgccccggtgagctttcgcccgggagggagaaaaagccgtaaggaactgaggaaggagaagcggcacctgcggaaagcacgccggctgcagaggacggcgggccccgaacagggtcccggcctgggaggccgaagcggagccgaagaagccagcggtcaccggcaggacacggaggagcgcgcccgcccagcccctagtcgggacccctcgcctcccaggaagccgcggccgtcccgggtcaaggccaaggccacggccgccaccgcaaagaccagaccctccgcagccgccaccgccgctgcccggaaacgggcgcttttagcggcgaacgaggaggaggaccgagagatccgaaagctggagcgttgcctcggtttgaacaagcgcaaaaagaaggacggcagcagctccgtgccgctgagctttgcacgcgacggtcttgactatattctgggagccctggagtctgggaaaaatagcggcttgtacgacagcagtggtgaggaggaggaagatgccggacagacactccccgaaagtgacttagagagtgactcccaggacgaaagtgaggaggaggaggagggagacgtagaaaaggaaaagaaggcgcaggaagcagaagcgcagagcgaggacgacgacgaggatacagaagaggaacagggggaagaaaaggaaaagggagcgcaggagaaaaggagggggaagagagtccgttttgcagaagatgaagaaaagagtgaaaattcctcggaggacggtgacataacggataaggtatcgtgtgaacactctctaggccctctgggatttccttcaaaataacgggacagggaatggggcgtgaggcagaaatgacacagacttggtgtcttgataatggtttcagctgaatgtgagtaaatcgagtacgttactctattcggtcttctttcatgtttttaaattttcataatgtaaagtttaggagaaaagcaata

SEQ ID NO: 49986 - DNA, 2137 bp, Homo sapiens
caaagccccatggtaagtccaggagcaaatatttttgcatacacaggtatgtgtacatgatacatatttatatgtattgatgctgtatctatagatgcatatgtgtgctatgtatgaggcaaatctgcgcatgtctgtgtacatggtaaatatttacgtccgtctgtgcgtgtcatagacatagaacaggtgggatgtaaacagacgggctgggcctagctgctcctttcccgcctcactcgagtctggcaccagattggccgctcccagcccgctccgggtgccggcccctgcaccccaccctgcaccccgcaccctgccctgcaccccatcccggcccgtgcctcgcactccacctttcccgcaccctgccccgcacccaacacctcccgcgcccctcgccgcgctcccccagcacgcaccaggccccgcccactccgccgcgtgcccagcccgcgtcaccgccgtcctccccaggctccagcgcgccttgcggggccgcgcacgctagcggaaccgccgggaagagcgccgtgccgtcaatggcggaggcgcgcacgtctgcagggccgcgcacgtctgcagggccgcgcacgtctgcagggccgcgcacgtctgcagggccgcgcacgtctgcagggccgcgcacgtctgcagggccgcgcacgtctgcagggccgcgcacgcactgacggctgaccgccatcttccctcccgaggcggcagttccaggtgcaagcgccgggtttgctgcccgctgggcgcccctgcagcggcccgagctgtggccggcgtggatgaggggcaggcgaggcagggccgcccctccagtattgccgcccctcccgccccagggcagggctgggagggtacagcccgggggcgggctcgggtcgcctcccggccgccgcgtcctcgctgccccgggccgggcgggcgggcgccgagagcctcccagcccgccccgtgccccgcccgcccggctgcttccgcggcggcgctgcccgcacatgggctaggctgccaggatgttcagcttcgaaggcgacttcaagacgcggcccaaggtgtcccttggcggcgcgagcaggaaggtgagggccgggctggcggggcgccctcggctcggggcctgcgcggccggggctcggggctgggactcggggctggactcggggctggactcggggccgagacttggggctggattcggggcctccctggcggggactcggggcttcctcgccggatctcggggccgctccggccgggactcggggttggactcggagccgagacttggggccaggactctggctggggcttaggactggactcggggcctccctggctggaactcgaggccgcgcccgtgggggccttgcctgtccactgcgcttcgggacccgggcgcgctggccgtggctcccttccatgcaggaggccggtgaaccctggcacgctttgtgccacccaaggtgaacttaccctttctgggtgtttcctttcagaaatgcgctttccatgctcgctcccgcatggcatcagggagtggctgcttttcgaatgccacctgaagggcgttttcggttgtagaaggtgaacggcacgcatttgctgatgtcgataatctctaaagtagaggcagaacgtctcatgaatagccacgtgtttgaatccaagacgagggcaattatttgccaccagcctcctggaaactgtggagagactccggacttacatctgttgtgatcgacattaagttgttcgcatggtaattgtttaggataagggtaggcaaaccatgacgcctctgttctagtctagaatttctagctgtctgtccctgaagacgggcatcagttggttcactggaaccgctaagtcgttgaacactgtgtggtcttgttcccgcccctcccttcccaccccttcccatcatttctgaaatgttctttaaaatgcttcacctagtttttcttgtctatcagtatattctgtatatcacaaccaccaggtaggcacataacgcagagtgggtgctggcaggccaaggaggaactgctgttattaagattgtgctgtggggctgtgtttggtggtttctgaggttagaagggaacctgggtaaagagtt

SEQ ID NO: 49987 - DNA, 414 bp, Homo sapiens
attcttgttcacaaagcatcaagtcctatttccttaaaacatttgtttcttgcttttttttttaacctattatcatactttgaggattttgagatccttacgttttgtattcccaggtagttgaactaaaattcggtgggaaagacatccctgtcaccagcgccaaccggattgcgtacatccacttggtggcagactacaggctgaacaggcagatccgccagcactgcctggctttccgccagggccttgccaatgtcgtcagcctcgagtggctccgaatgtttgatcagcaagaaattcaggtaccctacctgctgactttctgggacacgcttgtcacaggaaatgaacaggctttcttaaaatttacctcaaatgttattatttgaacttttttccttaggtattaat

SEQ ID NO: 49988 - DNA, 2796 bp, Homo sapiens
gataggagctcccaccaccagcctcgtcttccctgaccctggagtgggcaaaagcaaacatagaggctcgaagggtgtcacaggagggaaccatagccagccaactggggctgcctagagaggcaaatacggcagaagtcactgggtttttctttctgcacgatccagaataaagaaaggcacacctgttgtgctcattaaggtgatcttatgtcatggaagcagcctggtgtcagtcttgaatttatcgtggagggtgttcacatactgagtcacccaaagaattcaattgctggcaatgtttcttagatttgtggatagcacaaggtccatgcgtctccttgaactgccaggattgcagacagaagtccgcctccacgatgggtgctccacgccttcacagctcaggacccgcatgtgaactggccagcgtcactccacgtacgcaccgtgctaggtaatgggatggcgccgatggactgatgagtttgaggtgatgactgaatggatgctgtcgtgcttgcatccacagacttgacaggaccagagctgttagagctcattcaagtgtgaggggggtagtctttcttaaaatggtatcgtgttcatggtcatcagctccctgtggctgctgtagcaaattaccacaaatcaggtggcttaaagcagcagcatttctctcctccagggatcaggaggcctcacagcctcagggaggaaccctttgtctcctccagcttctggtatctggtgtcttctccccctgtctccagtgtcctgcctttttcctatagacacccctgtaatccaggatgacttcatctcaagatcctcaattacatctgcaaagactttttccaaataaggccatgtatgtacacatgtcctggagtcaggacgtggcctgtttctttgggcagccccattctggctgtgttgatttaagtgtggtaggtagacccgtggggatttcgaaacgtgttctggttgtacttggctgttgcccacgcagacgcaaacaagcctttcctttgactcagtaaaacgagcggtgcatgagatcagtgttcccggcccttcctgaaggccattgtgtctctaggggttggggcttagcagtctgtattttttatagtgtcctggataatccttcacaggtgatttctggaaaacaattagacagtctcaaaaaatcctttcaatgttaaaaacttctaggttgggagttgcagggcattccagctgatttgcctggagttcatttctggtgctccagggagtcctgatacccgcagcacctgggccggaacctccagctgtacgtgccatccaggctccatggaggatggtctgtggcacagctgccgactgctcggctgtggcctggcccacagcccttcgagcctctacgtttgcttttgcccagtcgggggtcagggaagatgaggctggtgctgggagctcctatctgaaccgtaaaactggtgtcaagagatcttcagctcagtattttgaacataaaataaggccctcagttataagctaatgatgggttctagaggctaattgcagcccggagccagacgtgagactccagtccggactgcgttctatgttcccgacacgcgggctgtccctaggcacctggccctcctcaggtcagcctggccttctcccactcaacacctaccactgcatcacagaccctcccaacaacacctgaggccttcctgccgctttctctgcccctccctgtcccaagccattggcttagaattgcagcaaagtgtcctccgtcctcagttcctgcccactgccaaagtgaccctgacctcaagtcagttcatgacactctgggcaagaccttccagtgtgtccccagctcagggagagctgagaccctgtcattcgcccctggtgccatcagaccgcgcccctccccggcttggggccctgggatgtgtgctgtgctgtggcgcatggctgatctcgtgttgtacagcagtttattgcccagtgccacctcccctgccacaccctatttaaaacacagcccccctgacctcagcacatccatcctctcttattggtatctttctctagagtgctgattttcatctaatacaccatgtacttcactcacctattacttcctttctcccccaccatgtaagtttcatggagggtgggaggttagtaaactgctgtttaccaagcatgtagaataacgccttgcacacagcagatgctcagtaaatactggttgagtgcatggatttgctacatctatggagaacagtcttgctaactaaggtaaatttcaagttagcccctgtatggttcctaccctcaattcttggacccccatttttctcacgagagcctccctgcggctgccagccggccctagctcagggtaggagtgggcgcccggtgcaggccgcccaggcaccgcctttctggtggtcccactgcgggcagctgcccacgtgtccagcaagtgcctgcctggcctgctccagaccccgggtcggcttcgtggtcctgggcagtgcgtgggctccatctggtggtcaggagtgggcactgcgtgtggaagggcgcccggcgctctggaaggtgatcttcacccgggtgcctgcccccgcaaccagagtcagcaggcttgcactgcttgtgtctcctcatcaggaagtggctaataaaatagcaatataaagctgaccttttaagagaaatgttaaagtttttgagatggagtttccctcttgttgcccaggctggagtgcggtggtg

SEQ ID NO: 49989 - DNA, 2410 bp, Homo sapiens
cgtgagccaccgcacccagttgagatttttatttcttaaaggaaaggataaggtgggccaggactaagacaacacagtagcaaacatctggctgaatgctggagaggaagacagtgggagatccaggccaggctccatggacgaactgcttgttggctccttaggctttgggtctgcgggaccctttcgctactgggaatgggagcctgtctgactgcactgggtctgagactccctgctcctgctggtcaccatctacacgcatgtggtgttggtctccagggttagaaccagaacccctgaggacgcgggaaaggctaggaagcctggggatgacctaaagtccagctatcaaaatgcgccgcgttttcagaaaaactactgccacgatttaacctaaaaagcttcatctgtattttctgccacagtttgcttccgtttccttcagtcactattccctggcgaagtctccacgcgctcccgttcgccggggaacttagggtatccgggcttccctaaattgacaagcgggggccggcgccttcgcccgccttcgctggccgccgcttggtttgttcttcttctccttcggggacttctccgcccgcgcccgcgcccgcgccccagctttcgtcccgctgtgcggagatgccacccagctccaccgcaggaccgcggagcgagaggcggcagacgcgctccgggggccgccggtcaagaggaagatgaagggcgcgacgacttcgcggtttccagaatgggctccttctggcccaacaataagtgccatttggaatcttctcggccttctctgtgccttccgcgcgtctgggctccccggtaccgtagacccggccccgagctccgccccctcgccctgggcttccccgccccctcgcccccagtctcctgggctcttcggggcggcggaagagccgagaaccttcgcgaaggtggggcgggcgcccccgaggttgggcccgcggtatgggcagtggaaactgcgcatgcgcggcgtcagggtcgggcggaagttgacgccgccgtgccgccgccgcgtgacgcatttcctgtttgttgttggagaaaggagagaaaggaaagcgcgaggagccgccgccaccaccagcgcagcagtcctggagctgtgaggagattcgggccgtcaccctgcctcccctgcgtcccgccaccggccgcttctgtcctcggtgagggtctgttccgagggtcgggggaggtcgcctagggccccgcgcgcgcccggcagacggcggacctcacccggcgcctggcaacagcgcggggggtgaccggggtcgccggccggggaaaggactggacggggcgggggccgtggccggggttgcggggcgaagggtgggcggggtcctctgggtcaggtctggggccggggccggggctggggtctggggccgcccggccgcgtcctccccgcccggcgtccttgccggaacgcggcccagcctccgcggcggcggttgggggtggggcccggcctgggagcggccggctggggctcggctggggctcggcggggccggcagcgtgggaggcgtggagcgccttctttttctaaggctcccgcactcgcgtctgaaaccagaaacgggagtggcttgcggagcaggaatgccgcagccgtgccgccaagttcggagggagaagaagcaggtgggggaccgcaaagccctgtttctagaactccggacggattgttcagaagtttgtggaagagcaggctgcctttctcactcagaatgtttgtctgctttgctttgcgttaaagaatctgcaccgtagttgatgcaactgaagtttatataagaagtttacattaactcttacctaaggaaggtcagtgacacacgcagtgtaaactgcaaatcatatattggctcgagaaaggttttggcactagcgaattttttaaaggatgggtttgctagtcagacgtaaacttctgtgctaacttctcacgtaaacggggcaggaaacagcgcaagtagaacgatcgtgccaccaccgaaggggtgccgcctgcgagctcggaggcttcagcctgtttgggaagagtaggctgagcggcgctctttgtagttttcaacgtttttattgagttgcgaattttagtaaggatttgtcgctacaatttaagccaaattattgatttagtagaaaagttagagtgaagaccgaagaaaggaaacagacgttaaccattaaagcttgattgctgctgcttcgtgtttaaccgcacttttccaaatagtgttgcgtatcagaacgattcatgatttctgaaaggaattatatgcagccgccttactcctccgccagtccacccgtcccgcgttctctctgggtttactccagacttccttttttt

SEQ ID NO: 49990 - DNA, 482 bp, Homo sapiens
tggcgagactgtcatcccccgacatgaaggcaagggctgggctcagaagcctggataccgtggctgcctctgccccaccctcagctctgggacaaaccttcagtcccagcctgtctgcccacgtctctccagctgtgcaatcggcacacccacgtccacgtggctcctcatggggccaaagagcagccgtggccaggaaagcagtcagagaggcccagggttgaacccaaggtcactgcccttgtggttgagcaaaatgaagacagttcctcttcttaaatccggctctgtgcctatgaagacggaagcagcagcattccgcttgcaggtttttgaaaaaacaaatggggcaagagaggccaggaccacgcctgactcaggcgatcggacgggcagggaggctgcaaggcatggcatgagcaggtggagctgtcaggactgccccagcccctggctcaaagatgcccgaccccaggaccctg

SEQ ID NO: 49991 - DNA, 1221 bp, Homo sapiens
aggcacacacacacagccatcttctcccgaccgcatcccacaggaggggcttcctcaccccatgctgcctgggtttggggcaggcccatcagcatctgctcagcttgctctggaggactttgccccaccgttgtttgtgtatttcccatcgctctgccacagagcctctgggtgctgggtgagggtctacttccaaattcctctcccgggcattccagctcctggcttctgtggcctgctggctaaggggaaggcacagccatgggtgggcgcccagcacctcaacggcccttttcccaccagggacccctccaaagcacccgtggcacctggggagaacctcctgccagttgtggacacctccctgcatgggacactgagtgagaggcacttgaaaatgtgaaagcaaggctgcaatgacggccgagccagagagcagcacctccctagcacaccctgcacccagcggaggtggctgaacacccgcgtcactcagcaaactccacggtgatgtgggccagctgaccaacttcatctagagccactgggctccctaaattcaagtccaactctacccctgccactctcacgcttcccaccttcatcttccagtgcaggactttggagcggcaaacggttattatttagaaggaggtcacatggtgaaagtccaagcctcctcaccttctagtcaaggcttgctgataacattgtccctaacgaacagccgcagcagcgcgtcaggcagaatgagcctctgtttagagttggtaacgaccgcctgaaaatgtcgtggtagaaataaaaccatgcaattcagtaggggaaataaaatacatatccagatggaactgcactgagacgctggcacactgacatctcaagttagacaatcatttaccactcaaagcaccgtggagtgaaggtagcttcccagggcagtttgctgagctcttcctgcgtgctggacacacacggtccaaagatcgtgctgagctcttcctacatgctggacacacacagcctgaagttcaccgcctaagccacactcctgtccatacgacagatcgccatgggccacacgtgacatgtgcatgggtacctgcagcagccggtggcagcaggtgacagtggggaccatcgagatggcccttgcaacagtctaggaagagactcactgccccagattcacctcgagactccaaatggtctcaggtccct

SEQ ID NO: 49992 - DNA, 1028 bp, Homo sapiens
acgccaaatggaccacaaccacgccaaatggactacaaccacggcaaatggactacaaccacggcaaatggactataaccacggcaaatggactataaccacgccaaatggactataaccacgccaaatggactataaccacggcaaatggactataaccatggcaaatggactacaaccacggcaaagaaaagtcagaggttgttggactagattttttaagccctacccatgtgggggtgaggttttaaaagataggctatgcaaacacaaagcacaagaaagctggtttggctgtaaaaatatcaaagtagacttcatgaggagtcagagccagagagattccacaataataggagtcaattcatcaaaaagaaaaagctcccaaatacaagaaaatacatgaaaagaaaattgacagaacaaatgaaaaaagagacaaacccacaatcacatataaaataagtagacaaaatccataaggaaatacaacagctgtcagcaaactttttctgtaaagtaacaaaatagtaaatatttaaatagtatagtaaatattttcacctttgtgggcagagttgcaatggtctctgtcataattactcaactctgcacaaaagtagccagaaaaaacacggcaaatgggcacagctatgttccaataagactttactgataaaaaacagatggtgagccagatgtgactcacaggtcaaacattttttttatcatttttagctacatagctcaccggaataaacaaatcctagtttttattctattgtgtaatctagtaattactttccaaaccaaaatgatctcccttcaagctttaaggaaggccttaaattctatttgatgttttagaatttagttaacatctttttattagtcatgattttatattacaaaatttatgattcacgtaaatattaaaaatgcatataattcaatgaccttccctgtcagtttttatcttttcatacagagaagtttttttctctatatgaaaacatgattttttacta

SEQ ID NO: 49993 - DNA, 1384 bp, Homo sapiens
ccatgcccaggactgaggggacactctctgaggacggtgcccatgctcagggctggggggtcgctctctgagggcagtgcccgcgcccggggctgggattttcctccgacacggacaagaaggacgggcgtcgctgagctgggtaggggggatggcccggggtcgccagttccgtccagttccgtcagaggcagcactgcccgcacgcaggtcggccgcctccttaggggaggggaggctgggaccccgaccagccgaggaggggcttcccgcccgatccctgctacttcccagcccctgctctgaacccaatcccggctcggcaccgcagctcttacctgggctcggggacccgccgtttcccgcgctcggaccagattcaaacgcacccgccggcgccccagacgggccccgccctcccggtcgtcatcaggcgccgctctcgcgagagctggggcgccgcgagcctcgggcctcgcccacacgcccggcccgccccgcctccagatcatgccccgcccacatgcccgccagtcttcttcctgtctatgccccgcctcttagggcgcggcctcgagcagctaagcccagtgccctaccgggcactacggaacgcgcacgcggggcgccacagctggggaacccatgcccggtccgcgcgccgacgtccactgcgcgctcgtgcgcgtcctggggcctccgcggagggagtgcgcggtccaggagagggcggggcgctgcgagcgggcggtgttgtgggaaggaggaaggagaggaagagagagagggggagagaaaggaaaggcttggggcggggagaggccacagggccgtgtctggatccccgggaggaccccaccccgacctggccggcccccgtgaccgccctccctgccgagggggcacctgtccgggtggtccgcagcctgcacacggtaggtgcaccctgggcaggtgcttcccccgcaggagcccctccggccaggtgcggcccctaacaggtgcttctcctgcagttgctcctccagcaggtgaggcccccggcaggtcagctgcccatagggtggagagggagaggccttagcggggaccctcggaggcacccgtgtgaaggaggagtagcaatgtcattcaattctttggacttaaatgccaaaatcacatactgatgtatcaatctcttttaatttgtgtcagcgaataacttgattgggcgttcccaatttttgttgaaagcaaattcttagaaaacggtgctctttaccaccgagctctgcatcccttcgtgaggacttggccttccctggagctatattctttcatgcttgagatgtctagagtggtatctgttttcctggcttaactcaagccagaggtcttggcg

SEQ ID NO: 49994 - DNA, 1497 bp, Homo sapiens
aacaattagtggctccatctaacagaaaacaaaacgcctcgggggaacaggtagaataaagagatccagacccaaaggactccagagtccttcctgctatgccctgctgaagtatacaggatggaattgacataactggtcaaaattttcttgccaattaaatcatattcttcctatatccaaacataaaaaaattgacagctaacatttaaaacaaaaattaagtaaaaggaatgtctttcttcaaacaacattccccttgaagaccagtattaacaatcagaacttgcacaggattttattgttcataaattccatgtcctatgcacgatataagcatttttttttttgagatggagtctaactccgtcactcaggctggagtgcagtggcacgatctcagctcactacaacctcctcctcccgggttcaagcaattctcctgcctctcgagtagctgggactacaggtgcccgccaccacaagtggctaatttttgtagttttagtagagacagggttttgccatgttggccacgctggtctcaaactcctggcctcaagtgatccctctgcctcgggctctaaaagtgctgggattacaggcatgagccaccacaccaggctgatataagcacttttaattacaaaaaaaagtacagcaggcacttgacagggaatgtagaggagttattttaaaattccattaacattagtaacactgaaacatgcagtatcaattctgctgactcattcctctttaaaaattaatagcctagaataagtttagataggtaatgtctgagacaatatgaagaaagatgctacacctgaggcattgctgatttaatacctttaagtaaaatttaaaagataaatggataaaatgattcttttagaaacaaaatgccactaaacatgaaatcatgaacttgccaatcaagttcatttattcaagattcttcctcattccaagaaggatttgagctttgctcaatgctgcataaccctttaggcactattttaaaaagaaaaaaacaaaacacacaaaattcttactggaagcaatggttggttgcaaggaagaattctttccctctcttagaccacaactaaaggggaaggaagaaggaatctgagtccctggcacagcaatcgagagtgtgccctggggcaggccccaccagcataggtgggggccaacgcgccgttccccggagcacacctaagtgagagggtcacccatttactggccatctgaaaacaccaacgttcctacaccacttggctagttctacgttaagcctataaaatgaacaacatctaagcgggtagctttgtttccttgtgtaaaatcaacacagtctcaaaaatggaacagataaggcaaaaaggaccagagaacctcggttctacaagaacatgagacgcctcttctttatcagttacatcacaatagaaatcggaaactctggtttctagaagcctttaggcaagc

SEQ ID NO: 49995 - DNA, 2753 bp, Homo sapiens
ccatgacacagacttaagactgacagaactgacagaagaactgacagactctttaagtctgacaggaaacattaaccatctattctctctgaagcctgctacctggaggcttcatctgtacaataaaaccttggtctccacaaggtaatccagacattcctttatattgattccaggtctctagacagtaacttaaccaattgccaatcagaaaaatctttgagtccagctatgatctggagcgctccccacaccaacctgcttccaggtgtcccaccttgctgaacgaatgtacccgcttccagctgtcccacctttctgaaccaatgtacctgcttccaggtgtcccacctttctgaaccaatgtacccacttccaggtgtccaacctttctgaaccaatgtacagcttacatgtattgattggtgtcttatgtatccctaaaacttacaggtcaacccccttgggcaaatgtcttgagactatgtcaccagcatcctttaaacctggcaaaataaaatactaaattaattgagacttgtctcagatacttttggtttacagattaaactaaatgctttaacaaatatataacaaagtttcataagaaaatggaaggtgaaagtatcattcagattaataattttagcaatttgatactggttctcaaaatgtgagcagcataatcaaaaactagcatataataggtactccagtataatatttatggcatgaagttagataatgttctcccaaatcactggatttattttctacagatctaccttactctgggaaacttaaaacatatcaatccctcagacaggaaacaactccacatataatacacgttaaaattaaactattacaactgaccccgaaataggatgtgcactttcaaatccccactttttagtcactaaccagcacttattcacaaaaggaagttaatgaatattagaataattaaatgttatatgtacaaaatgtaaaattaactatcattatctatggcatcaggatgactcctggaagtggagtcaagaaagattagccatgtccttggaacaatatttgttttaaggaagatacagagcaaatcaaggcaaggaagaggagtgccactgtaggctccttggatattattttagggatatacagagaggaagagaaagtgaaattttacggcacacatacttgcaagtgttaataacaacaaagcattatggtagataaattcttagcaacagcgtaaacaaaccacggtggaacagaaacaaagaaaaaccccagggctcatctgttccatttcagcagaggtgggggagggaggtggcaaaggccacaccaggacttgcctgcaagcggagcactggtcacagctgggcatctctgggcctgtgactcagacggctgacccgaggacatgcctccctgcccgcccatgtccagtgtgttcactggcctctccgcattccagcctcacaaccacagcacagagtcaggctcaacccccatcaaaccaaagaggaaacaaggttctaagagttggacctgactcacccaagggcagggagttaggaaggggtgggtctcagggcgcaacccacacccaccagagccagagcctgagctgtgggctctgcgagacggtgggagcctcaaagctaaccagaggccggtggccacacctcagcacaccccacagaagggcagccccactcgcacgggccctggccacatgactggtcatgtccagacaaggacacaccaattcaacaaatcatcatgggaacctcaaagtagccattactcaattgtgctacacgaaaccatggcagttaaaaatacttgtaactgttagcaaactttaatataccaacacagcacaggggaagaaaagcaatctgaagttgtgactcattatggagggaatgctttcttccaaaggttattcagacaaaaagagatagggataaatcctctgtcttttaacaacataccatgcaaaaacaaacactgccttccaaggccagacttctgcttacaaaattatcatgtctaatgagttcaaaaataattcatatatcctagacacagatctaataaatagctcaagtaaatacgttttcataacttaaaaagagcagaaaattaaatatctcaaattctatttttaactcttctcattatatcatatctcacaatctagtttttcaaatgtctatcagacatcatttaaataaagtctggtagcttcataagacagatgatactgcaatagtcaaagtcatatttctgaagaataacatactatccataatatagcatttaagaaaggaggatactatacacacccatatatccaaacatatcattaaaacattaacaaaatccacggaaatgttgccaatgtaatgttatcactagttagtagaattgcaggtaacgtttttcttctttattctcctccaaagcttattcttcaatgagcatactttcttctttaaatcagaaaaaaatgtttttgaaacctgtctagccataacataagaaatgaagaaaaatacaactacatgttcattaaatatagaaagataaagggggacttcaccgtgtaactgaacaaattaaaaaaaagaaactcagtttcaatgacaattttacaagtaataaagaaagcataatgaaaaccatcatattagtatttccacatctgctgttggtgtggttatcactaattccagcacgca

SEQ ID NO: 49996 - DNA, 2814 bp, Homo sapiens
tgctgcaactcttccaaaacttcctgccacacacacacacattcacactggattcaggtcgatcccatataaaaatgctcagtctcacaattatacttgcaaaaaaactgaaacaatctttcaattatctaatatctccacatctttcgagagacacttactgcccttgaaatgcgtcagaaacaaccaagacacgagtgcgtcttctcccggtagaagaaaaagttaacttctcccccaccagctgtcattacgttttttaaaaaacagagagaaggaaaagctgaagccacccggagcatttccaggccggcagggctttgggaatgcgcacgagaatcgcgctgggcgctctgagagcagaaccggccgctcaggcccctaaggagaccccgcgggcggcaccaggaggaagcgcgcgctccgggcagggccgcggccgaagagggggcgccaagcccggtacctgccgctggcgctcggggtctgcaggccgggggagggaagcgggctttgtgaagaggggtctccgagaaagccgcgcgggacggcgaggggaggcttcacgagggcagacgcgccccggacccggagcctgggcgggcggggaagcggagaaggggacgcccgacttggacggagggagggcacggagcactcaggactagggcgggagcggcgagcagcgggcggcggccccaggcggacaggttcgcagggagtgggccggaggccggggcggggctggggtctgcactcgccctagcgggcaggtcgccagcaggctgggagtcggggccggggggcggggcggggtctgcactcacctaggttggcaggtcgcaggaaccggcccgggggccggggctggggtctgcactcgcccaggcggaagggaagcgcctgcctggaccggggtgggtgggggactacgaaggcgggagccggggcagggctggggtctgcactcacccaggcggcaggtcgcggggaggggagtgcctgcctggacgaggggagatcgggactggtggtcaggggtcgggacgggcaggggtctgcactcacccaggcgggcaggtcgcaggcgcgcacccccaggcgcacgacgcgctcctcgtcttccagcagcgccagcgcgcggcacaggcgcagggccttgaggccgcggctgcggcgacaccaggcgagcagcgcgagcgcgaggagaacccagctgaagctgagccccaggtagcccagcgcgtacacgggcagcagcagcgcgaagctccgcgccagctgcgccagcagcccgggcagctccacgctcagcacgcccccggggttctcaggcgccgcgcggcccccagccccgccggcgcccgcctccgggccctcgccccgggcgccgctcatcgccccgcagtgccgcgctgccctcccggccgaggcgggctgggtgctcgcgctgatcccgggcggctcagccccgcgccagcgcccctctgaggggacgcggctccgccgcacgcccgcctccgcccgggacggtggcgtcatcacgcggggcgggagcggcgtgggcctggggctggcacgtcaccgggagcgggcggggtggatactgacgtcatcgcgcggggcgggccgtgggccgggtcggagactactggagtgggccgggcaggcgcacgacgtcatcacgcgagcgttgtgtctcggctggcgggagccggggacgggaaaggagagtgctcggtgcgtgggctgggcgtgcctgcgtcccctcgagccccacggggcaccctccccacttgcctgtggcctcggagcccgcgggcggttttggctcggcgtcgcgccccgaggcggcttccgggtgcgtggctgcgctcgccgaggcccgggaagttgccgtcgtcaaacccaaaggctgaccgcctctgggagctgctggcaaacgtgggggtgcgcggccgctgagcgcagccggggtggcggtgggatgagagggcggcgtccctgtttgcggtcattttgcggccaggaggacgggtgagagggcgccgcccgccggaggtcggacgggcgccgctggcgggagtcctccggtatttttcggtgtgaggttgcctagccagtgtgcaaggttgtggcttttgcggagtctctcgggacggtcttgttatcgggcattccggcgtgagaacgctgcctctggggcccttcccaccctgcttgtcagggttttaaacacaaacgactccgttgtgaccttgacaactctcacacagttcagttggcttttaagatgcctttaatcccaaaagtcctccctgaggggtctggtagtgccgggcaaagaccaccgcaagcgcccaagggacgctgttgacactcgggaactccaccccgggcaccacgcagcttcgccgaaggtgttaatattgtggccaactatgaatagctgtttcaaacgactaattttgggcctttcctgtgattcctgaggtcacttttcagttaactcaaaaacacaactattgatcactttactttccagtgaattcaatcgagttaattatatttgttctgtagtttctttcaaggaaactccaagccaaacagtagcaaagaacatcctacttgactgtttttgagcatattcagtgaattccaaggaaatttttactgaatttgtaacagagtagggcactggcaggtactgaatgaataaacaaatgcccagaagaagcagggtcacctttacataggaatctgtctcccctcgttcctgcgtcttcataattttgtgtgcatatgtatgtggag

SEQ ID NO: 49997 - DNA, 881 bp, Homo sapiens
cccaaagtgctgggattacaggggtgagccaccgcgctcggcctcaaacgtaaagctcttttcaatatctgctctccctttctatcttccccgactgtcagtccggtcccgtgggaacccggggcgggttggggcgagtcaagagcccctgcaccccaagtcagggtactgcacctaccccttggggagaccaacgaccgctcggtcctctgctgctcctgcctggcggttgctaggagccggggaagcgcaggcgcattgggaggggccgcgggcacgccgagcagcgaccactcggccttcccctgctcctgcctgccaggtgctaaaaatgccggggatgcgcaggcgcactgggagaggccgcagggcacgctgggcagtgcttctgggccctctgctgctcctgcttgtcggttgctaggcgctgggacgcgcctcccgaagggtgcggggcacaggtggcctcttcggggtggaccgcgcctggccggggccgaggacaccgcggccgcccgggcctgcgggaagcgatggagcccgggaaggtcggtgcggcgctgggtctgggcgaggggtggtcgagcttcgcggactccttcgggcgccgctagcagcgccgccgccgccctccctttgcgcagcggttctctcggccgggccggggcttcccggaggagccgcggtgcctccgaggcaggaagggaaacggaggcgcggctggccgtcggcgcgagggatggcaggacgccgggctcccggcggtcgggagaggcggtctgtgcagcctcaggcctggggtcgccgccgcggcccgtctcctcgcgcccggcctggaggcggcctcggcccctgctgcggggccggggtggctgaggaga

SEQ ID NO: 49998 - DNA, 1400 bp, Homo sapiens
gtttacaaaccttcagcaagacagagtcctgattggtgtgtttacagtcctttagctggacagaaaagttctccaagtccccacccacccagaagcccaggaggcttcacctctgggcaccactgaactctagcctgggtgacagaatgagactctttaaataataataatatggctgttggtggtgatgctgagtcaagaggtcataaagcaggctgcttacttagctctgggtgtgggaggagcgggacttccttagctccaggtgtgtgtgaggggggcggtgagccggacgtccttagctccgggtgtgtttggggggggcggtgagcgggacgtccttagctgggggggggtgtggggagagcgggacgtccttagctcctggtgtgtgtggggggggcggtgagcgggacgtccttagctccgggtgtgtggggggaagggggacgtccttagctcccggtgtgggggcgggggggagcgggacgtccttagctctgggtgtttggtggggagccggacgtccttagctccgggtgttggagggtgttggaggggggagcgggacgtccttagctccgtgtgtgggggtggggagcgggacgtccttagctccgtgtgtgggggtggggagcgggacgtccttagctcctggtgttgcggggagcaggacgtccttagctgcggatgtgggggagagcgggacgtccttagctctgggtgtggcggggtggggagcgggaagtccttagctcccggtgtgtgtgtgtggtgtggggggagagggacgtccttagctccgggtgtgggggggggagcagacgttcttagctctgggtgtggcggggaatgagacgtgaccactgtcacatttcagtggctctgggcctaaacatttaaaggagctcacattcctcagattagtttcttttctttctcagtgtcatgcagggaacaggatgacgatgtggacgtcagcgctataccactgggtccatgtagatgaatgtcacagggttgggccgcggtgtctctgtcatgtggggactcaggctggagagtgcctttgctgctttgcacagagctagtggtcatcctgaaggtccagaatggatttatggcagtgtccctggaaggaagagtggatttagaaacatgttataagcagaaatagtagtatctggtgacgctttcctctgtttattttttaatagagatggggtttcgctgtgttgcctgggctggagtgcagtggcagttatcacagctcactgcagcctcgacctcctgggctcaagtgagcctcctgtcttagcctcctgagtagctgggactgcggttgaatcaccatgcttggctgatttttttttttgatggagatggggtcttgctgtgtt

SEQ ID NO: 49999 - DNA, 1205 bp, Homo sapiens
ttttctgttattagctaaaagcttaagttttcatttccatatgattgttccttcacaacaggaatctcaaaggttctcaggtaacagagtagtgctttttcttaaataggtgcagtcaactggctggacttgcagcttccctaacagcagaccagtcctgagcccagcagccagtgagaggtggcggtggcctgccccatccccctcagggctgctagcaacaaccagatgccaacgcacaaggcccccaatggcagggtgagggctgatggccactgccaaccactgacagagccaccacagcagctctattaggtctgaagaactagaaaacaataaatcacttaaatctgaggctgaactgagcataatttcatctgattcagccctcattttgatgtctcatatccacaattagaaacaattttgggattacagaactgcaggccaagaggggaatcacttgttgctgcagtctgaatccccaaatgttgattctggctggtgctgggtcagagagttcacgtggcaggtcgcagcccgaggcagacacacttttaccaagcaacacagcacctggatgacgagggctactctgtttccgctggggctgagacctgctcagtgcatttctacctcatcagctgggctataactgtttttctactggaaggaaaaaaataagcagcaagctctctcagtcattcagcgctgtttaaacaacctttggactactctgagcaatttttttttttttttttttttacagggcgtcactctgtcacccagagtagagtgctctctgcagttaagcattttttttttgggtggggggaaatgatcaagttaatgttgagcactggaaaaatcatcttagccagctgatctcttcagagctgactcaagagtgccctgctggctggtcttttggttgatcaagcaaatataaactgaagaatgactaaaaaaacctaaagcaaattaatggctaaaactaaattggtggagtgacagagggcagaatgtttccctcacctgtgagacagccagaggaggaccggaattacatggcaggtgtgggtgagaggctcaggctctgagggcaccaggcaagaccgggggcaggggggaaggcgggggcaaagtgggcaccagtaacatccatgctccccagcaagggtggagtaggcgacactgcagtccac

SEQ ID NO: 50000 - DNA, 485 bp, Homo sapiens
tgatttacagtgcatattccaatcccaatctgggtttgtcctcaaattttgagaaatagcataaagaactattttgccaactgtgcgtcacaattctatgattgacgtgagttgcaggcacttagcgttccaacagaggcacggcaactgcagccatcacagccacagagctccccacaacatgggaagcgtccccatctccccacacacgtgatttccagagtttcaaacacagtgtttacattcctgcgcagcaagaccatgttagccaaaaacaaacctacactgacttccgctggaaagtatttgcagaagtcatgaaatggtgtatgtttttactatcccagcaagcacttctctagggaaaaggacagttatgactatttacctgaggaaacttagaatttgtcaacttagctgttatactaaaaattatgaacttgtctctgtattatggaacaaagaaaacctccacaacttcacca

SEQ ID NO: 50001 - DNA, 2311 bp, Homo sapiens
aaaaagggagggggggggagggggtgggggagggcacgtctaaggcacacagggcccacctgggagccctttcaattacaaaattctagacataccaaacatatctctacactcgtcaggtaaaggcctttcagttttcagtacaaaggacttctgccggcttccttcagaaaaatcaagaatttaagaaaatacttgttatgcaaacaaacatttagcccacttaacattgagctacggtcgtccaaagctgcttagtgtccgcgaggaggccgtccggatgcgcgatgattcaggccttctccgccagctccacccgggacgcgagcacccggcgtggacctctgcgtcccgggcccacgacgcccgcgccgcggggtgcgcgcactgcgtccccgctctcctgggactgcgccccgagtaacacgtgcagggggcactgggtcccctgcaagcggcgagaacgccggcagccctggccagttaagcggggagtgggtccacgcggaccacagcggcaactcagcccaggacgagcctcgggtcaagttctccgactccgcactcgggcacctagcgggccgcgccccggagctacgcggccccaacctcacctgcccgcccaaactgtgcccccaactacccgcacctccacctgcgcgccgcccaccctcgccctccacctgcgcgcccccggcctactagcactccccacctgcgcaccccctcacctgcgcctgggcggcggcggcggcggccggtggcggccccccacgcaggccgtcctcctcctcggggggctcgtccagcagcactcggccccggcccagcttccacatggtcaggcgggctccggcgtccctccgtccgtgcgtcgggctgtggctccgcgtccctcccggccgccggacgctctgcctgcggctcctgcgggacgcgggcccagtgggccgggcggggctaggcgggggcggggcacccccagaactaggcccgccccctccccaccaggcccgccccaaaccctccccaggacccggcccgcccccaaaccatccccagaaccaggcccgctccaagccctcctcaggaccaggcccgccccaaacccttccgaagaccagacccgcccccaaaccttccccaggaccagacccacccccaaattcgacggggctccgaatcccatcccccacagaaaggtcaaccccggccccctcctcccagtgtggtccccgccaccgccccggcgagaccctcgcccttcactgttctactgaacgacgtcctcaccccaggctaccccgtcacctggtccccccaccttgacccccacctacccgcccctagctgcttcctcacccggaaacgcccccatcctgagcccccaccgagcccctagccctgccctatccccggttccctgggtcctcctctacccccgagcccccacccggcccccgcaaattcccctctcccggttctctccttctcccccgccgacccccacttactcccggactgccccctccccccaccctttcccagaccctggccggagggcgtggccacgtccgctcgggtcaccaaggcaacggccgggagcgcagtgcgcatgcgcgccgctggcgctcaggccgcggcaaggctgaggggaaggtggagggggcacagtccgcggagcggcgcctgtaccccagcgcttcagggcatccctcggggcctgggcgccgggcatccgggactcatcccctccggcgcccgaggtcgcgggatagtgggggcgccgggaggaagcctcgcccagccctggtgggcggtggggccgctggggcctggggcgccgcgggctcggcccggactgacggcggtggggggcggggatggggccgtggtgccgggccgcgcagaacccttgggacccccgcggcgcccaggttggggctcagggcccggagaacgttttcccgcgtggctatggctttgtcagaatcaggagcgggagaggcgcccacagattcctgagggcagaaccgcctggttcccaggccgaaaggagccggcgaggcgacccccgatcccgggacggagccgcgggaacgggggattctaggcgtccgctcccgcccagcaggttaatttttcccgcgacgcgcttcgtatcgcttcttacaccaaatatgtattcatgtgttcagtcatgtaaaagcgcattttgaaggaggatccagaactatgagctcccttgaaaactgcaagcttcgtaactttacgactcttaaaaaaatgaaatgtacattttgagtttccc

SEQ ID NO: 50002 - DNA, 1786 bp, Homo sapiens
ctttttaagcaattgttttataactatagtttgccattatcttttcatttcaaagggaaaaacatgattatcagttttaaacatagagaaggaaaaaaattcatcagcgcctgaattaatccaagtaacacgagattcatgtcaaaaaccgccactcttttcattatgatgatgattacacggtgagggtaatgagctggggtttgcaggaagcaggagcacgctttattttctaacacttccgttctaaggcacggccaggttaaccaattctatttattctcctcctgtctttggtactaatgctatcacagaatttaataagcactaggatgcgccccacaccttaggtccactgaaggtaaacaccatgacctccgtctctcagatgaggacacagtggctctgggaggttctgctgtacttttcggtgaggctgccggagccggctgcagccccaccccggagccctgggctaggacccctctgaagagctgagcggctcctactcactcaccaacaggggctctgctaagaacacgaatccctggctgggctcgcctccgcccaggaccccagacaccaggtggggcctggcagggccggcccgaccagcagccatgcaagcaacaacacgggcgaggggtgggccgcggtccggggtaagagcgggggatgggtagggactggggtggaggtggggagtcggtctgggtttggggtggggcctggaaaggggccggggtcggggtcccgagtcaacaccgcggtctgagccgagagccgggtctggggtctgggcaggcctccgcaccgcacccacctaccgtgcttcctgtgcgccgccatgcgggaccctgccgcggacctcagaccacggcgcgcggtcctgagctgagcgccgtgccttccgggttccgccctcctgggtccgcccacaacagcaggaatgcccaatccgaatacgggaccccgccacgggcggtcagtcaactacatcacggccgtagattggctgatatcgagtctgtaggcgtgtcgcgaggctccagacccgcctctgggagccccgctgtggagcatgcgcggagggagggctgcgggggcggcggtgcgggctcttggggacctgaggacgctgtgagagcgctggcggcgactgctctacgcggtggcggaactctgggggcgaacgctagggagggcgttgtggagaagaggggaacggagggccccagaggagaggcgcccacccccaaccccacgggtgcacctgcggatccccagtccccgcttcgcccccaggcacccgccggacacagggaatggccagggcagtgcccccggccccaaggcacctgcaggatacagggagtggctagggcggtgtccccggtccccgggcacctgcgagacacggatagtggccctggctgtgaccccagcccccaggcacctggaggatatagggagtggccagggcggtgacccctagcccctaggcacctgctggatacaaggagtgggcagggcggtgtccccggcccccaggcacctgcaggatacaaggaatggccagggcggtgtccctggcccccaggcacctacaggatacagggaatggccagccggtccccagacacctgctggacacatgagtggccagggcggtgaccccaacccccaggcacctgctggacacagggcatggccagggcggtgtccctggcccccaggcacctgtgggacacagggagtggtcagggcagcggcccccacgtcaccc

SEQ ID NO: 50003 - DNA, 831 bp, Homo sapiens
tgatttgtccacgctgcccctgacgcctctgccccctttggagagtgcgagggagcttccacaaatcccatcctgtgcagaaggcaggcctgtggcctgggagccggggaccagggcagacgggggacgggagtgaaggatgcggccctgggggctgcggtcgggaagggtcaggccaggccccagggccgctgagctcgcgagctgctgggaccctcctccgagcacctgccaacggtgacttgcgctgcttttcaggaagaaagaaaggtcccgcctccaataccaaagaagcctcccaaggggaagtttcccatcacaagagaaaaatccctggacctgcccgacagacaacgccaggaagcccggaggcgcctcatggccgccaagcgagcggcgtccttccggcagaattccgcctccgagcgcgcggacagcatcgagatctacatccccgaggcccagacccggctctgagggcggaggccggcgccttcccctcgtcgcttccgctttcccggacgcttgtgcagcgcggcgccgccctggtggtttctgtctcctcctcccgctgaacacgtcctcgctcccgcgctccccgcgccccggacacagcgggacgcggccggcggcctcagagtccacggagctcgcggcgaggacgacttctgcttttgttgttgttgttgttgttcacgggtggcctggctcacacttggctctgagggacaggtgtggcgagacctgatttctcctgcgtgttctcagaggacggcgagaaatgcctctggagctggaacccagcttacattttgttatttctatttttat

SEQ ID NO: 50004 - DNA, 908 bp, Homo sapiens
acttgaacatgaatgtcaacgttttcccacatgtactaaagggttataataattttgaaatgtttatttcaaagagcgttggtaatttaaacgtcctatttaatccccaaaacagtcctgagggggagataaggcagttatcttcatagtacaggaaaggaaaaaagcgagggtccaaggccgactataccctcagctccattagcccccgaggcctccctgacaggcggggcggacaatcccagtgcagatgctctgtatcgatcgcatgctatcggttctttcaaggaacgtgtattgatcatcaattaagtggtgagtactcctctagatgtcgattctaaagagggaacaaaacacattagacagaagaaacataagtaactcgaataacaaccttagagagaagaaacataagtaactcgaataacaaccttagcaaactgcggaaactcctacagacaaaaactcaggtgtgggcgcagaagggccggggatgcgctcggtcaagacttgaaggtccggggcttgggccctgtgtcctcaccgagccccggggaggctccggctccgtccacacccggagcgcgactcagccgcggccggggctcttctggagaacggcgcggtcaggctctgccgcagctttcaggtcccctcggccccgtccgggtgcagcgcaaccaggctgcccgcggagccccaccgcccccatgccgccgcccgccatggttcagcccggccccgcccctcccgccggccgtggttcagcgcgtccaccccgccgccccacagcgcccgccgcgccgcgccccgccccccgccgcgccccgccccccgccgcgccccgccccccgccgcgccccgccccccgccgcgccccgccccccgccgcgccccgccccccg

SEQ ID NO: 50005 - DNA, 1725 bp, Homo sapiens
gccgcgccccgccccccgccgcgccccgccccccgcgccgcgccccgccccccgccgcgcccctcccgcgcccgccgccccgcccctcccgcgcccgccgccgtcgtagcgcctaggcggggcctctcgtagcgacgcccccaggggggcagaacgcgtgcgcacgcgcgtgcgaacgcgcgtgcgcgggcggtgtttgaggccggccagtcgtgactgggcggcaatgaggtcagtgactgccgggagtcctgcaggggcggggcggcgccaagcgcagggagcccggctgagtggcagcccaggtgagcgctcagggagcccgggtgagggccgggaacccaggtgaggggcagcccaggtgagcgcgcggggtgcccgggttaggggccgggaacccaggtgaggggcagcccaggtgagcgcgcgtggagcccaggcgagggggctgggaagcccgggtgaggggaccggggatcccaggtgaggggccgggaactcagctgagggggaacccagatgggcgcgcgggagcccacgtgagggggagcccgggtgaggggccggggtggctcctggcgtccgcggtcccagccctgccttccggtgggcgtgcggcaccccgggccgtgcggttcccggacagcagcttgtgggggactttcgagccccgcagcccggggtcctgcctgcgcgggttgggcgtggggggctcctcaccgcgacgctgactttggagtccttgagcggcgcggatgccggacggagggaggggacaggcggaggcggaggcggcgccgtcgcccctgacctcgcttccctcagaccggctgggcaagtacggtcagctcacctgtgtgcccacgaggcggggaggcggctcctgcagagccacagaggtgccgtcggagctgctgtcaaggacagcaggtgtcacgtgggtgtggcctccactggtcaccgagttagctggggcggaaggggacaaggtgcagctcaacatggtgtgggaggcggagggacgctgggtcagtcagaacctgtaggagcggggagggacgctgggtaaggtcaccaaagtgtgcgggggagagagcgggcgctgggtcaggtcagcaggaggtgggacccgcctgggctctgggccctatagccagctgctctaggttggggttgggtgtggacagtagggaggggagccaggggctccccagcctgtgtagattctgctgtaagtgactcttctctgaaagactggcgcgaggcggctgcttctgactcctgtttcagtttaccctctgtgtgaaatctgtaactatccagcttctgcttacctcactcccgtattttgatttttatttacatacaacttttcaggaaggttgtgagaggaaagagcaatggtgcaggaagtgtgagtgattgagggaatatgagatggccacagctccccactgagcttgaacacttctgtgcctcactttcagattggccgtcatggaggctgtggttgttaaggaagttcttcctgagcatccagtttccatacaaagagcacaggttctctaggtggcctcagagatgttcaatacacaatgtcttctgataacgaggaactgggcaaaagcctggtaggacaccgggtaggtaaatggtggagtccctgcaaccgtgttgcagaggaggattagctgttgctgagagaagagaagcaggccggggagc

SEQ ID NO: 50006 - DNA, 560 bp, Homo sapiens
tctgaggacatttaacaatatgcactttatcgagtcttggatgccccattagacgatttgctgaagctttttgttgttgaacaaggatgccgtgtgtttggcaatgttgtaaaattgccgtttttaagccctcacacaggttctcttcctgatctaggtgtcactttctgggtgcagaattatctgtgcctgggaaaaatagaaaacacgtgatgggaaaattcctagatgttttctcaaacttttgcccttggctgtagcttctgttgtgtagatacaggctttcggccctatgctgtgacacaggaatatgatgttgcaacagcttgcctgaacacttcctggcaggagaaagggttagctgcctggaaaccactggtggtttctgcactggcagtttcgagtcattttatcctcactccgtgtatgaatcatacttattgtatattggttggattctacctagatgtagaggattatgagtgaaacagattggtttctgtaattatttgagactatgatgctatcaaagggatataagcttgcaagttttgaaaaaa

SEQ ID NO: 50007 - DNA, 1043 bp, Homo sapiens
aaaaaaccacaatgattaggggtctggttctagaacgggtgtgaggccgtcctttgacaaggggaggatgaggaggccgaggaggtgttgaggatgttcctcggggcctccgtgtccccgccgcactcccactggagatgggagggtgaatatattcggtgcacggtgggtccatgatagccgttcttttctcaggggctaactgtacaagtcattgttaaaatactacaggagatttctcttagtgagaaaaggaggtttatgtaacatgcaagtttatatttagagaaccaaaatggttaagtccctgtggctcagaaagcagacgctctgctgtggaccttgtgttttctttggagcactcactgctagagcaaatgtttgctgcaggaataggctgtccttgttgggacaaaaccaagtcacatccgtaattgccaaagcacgctctcacgcggcagtgagtgtccatgtgttcaaagttctgtacacaaggggaggtgaggagggtgttatgagaaaaacctctccactcgacctcccgtgggctccagcacccgagcctccaaatcctgccccagctgccctgcagcgcagacctccctccggggcgaagcagcccacggttaccctggtttcagagttccgagagcagccacggaaatgcagcggccctgcaggatccttggtgtttatccctctccgggtgggatcagaaagaaactcctaatcaagggaaggctctggcaagtgtgagtggagtttgtattttgaatttgatttcttaataaaataacccttgcacacgatttaataaaacccaacagcactcacgcccaggctatgaaaagcaaagcaggataggaaagcctgcgctctggggactcacagccccgcccccatcccagcaccccacccactgtcagcacccaaccctgcccccatcctcacaccccaccccgcattcagcacccaccctctcatcccagcatcccacccactgtcagcacccgccccggccccccgcactgtccccatacccc

SEQ ID NO: 50008 - DNA, 1425 bp, Homo sapiens
aacaccttacatggagagatgaaatggatgtgtaaagttaacttgctgggacagaaatctttccacacgattgatggtgcgggacatggacagagtggggtctgtgtaactgactccttaactccctctgccctcctagagaagagagacttccagagatcctgagagaggcagacgcgggagggctttgagggaggaagaggttggagaacgtgggctacaaagaactcccgctatgccaggacgcgggttctgctttcacagtgaatgaggaaaacaagcatatcaccaacaaatgaagccgtgcagacaggcaagtgcgttctctaagcaacaagcttctactgagcacctgatgagtgtcagaggtgaggccaagctctgtcttaggccctgaggatgggacaagagagaaaaagcctccctttggggttgccactgctggtttattccccctctcctctgcagagccctgggctcttcctggacagggattaacccagtgacagcaggacacttgggagcccagggccaaatggctgcgtctcccccagcttccgggcccccatctgctgggtagaccctcggtaacttgatcaacaaggagcctggctggcatcacgatctcacctcctgatggggcccctgtcctctggggcgtggccaggcttggtgtttcatcacagcagcccgaacggagacaggaaggcaccaagaggcattgctcagcaatgaacaaaaacctgcaggtcatggtccaagtcccacacctgagtcagctcacaggctcggagctcactgactgaagggggagtcaggttcacctgaggaaggaccccacacgtaggctgcaggtccctttggtcgatgcttccccaaagggacctgcatgcgtgtgctgggaagactgcagtggtaacgggaaagagcagaccttggaaactgtccaggctctgagtcgccgctgagcagacaagcagagcggcaccttgggctgtagaggggtcttatgaaagccacatggcgcgtagagttaggcccatgtccgtctcacaagggcctatgggtctccaggtgtataattgggatggacagagctggcagctggcagaaaccatcactggttccttaacctgtgaagtcagagccactgaattagggaccatcagttggaaggctctgaacacccctccccattcctaccaaattagtaaatccatcctgccttcctggaggaatcgcagagatcagagccactgtcagaggctcaaaggatggtgaaattccagtgcccgccaattcccatgtaattcatggaactgggcactgcagacaccaggctgtgatggaaggtggcggtggggtcctgcagcgtgaccaggtagtctctccagtcacagccgctgtgacaaatagcgtctttac

SEQ ID NO: 50009 - DNA, 1788 bp, Homo sapiens
aagcaaaaagaacacaaaaagagaaagtaaaggctctggctctcggtacttatggaaatctcatcgtcattaatttgcacaaagccattaaaaatagcatttaccagcaggggtccagcgttaattagaacccagcctgggagcagctggaactctcggcgctcctggctcagtcctcgccgccctgaacccgtctgcaccgcagggcccgagtgggaggcagaggccacatttctggatatgagcaaaagctccgacatttcgtccactctcgtgttgtgaactttaaaaaattctggaatctgttgagaatttggcaataagtttttaaccactaaatatgtcaacaacgcatcgcctctacttttaccaaaaaataggcgcacgaaactccgctgtttgcgcccgcggacacctgtccccgcctcctcgcaggaagcggcccccgcgcgtgggcgcgggctcgggctcgggctcgagtggcgacgtgggccgcggtcctggagggggagaagcgcccggcgggcaggcgcggggcagggaagccccggggaacccacagcccctccgcagacccagccagggggcgcgcgcccgaaaacgccccgtgtgcacgcgcccgcccccctccccgcgccccgcgcgcgcccctcgcagcctggagccggagcgctggctccgcgcggcctggagaggcggagaggcctgtccaccgccccctctgccgcccacgccccgctgcgggtcggaggagcagctcccgctcgcaggtgctcggagaggccgggccgcggctcccacaggtgccgggaagcggccgcgcgcatgcgccggagcccacccgcctggctgcgcgtcccgggcccggcggctgaagaggagccgcggcgaggtagggcggaccccggggaggcagcggcggggcctggcgggcggagcgggaagcagcccgaggcgcgggtcggagggggcggcgggtgggaggtggtcggcgagagcggcagtaggcgggaggggagaaaaggggaggccggcaggggagaggcggggaggggaggccggcaggggagggaggggagcggagcggaggggaggggaggggggaccgggagaggagggggcagcgctgcccgcggcggggtgggcggcggtgggtggtctccgctccgcctccgggaggccgcgtggggggcgtgggggcctcctcgcggggtctccacaggccctcccccgggacgcggcaaccccggccggaagacaatgagccgcccgcgccgcgcccgcagtcaccgcccccgccgagggtcccgccgccccagccggcacggaagcaggagcagaagccgaagccaagcgcgcggggccagggcgggggctcctcccggggttgctccgcttggctctcggcggtcgcggggatcggctgtccggagcgaacgggggtctctcctggactcggggccctggggaggggagcgcggcccttggtcctccgccgctgcgcccggggtgcgggggtgtcctggctgctgacccccgcgagccccgagcaccgcgacccacccgccccaccgcgccgcggctcccgagtcctgccgggcgccccttgcagcccccgccccatgtgctggggagacccccgggcggtctgggcgggattccgcaggggtccctcctctcaggcggggctcattctggagcatgaaaagagggtgaaccaaagtccctccacctctttagagtcctacaaaaccacgtttccccctccacccactccagtgtctattc

SEQ ID NO: 50010 - DNA, 1346 bp, Homo sapiens
acccaggctgcagaaacaaccgcagtcaactgcagctccagtcattgctggatgttggctgacgcggtcctggcgccagctggagatccattcaccaagactttctgggcagatttaaagtggctggggttcagaagttcagcaagtcggacacacccctcctcgctggagaggagagggcaaaggcgaggcgggggagcagcgtgtgagattccccccttcacacacacaacaacaaagcgtggacacacagaagtgaaatctgatcgcgtgccaggaaaagctgtgaggctggaaaccccggagtaaggctcgaccttggccagacctgcaggctgcggaaccgggggcgcgcgggcgcagcgcagcacagcccggccatggagcacgcggtggccccctgcgtcctctacccagggactgagcccggggctgccggggagagcgagagcgagggcgccgcgtccccggcgcagacaccctgcagtctcggcgcgtccctgtgcttcagctccggggaagagtccccgccgcagtccctcgcctcagcggcggaaggcgcggccacctccccgccctccagcggtggcccgcgggtggtggagcggcagtgggaggccggcagcgcgggcgccgcgtccccggaggagctcgcgtcccctgaggagcgcgcgtgcccggaagagcccgcggcgccgtcccccgaaccgcgcgtttggcttgaggaccccgcgtcccccgaggagcccggggagcccgcgcccgtacccccggggttcggggcggtgtacggggagccggacctggtgctggaggtgtcggggcgccggctgcgcgcgcacaaggcggtgctggcggcgcgcagcgactacttccgcgcgcgcgcgtcgcgggacgtgctgcgggtgcagggagtgagcctgacggcgctgcggctgctcctcgccgacgcctacagcgggcgcatggcgggcgtgcggcccgacaacgtggccgaggtggtggccggcgcgcgccgcctgcagctgcccggcgccgcgcagcgcgccaccgacgccgtggggccgcagctgagcctggccaactgctacgaggtcctgagcgcggccaagcggcagcggctgaacgagctgcgcgacgccgcctactgcttcatgagcgaccactatctggaggtgctgcgcgagcccgccgtgttcggccgcctgtcgggcgcagagcgggacctgctgctgcgccgccgcctgcgcgccggccgcgcccacctcttggccgcggcgctcgggccggcgggggagcgcgcgggcagccggcctcagagcccctcgggggacgcggacgcgcgc

SEQ ID NO: 50011 - DNA, 789 bp, Homo sapiens
ccgttcctggtacagtggtaggtttctgacttttactttcatattcacccagctagatgagtatctttaatctcctttttaaagtcaggaaaccaaaaatctgggagtctgactctagcccaaatggtgcagctacgaaggggaggaacaccatttttaattcctcgttcttctcactctaaggccaattctgagaactgtgaaggatgagtagggctttgctgataaagcagaagagacagttcccagacagagaaaatggattgaaaacaggaaactgcaaggtggaacgaggtcactagcagcataaagtgcaaaatggaatgtaaatattgacaggactcaggccaaagcaggctctgcgccacgtcaagaagcatagccttatccaaacccatagttccagatgttaattgacagcctgccaaaaagaaatggttcagggtccaatctgtttggcacattgcaacatcttctacctgatctctgagagtcacaccgaatggtctcacatcaaaggactgagaaatccacaacaaaggaaactgctcaactttttaactcaattttcttgaaaagagctcaaaatgattttactttcaacacacagctattaatagatttggaaacactactgtgcctaaaaacatagggaagctgttgaaatattgtgatttttttatacccttttgatgtcacctcttattcatagtcatctgctgggcagttgggctggttcagaaaactaaatcagagtctctaagcagtaagaccctggtgagtctgtga

SEQ ID NO: 50012 - DNA, 1361 bp, Homo sapiens
tctttaatttttttcctcataaacttccacactgctgttctagggagctgcaggggactacataaatgaagtcatcgatcttacctttagagtatggtgccaaaaaataaaaagttaaaagttaaacatgtataaactgtaaaagcaagagcctcagagacttaaaaatatatgttagaaagcctccatttatacaagaaataaagaacagaaagtggtgtatatgaaggtggaaatgctaagaacccagagtattgtctgtaatcactccatcagcacaatactgaaatctgaactgcgtagtcctagaaattcccaatccacgcagcctgtgattgcagaatgatgcaaaggcagatgatgccagagacgagacggcgctgggttcagaactatgcatctaccggttaaccagcgaatagtcttttaagggcctcagcaggacacttaagaaccactctatactgtctatgagtccatctgaatacatctatatgcctacatacacgtatgaattcttggttttccttttgttttttgctgtttctcccctgaggttaactcattgcaacactttggtgttcttccaaactcccatgttaaagagtttcacttgaacagctgtggaaggaaagacagtgcaaatgggcagccctaaccaataccacattccatctggggccctgacaacgatcccactcaggttggttgggcaggtgaatattttcattggctgcacagttacccttgtgctctgacactgtcaaaacaaaaggtctccatggtgcagctgtcctcagtcaccctgcagtcaccaaatatgccgaccaggaaacatacctaaaaaattatggatgtgtaggaagtttcttaattttacagaagtacattttaaaatattccaacccaaatgtaggaggaccttctgaagtaccttggctcattttaaaagtctttccaaatagaatgttgaatttatgaaagtgatggtaaccaaatgattgagtaatcaaaccacattccagaggagaaaagcaaactgggccaatgataagtgaaagcttttgcttaggacagcaaatgctgggtacagaagtctgtgagttcaaagtgaacggagaattactcactccgcacatctctgaattgaatctgaaaattcaaattgcaattgcccatcatcttgttaacaactactatctctcctaataatgtacagcattttcccagtggacttgctgttagagcttctaatagagaaaggaggactcttgaatcccatggtgttggggactggggacccggcaatagctgagggattactgtcacagatatgcagaaatcccaagtcagtcttctga

SEQ ID NO: 50013 - DNA, 795 bp, Homo sapiens
tgtgtagtcttaaggatctttaaatctcattaggtatctgatatgccacatttttacatgattataaactggagtgaatgcttaaaacccatgataagagttcctttatccaagacttgatagtaggaaaagctgaaacttcttatattacaaaagttacctgcttcaaaacagaatgacagaaagggtaaattccatgacagcctcttcataaaatgctctaactccctggcagcattgtctggtgctatatctcttgcagttaatatttgttctctccaggttcccaaggccaaacagctttgtgcctgtgttgcaacattcactcctcaaaccctgtgctgcagacgcgtgagctcctgatgttctaagagtgccccagctgcacacctgcacaggcctgtccctgccccagcctggcccttctgggcattactcaagtactacaataggttctccctcaagacacacaaatgatcaagattgacctgtcccacagaagcagagtgttgattcagtccctcgtctgcagcagttactgtccttgattttcactggaatttagttcattctctagggtcatagtgtgtgtgaatgtacgtgagtgcggatacacatagagacatagatacataatgatttatctcactccatcttttcttttgagttctaagcacccatgtgcaaggattggtgttctccacatgagtgcttagaacacaaaaggcattaagactgcacactgtgaaaaaatgcacagggcagtactacacacacacgtgtacacacatgcac

SEQ ID NO: 50014 - DNA, 1032 bp, Homo sapiens
caaatagttgacaagattactgcctcccaggtgagtccctgtgggaacctctttcagagagaagccagggaactcggtgacacaaggtgctgaatggcagaagcatcatgctgcacggtgggtgcaaacgcagttttgagactaattttaccccgcccctcaaagcttcctgtcacgtgtgtttgttgcgaggtgtctacagtttttcatggttagttgtctttcagtgatttaaaaatacatcctggtttctggtaacgagagccttgccagccttcttttgggttttgggttttgtaattcaaacatgtttcagtgttgttgtatcccattctcatttgtgtaagcctggcagtatgaattaaatccacagctgggagactgcagacaatggggcaacatttatagtggcaactgtggctttcttctgtcatgaaagcctcagtcataatcaataaagctaaaaggtagccatcccagaggccccagttaggtcatttcaatgttccttgttttcctaaaggcttcacaatgacctttctaaatattaaccagcttcggtccatgtgccaagtcttcccaggagaggtttttgtatttgactcacagtatttttcctccaagcaaataattattactgtttcctcatagcacaatccatttgcttaaaaaaatacataatacatagctagagagtttaactatggaaaagcccacatcgtaatgatttttttacagtctccatgaccatggcattggaattcattttcatttttatgcaaagcacatctgaaatgaaaatgctgagtaatttactcaaacccacaaacaatgatggatgcttgtggtttttattttttatcttatcagtttggctccactgaatcatctatttttaattttgccaagaaaccacgcataattctaccccaaagttgtgatgaaaatgtcaagttgcttaggtcatggagcaaacacaactgtggacagaaataatgaggtttgtgagcaaacaggtgcggatccctcacg

SEQ ID NO: 50015 - DNA, 821 bp, Homo sapiens
tactaatgcaagagttagattagagatgcatgtcatagttcttgcatatttctaatattaagttagaatagttgcaatattccatagttgagtaagtgcaagagttcaatgcagtagttgaatatagttagttacacatttacctcgtatgtgatctgttccagggctctcttaaggaaacatacaaaaatatcttatgtttgcaaattacgtaaaagtacatactagtgtggatgaatcaagacctcatcagagccatgcaaacaagaaacctggacgtttacacctggttaggttcatggcaaatctacctcgggatattgtactttgtaccttcaaagttcttcggctttttctagtttactctattttcaaaactaatttctgggtttgataacacctctgacatactcataatagaaacacagcaattaaatctttaaattaggtccataaatttagctgtcataaaatgtgctcacgggtgagtcagaaatagaagccacaattccatagttccggttctacaagtatttttttaactcagatttttttcgcctaattcataagcgaatattaaattctccttgaacccaaatgaatcatattgatattagtttaatgttgcaattactcttgtgttgccttaatattcagctttatattactttttgaaagaagaaattatggaaggtttagaagagaaccttttactagaactgacaacagaggcatgataaataaagttaaagtaagggtaagcgtatctgaacataggtctgggcatacagtcaatgatcagaaaatgctttgagattctg

SEQ ID NO: 50016 - DNA, 570 bp, Homo sapiens
tagccatatacaatgttgtctctcctatatgtaagctttcataagaatgattcactatttttatatataatactgtttttaacctctgggtatggcaatcaaatctttttagaaaatatttcttggtttgatgaaaccatatgtattttgtcccttctgtaattttctccgtcagattgtctttttcataatatgttatgttaatgtgagaagtgcactgtgtactttctgtgactaatattttgttttgataatttattcggactttgcctctgatgatcccatctagcaaccatttgggaaatccagtaattatttgtatttcacaatttgcagttctcattccatcactgtgtctgtgaaatgcatttttgccactctgtccactaaatttattttaagtgatgtcttgatacagcatgaatatactggtgtcaaactgaagctactggatgctttatgcagcaatcgtcacaactgctggttcctgtcagatctgtttaagcctaggttcttattaggtttaatccaaatgtctaaactctttaattgcctaattcttatgcttgt

SEQ ID NO: 50017 - DNA, 990 bp, Homo sapiens
aaaggacagccaagcctatcaagtctgaaatattcaaattgcagggtaaagaaagaggctgctattacatttattttttcttgtggacacaatgaataaatggatgtatcacagagttaaacatgaattttttttggttctaacgaaaggaagaaataaaacacctataattttgtgtaataacctttgctctgaccccaccatgaactctttatctttacgatattttctgtatttgtgagatctacgcatgtggccgtgtaattctctcacacttaatactggcgcttgcatctactagaagctttggaatttcaaaacggtgtaatttttctatgtaaatgtataaatagcagttatcttatttgtttttaattaacctccttatttaggtacagatgtgatatagccttggggaaaaaccaactcaaataataaagaaaatatggaataaaaagcatgtatatagttccttaattcttgatttccttgcaaaaaaatatgaccagtattcttctgggcttttcttttttttcggtcagttaatacaaacaaactttacaggactttacaatctatactgtgacttacattttaaattcaccaatgctttcatgtcatctctctgtattgggatgcctactgctattttgtgtttgaatatctacctagaactcctccctaaatagtttgctatcaatgaactttaagctctttccagattttttatataatgagcaaaggtaactttgttttagttaatttttaaaccatttacttggacccaagtttaaaactaaaaagcattcagctagagcacatactattttcatttataaagattcaaagcagtagacatcccgtatctaaaagacatgcttcagcattccttttaatgaaaaaaatagggctgtgttatttgctttcaatgcattattattattattattattattattattattattaagatagacactcactctgttg

SEQ ID NO: 50018 - DNA, 2059 bp, Homo sapiens
tcttttacatgtattctacctctagattccatagaaagaactaaaagtacatgaatttcactaccaacatctccatcagttaccagctgtatcaccttggatcagtcaggtaacctcccgcgaatctggttgcttccggggcaggggatccgcgggctgcaggtttgagcctggttgccggcagggtggagcagctggagggccaagcctttgagctccagggggggtggccgggacagtgggtagtgccagccgatcggcgtcctggggattgcctgaatgtgaggtctgggttcaccccgcggtgacctgagtcctgggatgcccctacagggatttgctgcctcagggatccgaagtctctttcattcccttactggggatttgaggtctggaggtactcctgcgggggtctgagatctcggggtcaccctgtgggggtctgaagcctcggggtccccgcgtggggtctgaggtatcagagtcccctccgttgggtctgaggtctcggggtcccccatccccgggatcggaggtccggctccccggagcaggcagggcggtgcgtctggccctgaacagtaacgtggcgcgccagccccaggtggtgtcgggctaggggggcataacggtgccgaaagtccgcacaaagccgtccgctggggtcccgccgcgtccgcgagggaatgactgtgccccctccccttcctgatcctcagctcaggtgagcccagatgaggcgccgggtagcttctaagtcactaatggaaatagaaggctaattcaggggttaggggccgtcgtcctccttactcccaggagaagagaaaaacccacggcccagcagccagaggcgcggcgaggcggaatcgggccccctccccgggggctcagctccctccagcctcccgcctcacctacagagaaatcccggaaacgcggattcagcggagcgcggtgacggcggcgcgctcaccccgcgcatgcccagtgcccgcgcgcgccgccaggctcgcaagcaccgcgtaggccagctggccggatcccgccgtctgtcatggcggcccccatcctgaaaggtgaggtacttcctgctgcctgctccagcagcgggagtttgaggaccggcacccctcgtcgcgggcgcactcgggggatcccgtgggaggagccccgctcgcccctccctcgctgcctgtctcccccagaccccctgccgcctccttcctcccccgctgcctgtcccaccaaaaccccctgctcctgctctctcccccgctgcctgtccccccaaaacccccggctgcctgcttcgtctcccgtgctccctgtccccccaaacccccgactgcctgcttcctcccccgtactgcttgtgccccaacccccgtgctgctagttcccctcaatcccccgctgcctgctccctcccccatgctgcctgtcccccaaatcccgcctttccccctacctgctttcacccctgctgccttagtccctggatctggggctcactggcaggcagagtcctgccctccggaagttggtgtggggccctcctgggtctggtcctgttcgaccccctctgaggcccacctggaggagcggcagttgagtttctatgctaattgttccaataataggagccgccttttactgcggagtctttgtgtgccaggcgctgtgcttaggctagtatggtattgtctgatttttttaaccgctctatcaactctcttatatcattttacaggcagaaactaaggcatcggacgtttaggtgactctccctgtgtgtggctagtcagtgctgacagggccttagaccggagctgctgtcctaaccagtatatgataccgcacgcagtcccaccctctgtgcacctggaagagcccaggagaggggaatagcggacacgtgtcttgtagagtttgaccgtgagaaaaaaggggcctgtattgtggggcctggagtcataaaacctcatagccaaaagtaaagactagaggctttatacaaagtctgtaatcagatgtggctatttttctaatgttagta

SEQ ID NO: 50019 - DNA, 721 bp, Homo sapiens
aaccccttgttaccgctctgtattgctatgatttttattatcattgctacacaccactctcatccaagtactctgccagatactttgtgtatattatctataatctcacagcaactctgctgtagtatcataattctgcatttttgaaaggagaaaagatttagcaaagttcgattttgatcagttactcaccttctaagtgatatataggatttgaataaggtctctttgattcctgttatgttttttttccactgacatcatgctgccaaaaacagagaaacctgaccctttggtaaataggccaaaagtccctcaacacagttccaagtttaaatcagttcatgaataatactgcctcttatttgcctgcagtcaacaaaatggtcagtgctgctcacttctatcaatatttctttttaaaaatctatttcataaaccagctgaataagctactttggtttgaggattcatgtacatatattgaagttaattctgtatcctaaatggtatgctcttgggttgaaagcattgacgtggctcttggtgagcctatccttgttccaagaatgtttgattcttcagtgtcaaaattactgctatgaagttaccagtacttaaatacatgttctatcttgttcagagaacaagtttatcttgttatggaagtcagaggcaaaactcttaaatgtctgagagtcactgccagcacataaatgat

SEQ ID NO: 50020 - DNA, 1755 bp, Homo sapiens
ctgggcccaggtgcctgcaagaattagacctccgataacgttaacacccactttctcactgctctaattgtgtgcatcccggcgcccaggggcttgtgagcagcaggtgcgcgttccaggcagctccagcgacccttaaacctgaccgcgcgcacgtccggcccgagggagcagaacaagaggcacccggaccctcctccggccagcacccaccttcacccagttccgtcagtcgccaccacctcccttcccgcgtccgcagccggcccagctggggagcatgcgcagtggccggagccgggttgcccgcgccccagcaggtagctgtactgcaactgtcggcccaaaccaaccaatcaagagacgtgttattgccgccgaggtggaactatggcaacgggcgaccaatcagaaggcgcgttgttgccgcggagccccctgccccggcagggggatgtggcgatgggtgagggtcatggggtgtgagcatccctgagccatcgatccgggagggccgcgggttcccttgctttgccgccgggagcggcgcacgcagccccgcactcgcctacccggccccgggcggcggcgcggcccatgcggctgggggcggaggctgggagcgggtggcgggcgcggcggcccgggcccgggcggtgattggccgcctgctggccgcgactgaggcccgggaggcgggcggggagcgcaggcggagctcgctgccgccgagctgagaagatgctgctgtccctggtgctccacacgtactccatgcgctacctgctgcccagcgtcgtgctcctgggcacggcgcccacctacgtgttggcctggggggtctggcggctgctctccgccttcctgcccgcccgcttctaccaagcgctggacgaccggctctactgcgtctaccagagcatggtgctcttcttcttcgagaattacaccggggtccaggtgagccgcctcccgctcccgggtctcggcgtccacccgagctcccgggggcgcggacctctccgctcccccacagctggcgagggtcacccggccggcccggcggacccagcacggagagcacgtgccgcctccccgccttcctctccgcatgcttcctgccgttctgccgagatcgctctctaggaagctgtggctgcgtcgtcctgaggctacgagtgggacccgccgcccctttccccgcccctcgcctgggtctgatgctgcttagcaaagtgggtgcagatgcacgttttaaataatagggcacgcgtttagcagtttctggcctttggtccaaagaggtggtcatgttggaacagatcggagacgtctacactccgaagtgcgcttttacagtgacctcttgaaacagaagtacaattcggtcttgtgttctttcccctggacaagtgaaagctgggcgaagaaatgaatacatttgttaaccgtagaagcctaactagatacatttcttgccaactttaactgggcttgaatgtgtgggtgatctgttgtctgattactttctttctgttactgtttctctgtagagattggattcgtagattaaacttgagaaacaaaccataaaagtggaaggccctctttaacagtaggtatttgaagtgttataaaaaaaaaaaaaaggtgaatttttcttttatttctcagtttgaaagaacagctttattcttggttattcctaatgtccacctagtcctcttttacttttcttggtagggttagggtggc

SEQ ID NO: 50021 - DNA, 1158 bp, Homo sapiens
gcttttcttgccccctcctccaagccatgtaaactaatcgtccctcaagcccatccggaccctgtaatgccatggcttgtttgcacctgcatagatagcagatcatgagagtgtgcacagcgtataatgccttctcagtgcatgttgggtgtatgaatgaataagtgaataaacaagtaagtgaatgaatgaaagcaagcagccaggaagcgctgcagctcagtctagtcttttcccagggcaaacacccagtaggtggcgctgttgcaccggcggttgcaaaccctcagagcacgtttaaacagagctctctgactctgggacagaggatgtggaaaacctgtgtcttcaaatcacgtcattaggtttgaagatgacttaatgtgaaaataaatgtattttaacgtcattaaaataatccttagtactttaaaatctcagctagcttctgaatgctttgggaatactttctccatagttaactgcacacaagcccgtggggtgggcagggcaggtatttgctctctgagatccaaagagggcagtttctcggctggtagaggcagagctggatgcagagccaggcacagagccaaggcgcgtctgaccccagtccagcgggatctcctgcaagccgcagtgtttccagaggcgcacttcagtgtgtggagtgaagggagagtctccggacatgagaagagctgctctgagcagtgtggcggccgtttttgtttcctttctctttctcctcctggggctaggcagacaccgggcacaaagaaggaaacaggccttctgtgagtgcagcagcaatcaataaagaagcagcccagagcggccatccctcttctgtctgctgtgacgctccggcccaggtgtccctggggctgccctccccagggcctgtgtgttgcatatatggggtggggtgagggcagctggaattgaggtggggaccctgcaattgtgaggggctgcgtggcagaggtgggcggctctcgcaggcctcttcctggacacttgcaccccctcatcctgctctctttttcttcctgcacttacatcatctcatttgtttattttctcattgtccgtctccctctacaggagcaccagaggagggggacttcatctgacttgttcagcactgtctcccag

SEQ ID NO: 50022 - DNA, 1993 bp, Homo sapiens
gaactggagtgcttgctttcaggatcatccttcccagcccctcattctgcagatgaataaaccaaggcttagcaccatgtgactcgtgtgaacaaggatagggctgggataaaacatgttcccgattcctcctgcacgtcccaccatcatgtcagggtcatggctgctttggcccagagaagctgacatacacctggctcacaggaagccccctcctattgactggggagactgctaacctggagaatgtggatgcatttctcaggagagggagaggaccgcctgcctgcacaggaggtgagtccaaggcaccggctgagctggcctgatgggtggggcggcagcacctcacctgtaccagggcaccccaggaggctgcacccagtgacgtgggctgaggatggggccggcccctctctctgcataggaagctggcctctcagtgtgaggagtcgtcttgcaggggaagcagcaatctcatccacataggatactgtctacatgtccaggacaaggatgcaggcagctgcctgtgacaagcgccatgaccctgccaggctcactccttggcggctcacagaccctgaaggcttggcagggcttgcctgctgccttctgccaactgcaggccactcaaccacgggatgctttcctgctgcttgttcctcgtcccttgggacacggaggcagccatccgagactcacatcagccccattgtccccagccctggggatgggaaactcttgcaggtaccagagcttacctgaggccatctcagacaaaagtaagcagagagtaaacagcagaaggtaggaagttctcatggcgactggcaggcaacacccaggatttcaggaactggggagacgctggctcctttggaggctgagctgacagaggcttccagaggctggagcgtcactgtatttataagactggtggattgcacaacctcgtcgacggaactgaagggaggtgccacagtcaagggtgaacttctaatcgctaacccctggtgtcatttgccctgagcagtcagcagtcacatggcacattgtctccatctggctgccgctggatttagctttcagcctggagccctggtgccagctcctcctgtttggttttctaggttaggcagttctgatggggtttctggaacaggcagttcacactggagtccctccttctggatcacatggaggagagccacagggaagctctgagcagggggccgctcggctctaagctggtgttggcctctttagtttgattgtcttcctgcaagacaaactcaaacttcaccctcttcccttgcagaaggagagctggttgtaatgaagtttcttcctctggccaaggctaccttctcatctctccccttatgcagaacactctcctcgatggaccaacttttctcttttcccactagacgtgttcctgggacgtttccaaagggcactcctcagaaagtgagcccccagtgtggcccttggagggtgagggtctgggccagcttgggcccaccctgcagagctacaactgccagattggggtgctgttagcgactctccaagtatccctcaggttttccttgattctaaagatttaagaaacattttatttattactgattttcattgtaattctgtgagcagctttcctgatgtctcagtggcttatttgcaagcagcagacgctggctctcgctgaccaaggaagggaagagtttattcggaggatatcagggttggtggggggtggtggcattgctggagaacccagcttgaggctcagtttccaggaatgacatccaccctacactgtcacggtggtccaatgagaaccccatactgcagccacatggcatgagacacccagagtggagtgaccctcagccactctaccgctggcagaatgccattctgcacccaaacatgaacctgccgtatactcccacttcaaccctgccagagaaagacagagagagat

SEQ ID NO: 50023 - DNA, 1425 bp, Homo sapiens
gcctccccagccatgcttcccgtacagcctgtggaacagtgagtcaattaaacctctttctttataaattacccagtctcagtctcaggtatttcttcatagcaatgtgagaatggactggatcatatagtaaatctatgtttaatttttaaggaaccaccatgatgttttccatagcagctgcaccattttatattctcacccatagtgtgcaagggttctgatttctctacatcctcatcaataaatgctataacatatagtttgcaggcatcatatttcattcttacaacaacccagcaaagcagaccgtaatgcccaaatatagacaggcagtttggagatattagtgaaatacaaaacaacctttccagggccagctaggaaaagagtgaagtcaggatccagacttggctttggattccaaagcccatgcccttcccagcctatcagactatatctctaatagatgaatgcattcttaattcacctaaaatgttagtataaattattaccttttaaactgggtacctgctcaatagagtattttgggcactgggttgtcaacaaatcatctctgcaccatggtgtgccttggttccgggagagcatattctaatgcataattagtagaaataatggagtctatcatagatttgctctgatctgagatggttagtaacagggcacacggtgcacagattcctttccttttactcatttggcaaacagtcacggagcctatcctctgtgccgggatgtgcatggggctgggattttagggattcaaaggtttggttcctgcctacgagccactgaagccacaggtggcagggacagtaaacaaggtctgcccacagccggatgagataaaagctggtggaggttaagtgaaagccatccctgctctacttttgaaggtaggaaccacagccaggtttcacaaataaaactgatgacagaacccatgtgtctcattgcgctggctgctgagaaattgcgcaaaccgtggcaacaatgagcttttgttttgtgaacccaaagtattagagacgggtctcaatcaatttggaaagtttattttgccaaggttaaagacttgcccgtgacacggcctcaggaggtcctgatgacatgtgcccaaggtggtcaggggacgccttgctttttaaacattttagggagatatgagacaaatcaatatgtgtaagctgtacattggtttggtctgtaaagttgggacaactcaaggcgggggcttccacgtcataggtagataggagcccaaagtttgcgttcttttgagtttttgctcagcctttcagtgaatatacaatatatatgtgagagtgggataggggaatagtcacttatgtcttagtctggctcagtgaatctgcattctccatcaacaaaagggcagag

SEQ ID NO: 50024 - DNA, 1603 bp, Homo sapiens
tggtatgcagtggcacagtcatagctcactgcagtctagacctctctagttggagcaatactcctacctcagcctcctgagcaggtgggcctccaggcttgtgccaccacacccagccatttttttcttttttttgagacagaatcttgctgtgtcacccaggctgcagtgcagtggtgcaatcacagcacactccagtcttgacctcccacctcagcccctagagtagctgggactatatccagctgtttgtttatttttttgttgagatgaggtctcactctgttgcgcaggctggtcttgaactcttgaactcaagtgatcctcccaccttagcctcccaaagtgctgggattataggcatgagacactgcacctggtctaattccttttcattttaaaaagatgtggaggaagtagattggaacgagggcaaggaagatccaatgagacaagctgagtggctgttgtaatgatctaggttgctggagatttttaaaaatgtattttgttcactgttttattcccagaacctagaagagtgcttgtttccaaatagacacccagtaatagttaatcaacaaaattcagttgctggtttgagggtcagtggaacgtgggtcccttttactgacacgtggaattgctgatcaaatctcctcttagcattattatttccagtgactctggagagggagggcccttttccaggctttagggccaactgacagagaaaaatgaaaacccaggtaccacaaggctgaaaggtgaagacggagtcatctcaaattcttcccaaccagctcatcaagatctgctggttgatataaatgtgttacctggaaggatgacttcatgtgtttgttttctgttttgaagaaaggaagtgtatttggcaagggaacttcttcctttgttcagctctgggaatccttaaagtcaacagatttccagcaggttatactcaaacaaggttgtgtctcatggcaaacaaggccttagaaacagacaggcccagttttgaacaccagctcaaccattctcaagacatgcgatcatgggcaattaacctatttaatatccatgactcagctttttccatctataaaatgaaataatcctggtgcctatatcatagaattgttctgaaaaataaatgagataatatgtgtagtgcattaattaaaacatggaagcaataagcacttgctggatgtcaggggtcattacttccactacagttaaagtggaaaatggaaagaggcctgctggagccagatgtcccctggcggacgctctggtctggggacaggcgacacacctgagtggcctattgccttgtgctgatggcttagcctggtatgtctgctgatcacgagccaggaggagtgggaactgagccatagccacgttggaggaaaatccaggagcaaactccatgagagagtcatgaaatctggcagtggaagggctgccgcctggaagctagtgcttggtatatctgcatgagaaattaagggatcaggatgggaatgtctttacgttaagccttttctgcttgaggtgactgcatatgacaggggacccagagtgacagcataag

SEQ ID NO: 50025 - DNA, 545 bp, Homo sapiens
aagtgaggtattgttcacttggaatattccactgtgattttaaatcatctttagtaagattttgacagttttgtaagtgtttgctgcttccagggactcatatttatccatgtaaatgtaggcatagctggaaggtggagtgtattcagctcttcagaaattaagggtttcattttacattgaatcttgcctttggctctcagatccccttgatcaactttgtcaatgattttccctactaagcatgtgagaaaaagaaacaaaggtgacagaatacaaaaattcctgcgaatttccaaaagccaaagttcacactccaccgcaattttgccatttactgtcagttcctgtctgacccaatcagacacctgaggtctctaactggatccaggctagttaattcttggatccaatctgatcctggacccagtccagtttctgtcacaacttctgaatgcagtttggataaaaaaatttgctcaaacaaactcagatagctcaaatcataaatcagcggggcttcagaatctgagagagaattgagc

SEQ ID NO: 50026 - DNA, 2419 bp, Homo sapiens
atttatagtctataggtaaggcaaatatgaaccaatcacctaattacaattgagattcatataatacatttagggtgctccaaaagcatgtgatgccgggattggccaagtcttgggtgtagaaggaaaccatctctgatgaaatggcatttaagatgactcatgtaggatgaatgaaagtctttatataatgtagagagattcctattgatccatatgaattcctctcttattcacatgtgaccccctggttccagctgtcctggacctccattgtcaccatccccattgggccaactccaggaccagcacactgacaagaagtcagcgaccctgaattgggagcccccagcatactcaaagccttttgcatctgtgtccatagcctacgaccttctgactcagaatcagatgagtcatatcacccaggtgtgatatcacatgggttcagaattgcatgttaagaaaacaggcttaggagttgagccaccttggcttcaagtcttgaccccacctaagaagctgtataaccttggaaatattgcccaacctctctaagctgcaatttcctcatgtatagaatagggaggaaaaaaaagtgtgcctcatattgttgtggcagttaagatgatttgactgcagcaggcagaaatctacagttaaattggttaaaaaataaagagatgcattatcttatagaaaacgtaatctgccccagggatggaagagcagatccctggctgcatttctctgtggccctcttggtccatctttctccttttgtaggtttcaacctcaggcaagtagcaagatggcagctctaaaaattagatttaggcacagtgtgcaacagggaaagaagagaagctcccccttctcacagctctctcctaggagcgcatcctagatctctggtacacgtcccctcaaggtcctgttagccaaaagttggtcatatgcttgttcctgaaagagaaactagccaaagaaatgggaggccctcaaacaaaccagagccattgtacagcagagaaggaggcatcttgcttctggggtacaaggcgggtggaggtggagaacaaaacagaattggggtgctatagagggaaaaacagggtcgtggatgctggggagggtctgctatagagtgtgggaaggattcagtgggaattgcacataaattgcttattactgtgttgacttatataaataattaatcattagcttggtaaaagggcaaacccaaaggaagcttctgcagctctacagggaccaaaataactagttcattgtctccacttagtggcctttactgtcacaatgccctgtgtacctccccaagaatgtccctttctatagcaataggcctggcagttgatgggtacctagaggttgggggttccacttcaaaagacccctagtcaaccctgtggtgtgctaaggtcaaaataaatcataatctggtagctgtccatcccccagggaacacatttcaatggaagatgcctgaatctccttcagattgttgcagagctgatattccagaaaccagagggcctcctgggcccttcaaggtgtctgaggccaccaaccctatggctttctgcctctagcttccctcttttgaaaacatccacaccactctgcatagctccctgcgacaccaagagcacccgccaaggacccaacaggggctccaggaattgatccactgtgacaatgagcccactttccttctttgaaatgcaggctccagaaatctttagaggcttctcccaggcaaacctagagacattctaaaggagaaggcctgctgggaaaggggtcgggggcgggtgttagttctgagccattttagttcttctaaatgtggtctgcatgacttctcagtcatggccccctctttgggtcttgcccgatactctctctccgcggttctcttctgccttgtttttctaacccatttggcaccttaccttacttcccattcattgtttggctcctgggattgctgtcccagtttggaatgtttattttggccctgactttgcattcttccagggacttggttttcagtatttacctatctgtacattgccccatgactcccagagagaaatacctccttcctctgccccaccctacccacagactgagtgtgtactctggccagcctcatctgaggcagagataagtccataatcgacagtcatccttcctttccttctactttgtgaaagctgctgttccttaagtgtcttgcagaggcaggagagaggtcatcggagtaaaccgattctatcccctatgggaattactggtacccattacctacttaacacttcaggttatatcttaaatatatgtttgatttttagaagtcaggaaatgtaacaatacagaatgaattatttaatat

SEQ ID NO: 50027 - DNA, 1504 bp, Homo sapiens
tccagtgaatttttttatttttagtagagttggggttttgccatgttggccaggctggtctcgaactcctgaccccgagtgtaagcaatgctgtattctctgcttgcataattgtcatcttgctctcttagctaatactttggcttgcgacaagacattccttttgggctctttatactcttggctcattgacccagacctgaatatcaaagcctcttagacctgcactttctcacggagcagaggctgtgtgcggcagggtctttgatgaatgaaccagcccctcctgtgtggcatgcatgtggcaaggtgcccggtatgcaatcactcaactgccctgccttctcgacggaggtgggattgtccaggtgttttatcatgtccctgtttccggtcacacactatttatcaggagggatcattgacaggatgtataccaagtcgtgactaatactcattcccccacatcacctcatcttttatttggttgctgttgccataggattagcatttcctaccagggccagaggccagctgagaggaagagctgatgcattggtgaggaaatgaagttgcaacaaagcctactacattaattccatttgtagaaaacttagagctctgaagaagcaaagaaagccaagaaagtctaaataatttttgaatgcttaataactccctcacatttaagaatataactttacgtaagctatagatatgcaaaccgtgtgtgttatccacatccattccctcctctggaaatgaaggattggtatactactcctgtgctctccctccaccagacaattcgatgtgcacccaagcactatacacatggaaataatgaattctagaaaacataactatcacaccagcatggtttaaatgtgtttatgtatacaaatagttgcatttacccagcaaaaacaatagttaaatgtttaaaaaatacatttcctctcatatgcaaataaactaggagagtgagcttgctctgctagggcacggtcacagtgacttgaacactttccaactcagccaggtctggctaagttgcacgctgttgcctcacattctctgccttcctggaccttccccgttgcattcctcctttcccttgcctatttctaagcctgattctccagtttttatcttcatagggtaagattttggaattttggaactctttggagaaaagctactccacagaaagagacagagagagagagaggttccctttatctctgttagcatctgactctcgtttcctgtttgtctgcccttgctatctctttaagaccgttaaaatgactttattaaatgtaaatatatgaagacaatgcatattgtggttcactacacgtgcaaaaagactgaatcattagccacctggtaggactgagaaatattaccctgcatttttttcttctctgccctacaagtttctattgcagtttgggttacagcacagggtaacgcaataggcactggaattggtcttaga

SEQ ID NO: 50028 - DNA, 1107 bp, Homo sapiens
ccatggccctggagcccacttaggaagggctgtgccacctgtgtggaaactactggtttttgggtcacaaaccatattccaccatcagggtcaccatcatcttctctcagctgccagtcttctctttggacgtacctcaaaggaaaggtgagatcaaagaaaacaaaatggaataaaataaaataaatggaagtgctgagccatcagtgccatttctgagcaagcaccttttttttttagttctaacccattctgttgagaaaatgtgactctgcaaagactggagagtgagatctctggaaagtgcttcccgtgcaaaactcccatttttcatgtctctgaatcaatatttgtagattgaccccatgtgccggggcgagacactgcctcccgttgttcacctctgatcggatgctcccttccttatggaggctgctggtgcaggtaagggcttcctctcacttgctcccaaggagcccagaaagagtgatcccatcatggagcagcagaaagtttccatttgtttgaagaggagaatatgctggactcgctggatgaagccttgagccgagagtcctgccctgtgccctggagcggagctgagtgactcaccccctgttctctgctgggagtggagggtccatgcggctttcctccctttctttcacctggtgtgcagttttactcacggcttctctcctatcctctgactcattgaccttgatagggagggagggttacctggaggcattccaggaggctgacttcagcagtcacctccgccctgggccgcaggggcactggggacaccagtgcgtgactgctcccggcttgctgctttccttctcacatccactttctaagggtaggcagttttcctaggaactcagcaagtcataccttctcagagacttctgcagagcagcaagacaaagcttactcagaggcgcccacagaccaggaagggtgagtcaccggagcaaggctatggggatcctgatccactgtttgcgtcctctgtagagcaacaggacattttcttattcccaggcccctgtgtgctgaaaacgggccgccaaaggagcctctgccttcagccaggcttgg

SEQ ID NO: 50029 - DNA, 613 bp, Homo sapiens
tgaaacaaagggggtagttgggtaataggccagggcccagcagctggttccagtgaggcctgtctgcaggatgaacgctgtgatcaaatgtgtgactcatagttgggaggtgtctgccaaccccggctgcagggcacagtcggcactgaccgggaaggcaggctgatctgcacccttgtctgcttcctgtgctgggagcgcagcccccaccccacctcattcccccaaccctatctccacatggaattgttccactggctgtcacccagggagccccttctttctacccatgttcagttgggtacttgaaacagcacatgactcatgttgtactcagccaagactaacagcatcaggcttctattgttcaagagctgactccaagttccatgaactatttcaatgagtggagtccttgttgcttacattgcagctctctaaagtcatggaaagaaatgaccacactggaggcacagaaaagccaaggcacagagtagcacaaccttgctcttccttaaacactatctctgaaagatcatcctgaagcattttccttggagaaccggccataggcaccaggttgggtttgccacaagggaccaatgcagacctt

SEQ ID NO: 50030 - DNA, 2294 bp, Homo sapiens
ttaatgcaacgccagtaaaaggaaagaaatatgtgtggaaagtgtctgaacttcagcacactccactggccagggctgaccaggcagaaaggagaaagtgacaactttaccacccactagccccctgcctccctactcacgcagagggtaaattacgatattcacccaacttttccttttcttttttcttcctccagtgctggaggaaagaaaatctcagagggaggaatgtggttttgcacccactacagtcgaaaccaaccagacctcaggagagaaaaataactgcggaattccctagggctttctgtcaaattttcttctcagaaagggaaggggagaggagttgttaagaatagttcaggccagtgatcaggaaagccttctgagcctgactccgcactgaatgcatcgccaaaactcctcgcccctagaccattgggctttgctatcggctctgcaaaaccatgtgcagggagagcttacctgagagaaacgcacacaccgtgagctggcgctctccgctgcgaatgcccggccgcctccatgcccagcagaggattctatgttctaagtgtgtgtgtccccggataccagcaaaggttaataacgtgctcacagcatgcgtttcagagggctcagccagggctcggggaaaagggcatcatctcgttgcctctggagccccgctgctgcataccctgcacccccaaaccatccccccgggtcctggtcccagcagccaggcggccttccgtctctcccccttgacaatactctagcggtggaaagcagtcctcaaagcgcttcagcctccggccgcagacagagcagcaagaccagagaaaccatcctaacagtcggtcctccctcctggaactcgtaggaaagtttccccgttttaaagagcgcgattctcgaatgaatcaaaaacaccctccagctcctcggtcctcccggccgggcgcctccctgcacctcgggcaccacccggggctcacgcggccccggcactgcccacttcccgagcggtcgcctgtcaccccgggggtagcccgctcggcgatcgcagcgcccctccaaagctcccctctgcgaccacgctcgccagacaaaaagaggccgaatttggagagcgcgtcgcgggctcacctctgggctgcgctcccccggcccctccgtcggtctccgagccgccagccgcccggccggagcattgttcgcagaaggtctgcgcgcggtgcgtgcccggccgcgggcgggtggcttctgcctgggcccggcggccgggtggcagctgtgagcgcggctccgccccctccgcctccggtgacgccgcccgccccagctcacgccgcacctccgcagtccctgccgccgcccggccccgcctggcccgcgcgccccgccgcccggcttgcgcctgccgctcccacccggcggtctcctacccccagggccccgactcctccaaagtctccaggccccgggactccctctcttgcccaccctcccgccccggaccggcaggctccgcccccagccccagacttggcgcgggctgacccccgagcccagcacccgtttgcaccccctcctcggtggggaccctgcacagctctggaggggcgagctctggcgttgcaatcctccttttgccatcatgcgtgtataggtgcccggcatcacttcatccagccggccctgcgggaccctgggaagagagggagaaggaaggggaaacgaggaagtgtggggtcgggagtggaatacaggtcagggtccgaggcgggctctgaaagccacgtgagcacagcgagcctcagctctccctacctctgggaagagggtggcgccggagggagcagggctggaagtcccggtggcggattccaggttccgctcagtccctggactgcaggattctggcaaattgcttaacctctttgaactttagttttctggatgtagaatgcaagcgttgcactgcagggacctggccttctaccatgctgggacatccaagtcttccgcaggccagtaatacacctgtgtttacaccgtttccagtgagtcattcactgagatagaacgagttcgagatagtcctcgggctaaaaaaatcttttcactgggagtataatagcttaagacccagtcagtcctgtagcttgacctgggtgtttactcggggagccagggctatggtcacctcccagggccatgccgggtgggaagaattcagtgaaatggaataggaagaggacccccctcccccacaaaacaatacctgc

SEQ ID NO: 50031 - DNA, 2466 bp, Homo sapiens
gcctgggcaacagaatgaatctccatctcagacaaacaaacaaacaaacaaaaacaaaacaaaacaaaactatttcaaacattttaagctaatggcagcccataagtgccacatctcccttttgacctcttcccataggccctggagtctgtgcactcccaggcacacataccctgttgtctctcaagcatccgcagtgcaggtgggggacttacgttcttacaatcctaaaacctttgattataacccacactaaaataagaaaggtaatcaaatgtgtgggtggaagcttgccagacatttgtagagttccataccgttcataaagtgcttaaaaatgcttaatttcatttgaataacacttgctgttgtagctatgtagatttttctttctctttttcttttttaaaaagcaaaggtatatacaacagctcatttaaaaagactagacagaccctagctccaactaattctctagattgagcacgtgagagaactatgttccatttccttttttggtatcgcaggccttgatctccaaacaaacacatgaagtaagtgtctaaactctgggtggaagtaagctaatcattgacattcaaaacactctgctacttgacacacttaaacaataaatgcccagctggctaaaattctattgctacaaatcattatctctttaaggggcccacataaatctatgcaggtgtttggaagactataacctgtctgcgacttttttttgcatctctaggagtgttcagctcacagactggcacaaaggaatgatgactgtgcctttgtgggaggaggagagattaggtcattgccaccgagggaacacttgctctgacccaggtggctgtcaagaagcgacagattgaatccctctaactcatgtggcaaatagattattctcatttcacagatgaagaaactgaggctcagagaggttaacttgtttaatttcataaagcatgagagtgggaagatgagatttgaacccgagttcctcagaattgtataatatcttgctgtttactctttcttttctctctctctctcttttttttttttttttttgttgttgttgttgttgaggcagggtctcgctccatcactcaagctggaatgcagcagcacgatcgtggctcactgcaacctgcacctcccgggctcaagagatcctcccacctcacatcctgagtagctgggactacaggcacacaccatcatgcctggctaatatttgtattttttgtagagatggagtttccccatgttggccaggctgttctcaaacttctggactcaagcaattcacccacctgtgccttccaaagtgctgcaattacaggcatgagccatcatgcttggcttactcttttttttttttttaaacaatcagtttaacttctgaaatgttcatattaatcctgatgctgctaaaaattgtatttctagagaaactcacattggcacttcaaaatggatatttttgtaacctttaccagaatacaacaaagcttcagaacaccactgaatgtcacagtgaattcgtatggctggagagctgcctgggaattaaggctcagatcccaggttcgctatggaataaaaatactatttctgataagatagatggtctctcactttggtacattttcttccactcttttaaaacaaagatgactctttttctgtgtttttgcttctgagataatatgaaacttcaggaagtcctgtttggttcagtggagccaactgggacaaagttgctataaaaatctgaagaatcagcccctgtaaggaacaatttgacaaccacaaccatagccagcagaaacatgattaacaccatcatcatcaatactaccacagccatcatcaccattaccactatcatcaatatcaccaacaacatcatttttatcgtcactgtcatcattaccatcatcatcatcagactttcctaggataggacagatgaggtagtttcctcttcctcatgtgaatttatgattttcctatcataaattatcccccacaagttatctcccacaattacccatgcctgttcaaacttcaaatattttaaccatgactttgacaggatacagactttgtgtaagtgaaaacaaatattcaagatgcatgcatggcagaggtcatttacaaacttctctctttgatcagtcaaattcttttcattgtttacataatagtggtcagccttcaaaagtgtctttgaagtaagtttcaatatatgctttgcctgactcactcaccaacccaaaacacacacacacacacacacacacacacacgcgcgcgcgattgcatacacacacacttacttgtataacaacttgcttatatactgatgttctctaagtacaaatgtcctcccatggcctgtctctcaagtccccagatttatacactgtgtcactactaaacttggga

SEQ ID NO: 50032 - DNA, 996 bp, Homo sapiens
tgttttcccaccgtacccttctgcctctcgggctacgggtgggatggcactgggggcaagaacgctggacgccggctgttaaatggtgtggtgtccactcctagatgcagctgatggatggcggccctgggcaggttgctggcctgaccccaccctgggtgcctgtcctcagatccttatctacagaaagatgggctttgtctagatcactgcagccctttcttgctctgcttttctagaagtctctctgtgactcatgcagctgtgcctcctttcccaggactctgccctgcctggtgatgacacagcacgttcagcacatttgtttccagggagagcactctccagaaggaaccagggccagctcctgtggcgccacttggtcaggctagctggaggttgtgtcaacgtctcggagagccccttgattacagtttataagccggttgtaaagtgcccattctcgggcgaaacttggctttcagttctctgagatggcagagcattgcgaactggtcactttgaaagctgagggagaggtggacggaaatcaggtccgctccaggtggcagccccgcccttgcttgtcagtcccagagcagctgctgtggggtgtgccctcccaggaggggatggggcaatgctgcgagcttgcaccaagctgggagcagttctctgtagctctctcttctcctagggccagtaggagtgggtgtgctgatgggggctcttcttacagatttttgttatgatagctactaatatcatgagttgttgctactgacaatacataggatgatgtgttactttcctctatgacgactgcatttgaccttgaattaggaaacttacattggagctggccctttcattcgaatgggcctcattcctcatctattacatgggaagaaggagtgaaataaaccccttttcttatcctctgtgaaaattctacaccaaacacaagagcaatcacacaaattgagaaacatgggg

SEQ ID NO: 50033 - DNA, 1344 bp, Homo sapiens
agaaaatcgactgtctgcctgctagagagtgtgtataagcacctccacaagcctgcttcacttgcttctcacagccgttttagataggtcaggaggccttcatatgcccacgggaataatagggcgcttagccgagaccacgtcgcaggtctcttgacatctaacccagtgccatttccacgtgttcagatgctatcctgggctattccgaggacaacacttgaaacgggaaagaatgatgtgcctgggcccaccagagattatgggaaaccttgatgctgtttatcaccttgattcaaatttcatgttcacagcctgagtctacaaagaagagaaacagaagagggaagcctggtgtaaaactctttcattccattcttgtctgtctttatctgctccaactgtgagggctgcttaccctagaagcagatcaatgcagagatggacacatttgcagcacctacaaagggtgagaaaagacaggggattcccaggcaccggaagaatgaggaaaacagtgacctttgttcccaggctacagaaaaatgctgtatctaaactgacatcggccggctggatggcatttagaagccaaatgaactgctgttaagcggcgaggtcaggggttcagctaattgtggaaccacgggcactccccacagacccagaaatctttgtaatctatggcttagggacatacattgtgaaggtgatttttacagttcatctttgaaaatagaaagacgcgggaagctctggctgctacacatactgatagtagccttgcctggtgtcttagaaacatctgtgaaatatagctttctggcttaaataataaaaggagatagaaagataaaaagaaattacaacaaatacagtgaatgaaccagccttgataaggtacctgcagaaaacgaccttattttctctctccaatgcattagaatccatgttgtaattttgtacattctgcaacgctggatgaaaaatcaggcaaatcaaataactttatcgctattggtaataaaaagtcttctaggttgtttaaaatccaagatgagtctcctggaaatcaagcatttcaataaataaaatggccaaggcaatgtaggcatcaaaacagaaagctttatctaaagccaaagttcttttcctcttctgttctgtgcctgcctgaggctcaagatccgtgactggagattctttcctcctcctgctgcctcgtgatattgattctggcttccctggggctggagctgaggggaaggagatatgggaagggaccagaaagtcctcgttggcgggcacagctgtaatgagacatggggtgtagagatgaccagt

SEQ ID NO: 50034 - DNA, 783 bp, Homo sapiens
ttccagtttcaaacatgagatgaccaaggcatacaaagtcaaatgatcatagaggtggatggcaggcaggatggcagtaagtgtttgcggctagaaagtttgcttctcatctcacagaaacaccctctctgacagctttgcactggccattgtccaactttggcaggatgccaaaagacaaactaccaaggtcatgtgtactttcattagcaagagctgccagaagataggagataggcaaaaattcaccaacagagtaaaattttaaaaatcagacgtaattcttggctttatttctcactcttgattagcggacatccctttggccctttccctccttcccctttcaataattcattcttcttcatcagtccttcgatccctatgtttgtgccctctgcattctgccaaacaaatgctcattgacttccacagtgaataggcagacatgctaaaatattcccagggcagctatttgcttcctttgatcagatgtaaaaatgtctggaatccagattagcattgcagctatggaaaagaatttccagggaatcctgactcaggttttaaaagtgaatgcatctaagcattcatttggactatgaaaatagaaatggtcctggtccccaggggtcaaagaggatccagaatgtactcaaaactccatccagctttctgcaagatatcctcacaattatgcacacgatgccgtcctggtgggatcttggagagtttcgtgaatggaggcggaagaactcgactcctcttattcatcagcttttc

SEQ ID NO: 50035 - DNA, 2440 bp, Homo sapiens
aaaggcttgtcaccaagtatctcattgaaactttacaacttccctaggaggtgcgttctatcaccttaggaaagtgagactcaaacaggttaccttgaccaaggtcagatagctggcaaatggcagcgctgaaactcaaatccaggcaatccaactctaaaacgcttgttttaatcctaatggggaaataccctgtcctaacgtggaaactaggtaggcagaaaaaaaatacggtttttcaaaggagcatgattacaaagacagaagaacggtctagaactctcttactttaaacattaaccttacagctaccattttttgagtgcttatccacaaaaacttttcctaaagcacttttcacacatttctttttttaacccatggaactgccttttgccatcgtctggcctcagatctgcagctcttgtgacagtgcttcagtgccgtctctgccaccttggtgtggatgccccttttcaggctcaaccacttcagattctgcatatttgcaacgtttccctgctttcctcactactgagtttcctggaaccaactcccttcatggaaaacaaaacaatccaatgcaatccttggccccaggacacatgaccggcttactggccaacttccagccctcaccaactgttggtagagaataggattagatggctggccctgcatccacaggagtgcatgatgcaatgtttttaaacctggactaggccatctgaacggtttgcaactagcttgttttcctcctgttccagctttggaatggaactgagtgaaagccaaccctaggtctctaccagatagggcagcagccaaagcaaggcaaagagagcagagtgcacaaaaataatatcacgcactgcagggcaggacaagatagtcaggagccacgtggagagagggtcagattctgaggtttaaacaagagccaaaattcaggtcttgtgttcgagtcttggctgatttagttttgtattggtcaaggtcgtgtgagcacccaacgcctgaagcatggcccggcaggaaaccagtgcagtggttgtgactggggagtaacctcatatttttaaattaaccgcttccctcagtgggtggcaaaataagagagaacatgaaatcactcagtgtgcaccgaaagggagaacgcttgggcttggactttagcaccattttgtccctgatgtaaagtgtacaatcttgccatggtatataattctgaatccttggaggtccctgaattgtctgtgaatactccctgtaaactaaagctgtgagtggaatactactttcaaagcagataacattatgatttctggatattcgttcaggattcttcagtctctggttctccaatcagactgcctgggcctcatttccagagggaattgtctctgtggtgtttgcagattccttgtgagctgatagcactgaaacagcatgagaaactactcccgtgacttagtcatctttagacccagagactgtggaaatgtctgccttcctggggcttgaaggggtcgaggggtgggtcgaataccagacccacccccatcctctgggcagaagctatttcccacattctcctggcccagacacaacgtctttagaacagagccaggaatgtttcctggagtttaatgctgcccggaggtcatgggagcgacgttgcacaatgattaatgacagggaacgcttagtcaagattatatttaatttatacttaggtgttggcaatttctcatagacaattatttctccaggatgtctcctgattccctctgagctgtatgactatcactgttagatgtgtatttgggaatcccagaacttcatgaatagctaatggcagacacaggactgcccacgtgttcctatctgtctcctattgttccatatttatctctattatatttcctaaaatgatgatacttccttctatttatagaactgttcagctagttgcatactgccagaaaaaaagagagagagaggaaaaaagcaaaacaaagggaaaaaaatgagtgtccttgtattctggtgtatttgcattccaaagtccatgaagtaagacgtattctataattgttactttattttaaatagccatacttaatcacattctttgacaatttttgactcagctcaaaatatagatagtaatctcaatcccttatatttacttttgatgtaaaatctgaatctctgggatgtgttttttacaggaaatgaggttttgcataatttcctgaggaaattgaaaatttaactacttcagtaaataagaagcaaacaaacaaaagttgcatcatgatcgtgggaaggggaggcagaatcactttgacatgatcatattgccttggtgggctgagatccggagatctctaggaaaatatctgatgaacacctgtttctattgcttcatcagcct

SEQ ID NO: 50036 - DNA, 657 bp, Homo sapiens
cctatttatctgttcagatggaaaaatggactttggagattgtggggtcagcctcctgactctttgttctaaactctgggaaccaaaaaggactcacctacagtccacatagcctcagtttttacaagaaataaaattttagctaaactcaggaccatacaacagatcggttgtgcttgaaaagttgtgttttagaatatggttttccattacatgaatagcaacaaaactgctgagtcagaaactcaagcaacctctcctaacctctatcccgggttttgtaaacactcactggattctgggaaatcacgagacagcagtaagcagaattccattttaccatttattagtcatgcaaacttgggcaacttatttaatctttctgagtcttagtttcaacatttgtaaaaaggacatttgtaaactcctaatccacagattaagtgttagcagagtttggaccaaggaccgaaaactgaaaacaagaagtgtcaagcaccaccacgttttcaggcaggcttttggccatttccacaagacttgcagaattatccccaaacccatttgccgccattgccgaatgagccaattactcctctcaagatataaaagagaatattaataagatgtgctagagaggctgccagggagagtgtc

SEQ ID NO: 50037 - DNA, 1703 bp, Homo sapiens
aaataaataaataaataaataaaagaaaaaggaaaaaaaaaaagcaaagaacaaaaggacacacatatacagacaaacaggaatgctaaaatgaatttacaaatcaatgccatactggtcagtatccattggacaataatcattccactgggacgaactcattagccttgatgttggcaaaagtcatttgcaatactacaggctttctataatttatagagttgtaaaataacctacagacgagaaaggccacagtacactgtaaaattaaataaacctgcaaaaaacgctaagcaggacatccgggaacactggtccctctttctagtccccttgaaagtctcacaaggctgaaaaaggaaagtaaaatccttgtgtaacccttctgcccagaagtacactggcacagattctttagagacgaatttaatccagagtgtggagcctttattaaggaaataatccggtgcaacgttctgggacacgctcctggactgggtgggcttctgcacactcacccagcgcacctccaatccccgggagcgctcggcaccgcccacttctctgcgagtggctgcaagttgcagagcaaaccagggggcgatctggaaccctctgggagtaaagggctaagctataagcgcagggtcgacgggcagggaccggaaacaaattctaggaaccgagatccgctgagcagcagggaagctgcgcagccaccgcgtcccgccagcgccgcctctttccctccccgcccaccgcccgcctggcccggcggggcggcgcgaggacccaggggcggggcgacctttgctccggccgtgagcagtccaggccaggcgtggcccagccgcccggctgcaaggtggggtgtccccgccgctcggatccccatctcacctgccgcgggcgaggtggccccgccgcttcctgcgctcacctcgggtccctccctcccgggccaggtttggccgcggcagccgcccctgggcgcccgcgcccggacccgcggtttcggtcagacccgcccgcgggctggtttcgattagggccagtaggagggcggagcggccgggacgccaggagggaactagcctaagtggggacggtccccgtgcaggagacaaagagcgtccctggagcgatcagggctcaggagcccgacccggagcccggggcgtccgcgctgacttcgggtccccggagcctggggcacggcagggagaagacgacggcggagaaggcgacagcggagaaggaaggcaggctgcaggggcgccgtcggcgcggcgggccgggatgcggacgccggtggtgatgacgctgggcatggtgttggcgccctgcgggctcctgctcaacctgaccggcaccctggcgcccggctggcggctggtgaagggcttcctgaaccagccagtggacgtggagttgtaccagggcctgtgggacatgtgtcgcgagcagagcagccgcgagcgcgagtgcggccagacggaccagtggggctacttcgaggcccagcccgtgctggtggcgcgggcactcatggtcacctcgctggccgccacggtcctggggcttctgctggcgtcgctgggcgtgcgctgctggcaggacgagcccaacttcgtgctggcagggctctcgggcgtcgtgctcttcgtcgctggcctcctcggcctcatcccggtgtcctggta

SEQ ID NO: 50038 - DNA, 983 bp, Homo sapiens
gacaagagctttgggacatttgctaggacaccggatattctggcatttatgaaccaagcctggggatgctctctactgctgtggagttggggtggtttcagcggaggacaacaaggctgctaatttgttactcaactgccctttggcccaacgcctgggaatttatcctaaaggcctcagtaaaggagattgtcagttaaagagtccaattacccacgagaagccttattagtaactgaacttgctcctgggcaaagaatgctgaccatctcggggagaagaaccctaaagcctgaattcaagacagcagcagggaatacagcaactgtcagttacagccaccaggtggcgcagcagaaagccaaactctcaggagcgcaaggcaaacccacatcctggttcttctcccctaagaaatttggtagcctcagaaattcgtctggagaagggcttagaggcagacaccattgaaacggtaacccaagaccttaatttcacccttgcctcagttttacccttaaaattacacccagaaaatgaactgataggactcgctcttgagagccaattgctaaatttttagcccatcttttctcaacctcatggtcagtgacaccaagttggtaacgtgaaattggccaggaaggaatatttacaccatggaaattggcaaatgctataaatcagttcttcagagggttggttgttaaacatttacccaacactcctgggtgagaaggagagaccgcccataaattgtgctgggaggcaaaagaggaaagtttggcaatttgcttctgataataactcggacaaagtcaaatgtagcagctaaaaacttggactctgtattcaggatttaggacttaaatctgttgtttaagattaagctctgccatttattagctgtgtagagttgggcaatcaactcttggtgcccatctcttcatctgtaaaaaagatataattgtacctacttagta

SEQ ID NO: 50039 - DNA, 868 bp, Homo sapiens
agtcctggaagctgtgcccctaataccatgtatggacacactgtcacagtcccagccaaatcgccttacctcaggccactgtttgaaaatgcagcgttagtcacaaaaagagccaggtcagaacatgtgtatgaatcagtgtaattagaagaataacactaatgttgatgggtcagctccagtaattttgtagatgtgggacaacagtctaatgaactgacgtagattcaactcaaaccatggaacggaccctaagcaattattgagtatacagatgagcaatcaaagatttaaagaagtccagcaagatgcccaagatcccctggctgctcagtgactatctgagtctttaattaggtcttccaattgcaagttcaatgctctttctagtactgcattagctcatctctggcccatgtccatgaggtcttggcaaggtccatagggctccatagaagaagtggttgaaaaaaatcctggacacatatacaaaagacacagacgatatcttttattattctccacgttgctgccacctgcacatcagtagtggaattttctggtgcatcccagaagctgaatccacttatcatattcacctctcaggaggaaataaaattcacttaagaattcatttccccagccccttatttgtagcaagccccatgcacgaagggctaactccaaagcgagattcttttctgatgagatgcaaaccactctgcagtaaaacatataaccagggaactgtaatttcctgaccccaaacatcatgaaatgtccgcaatgccatcacattagcttgttttcatgtaattgtataaacacagttttgccagttcaaagcacttggaagtgttttattatg

SEQ ID NO: 50040 - DNA, 1398 bp, Homo sapiens
cctttattgaagctctttgatgtccctgctcatatatttccccttgttggatctgcatagctcactgttactcaaaggttgtgcttaagccccttagttagattttcatcctttactgttggatatgtgtgtagttcagaggttgctatcacacattggggaatttacattttgtttggctctgcattcagccagggactagtagcttggagtccctctttaatcactcctgagatgtctcagcctcaaacacacacacagccttccagacagtcaggaatgagagcaattttagttttaagcctggcttcctaggcctcacccctgggttggagtagcttatttttaagccagtgtttgctcagaggttgtgtttacgcctcttgtaccagtgagactgtaaacgactaccccattttcctaaaaattatctttatcttttcactttttccctgcatgttcacctcttacttagctctttaggaatgcaactctaacctttaccttctctccacctggcactccctgcactgagagcttatctaactacatgtttgcttagaaattctaaggaccaaatgttgaaccaaaccatgaactctcccggattctcccccaccaggaaattgcctcaagatgacagtcaatttacaactcagctctgcccttcatggtggcagcctgcaagtcgcgagtcacgcagaccccgcgcctcctcctctccatagcatgcactccaagtcccccttaaagcctctgctttctgcccccaaagctgaagtggttcccttaaggcagaagcctgtacctcttcccctcagctaagctctgaaataaaactcgctttctttctatcagccctcactcattaattggactgtgcaagcagtgagcagctggacttgcatttggttacaagccctctgccttgtgttgattggcctgtgcacagcttggggaaagctttcaggtctgcccaacatcctgctctgactggccttgagtgggtgaaacctagtgcacgttcaccgccttcccaactcgcagaattgactgggatcccagaattgactgggatcccagcagcgctgttctgggctcttgacctggttctatgaaacttccagctgctctgccgttccactcatatcctggagctccagcctccttcactgctctccacgcagtctccactgttttgacaacaccctcaggcatacagttctccaggtactgtttcaaataaagtcagttccctcaggcagagctgcagagctcttcaccctgacagcatgccctccccgccgaccccaccaccacagggcctttttctaggaatgacatccctgctctacaggggggcactgagggaggatgatgtagcagccctggtcttct

SEQ ID NO: 50041 - DNA, 537 bp, Homo sapiens
cttgaacccgggaggcagagattgcatgtgctgatatcatgccactgcattccagcctggacaacagaatgagactctgtctaaaaaaaaaaaaattaattaattaatttaatgtttttccccagtgaaatgggctgttttgctggggagaatttcaactgagcttcattctgtgtcccttccattctggaagtcctgctcatttaccagtgaggaatgctttctggggtaggaaagagtggctggatctctagttggcagggcattgcgtaaacccctgaacacacacactgggtatgtggcctgtacccaacctcatttcatatcatgatttctcaagcactgaacataaaataaacccaagcaatttgttctgttctatgtgtaccaaatcggttagcaagatttggcttttatttctaatgagggaaacatgtgggttcactttttcagtttggcttcagtaaaacattcccagaaaaagtattctacccataaggacctcctgaaaaacatgaaagttttcacaaatcaaat

SEQ ID NO: 50042 - DNA, 1767 bp, Homo sapiens
gagacaatcttgagagagaatatatttactattcattaagtggaagtagaccatcataaaggtcttcctcatcattgtctgttcattgaggaggctggggaggagggggaagaggaggggttggtctggttgtctcaggggtggcagaagtggaagaaaatccttctgtaagtggaccggcacagttcaaactcgtgtgtgttcaagggtcaactgcatttccctttcatgacaaccttttgtttggagggttttttgttttgttttgctttcttttttgagacagagtctcactctgttgcccaggctggagtgcagtggcatgatcttggctcactacaacctccaccttccgggttcaagagattctcctgcctcagactcccaaatagctgggattacaggcgcgcaccaccatgactggctaatttttgtatttttagtagagatggggttttgccatgttggccagactggtctctaactcctgtgacctcaggtgacccgcccaccttggcctcccaaagtgctgggattacaggcgtgagccactgtgcctggccgtttgggggtttgtttgttttgttttgttttaaaaataattcatacaaatccaatcctctgtagcattgttccctacgtcttcctcatgcctggttatttgcaattcctcttcctcctgctttctctgtttctaatacctgcaacaggagagcccatctcccctcctccaagccactcttcctcacgggacgcccacctgctgcaaaagcgtcagagtcttggcatctccagagtccctggggagtttccttccccaagtgtccattacaacactgggatgagaggccaggtagaaacttcaggagcattccactttgaagtgtgaggctctaccagacacaaaataaatataactgggggccagaataaacatccagggccagcaagtgaacctggcttacgtggcatgcattaatatttggagaaatttccccagcgaggttgcaggaagctgagtcacctactaagaagggctttatttttggttctaaaagacagaacaatagcaaagtaaaatattgttctatatcaaagttctttaaacttactgttctcagcatcttcatcagtcccagattaaccctgacactatacaaattgcaataacacaagaacaatagatgctttctctagattttgtatgagatttctctggaatttctaaaaatcctagaaaggggccgggtccggtgacccaggcctgtaatcccagcactttgggaggccaaggctggcagatcacttgaggtcaggagttcgaggccagcctagccaacatgttgaaaccccatctctactaaacatacaaaaattagccaggcgaggtggtacacatctgtaatcccagcaacttgggaggctgaggcaggagaatcgcttgaacccgggaggcagaggttgcagagagccgagattgtgccactgcactacagccctggggacacagccagactctgtctcaaaaaaaaaaagaaaacacagaaaggaaccatgaggcaccacttgaagcttcaatgaggtggttttatgatgttgggggtatagaaaatcattcctcaaaatatggcacctgagcacgctgggcgcttttgaaagctgagcggcccctgaagtaagcctcagaatgaaggtccctctaaccttgtcttgtgcctccccaaaccacaagggcagggactattcctggaacgtccttatctgacc

SEQ ID NO: 50043 - DNA, 1883 bp, Homo sapiens
aggctcaggtgggcaaatcacttgaggccaggagttcgagaccagcctaggcaacatttcaagaccccatctctacaaaaaataaagaaactcagatacggtgttgtgcacctttagtcccagctactcaggatgctgaagcaggaggatggattgagcccaggaggttaaggccgtagcgagtggtgatcatgccactgcatgccagcctgggctaaagagtgggactccgtttcaaaaataaataaacacataaataaaaagaaagtgagagagaaagcagggagcggggtctgtttgggagagaaaaagaagaaagtgaaaggtgagcaggtccggtgtggaagaagcaggtcagaagagagggcagaggctcatttctccccacacgtcaccctgcacctgctcccataaacatcagcgaactcatccctatcttacaggctggaaaaggagtcacatttctcttaaatttaacttttacgctaaggtccaaaaatggaaaggtagaaattgaagaattaattacctctgttttatcattaaccaaagcagtattacctgcctaaagaggacaaaatattaaaaaatagcagaatcttattttataagggattgtgggatcaatttaagtaattaacaatccactgttctctgggactctacctacatgggtgtcatgctgaaaggcacagaaacgcaaattctaatccttttgaaaagaatgacagatggagaagaaagaactctgaagtcagcaagcccagaatgcagtgtcagcccttctactactaacctagcaagagaactgtgggcagtttctcaggctcagctttgtcatccaaagaaacaggaaaaatcaaccaacgttgtctccaaaggtccttccataggagccctaaaaactgtatgattctaagtcagttaatcattgtctcaatattactatttctctttaaaatgggaaaaatgactcacaggtagtctcaccagatgcaggcttcaaatgtgtcatttgctcattttaggaaatagtccagacttcttcaaaacatgactctattcacacttagccagtcttgtttaccaaaatacaaataagcctaggcatatacacagcacacctgtcattgtttaaagttagcatgactcttgcaccagcttcttatctgaaaagatctaaaaatgacacaactggcgtgctctaattctgcagaggcagggctggcttctgtccaccttctcgggcataaacgggaagctccgcaaggtcagctctctgcttcagatgcctccttctcagaccatctctcatgcaccacccatcacactctatcccctgaacctctcttacatcttctcaaagcttaaattataattggcatattggattactgaccattcctcttccccaacttgattttcaactcctagagaggaggggtgttacctggcactactactacatcaaaacagtgtctggcacagaggccataaccactggccaaataagcaaatttaagttctaatactggtcagtgaggttgttgctgtattttcaagaagaaggcccaaaactatctgcatgacaaagcaatccttggatgaagataagaacaagagcaacaaaagaagaagaagaagaaaagaattcatttttgttggagtaagaggaaaactaagaagacctataaaatggattaagatacaactaccctcagtattctgaatgcacatgtgtttttccctttagagttacgaacagaaatttaaactgaccctctgtcattcatatgcaaagaggataaaatcaagtggattttttatgttctgcttcaactgccattctttttcagatttaatcagctgaacaaataatggta

SEQ ID NO: 50044 - DNA, 655 bp, Homo sapiens
atctgccccattccagaaatgagctaaatcaaaggagggagaaggaaggaagaggaggctaaggcaaaaagttattcacactttgcataaacatgcccggatggcaagcattataaaacgatctgtgtaacataagcttctgggtccatgggaggcaagggagcatgtgactgtgcacggatatgaacaaagccagcgacacaccaccagattcttcaaaagcaaatatttgtctatgaccaaagaatcgggattcttttctaacaaagaggaatgtacaccgttctaattcctgattcttcctcctgctttacagtgggttatgatctcgatggaaatccccccatgaataaatgtgtctgcaatcacaaatggccccataaatcagaagatttatgaactgtaaaaggggacggcaggaggattccaaccttgcagcttccttcatgcggaccacctggggccggatgcatggcagtttatcacttcctggaaacagtcatctggcttttctttttagctaagcaagaaaatgttatcagccctggtaatcaacaagatgcaatcatccctgctatttgggtaagcttttaatgccgcaccacattacacagaggaggctcagatgcataggctcggatgcatgaacagcatt

SEQ ID NO: 50045 - DNA, 1544 bp, Homo sapiens
ctttggattaagaatggcttcaggttgctccttcagtaaactaccctgtaaatgcgtaactcccagtcactttattccatttggtatcacaataaagaagtatcttgcttccatgaataacacacaatgacaaatataaaacaaactgaagagtctaccaagtcatggagtgtgacaagattccagataaacatacagaatggatgtctcagttgactggtaactgaatacgctggcttttttcatgcttaagaattaaattcaacctagatccagggcaacggaaagatgtcaccttcggaaatattggtattcaattccttcctgatactattaccagctgcattcttgttgtccctctctgaccaggacaaagatcagagtgggacgcagtcttccatttcatcacccctccgggtcccctgggggtggggacccaggtgagaaacgtgcaaggatgctattgttctgtctggtttgtgcttaggacacttggaatgttgttaaccacctgctccacaaaaaaacaaaaaacaaaacacacacacacacacacacacaaaaacagttgtttaaagaactacaaaggatgaggaaatggacacgttcccaactaaaaactagtttgataccaattaaccaggctcaaaagaaaaaaatcccatataagtaaaacgcaaaacttatggagacagtaaaaagatctgtggttgccggggttggggggaatgaattggcagagcacagaggatttttaaagcagtagaactactctgtatgatactataatgggggatacaggtcattggacatttgtccaaacccacagaatgcccaacacagagtaaaccctgtgtaaactatgacctttggctggtactgatgtgtcactgcaggtttatcaactgaaacaaatgtactgctctggtgggagatgttgacgttggtgaagctacgcatgtggggaaggggatatatgggaaatctctgtaccttctgttcagttttgctataaacttaaaactgctctaagaaaaaaaaaaaagtcttcaaaaaaaaaaaaaacaaaaaaccccagacaactagtcctggaattcttccacttgcttatgatggtttaaaaaaagaaaacgaaaaaaaagtctactggaaaacactctccagaaaactcttagctttctgtcccttccgtctcaattattaagcactgccagaaagcttcatttgcttaacacttaccaaaaaacaaaccttaagacgtctataaaactcgaaactgccaggaaattcccgaggaaacgcccctcaaagatttcagtcatctatcttccatgtccctgagtgggcggaggggagcagcagccccaggatttagtcatgcattacagtctgaaatttctgtctttactcatccattgttcactccaattacaaaagattttctctggaatttcttaagaaaagtgagcagtaatttttactttctaattacattctgaatgtaagcagagtgcttaaatgcttgaggggatggataccgcatt

SEQ ID NO: 50046 - DNA, 2694 bp, Homo sapiens
cttcatgcagacctcgtaggggggctggatcagtgggttgtctttgatcttccacaaacccacccgggagagctggccaaagtggtcgggcagcaccgcgatctggttcccctgcagcacgagctcctccaggccggtcagctccacgatggagtccggcaggtagcggatgcggttattatccagccacaaggtgagaagccggcccaggcccgagataagggatggcaccgaggtgagctggttgcgactaaggtagagctcctccagaccagccaggggcagcagcgcggcagggaactcctcgaagaggttggaggagaggttgagcattttgagccgctgcaggcagctgaactgggcgggcagagcctgcagcccgttgttgtctagcatgaggctctccaaactggccagctcgcagaagccggcgggcagcgtgccaagctcggccccactcagccagaggatcttgagggcacgcagggcactgatatcctcaggcaggccccgcagccggttgctggacacgtccagctcctccagggccaccagctgcagcagctgccgggggaaggcagtgagctggttgtgatccacgtccagggtgcgcaggcgggagaggcaggagagggagtcaggcaggtgcgccagccggttaaagctgacatccagctcctccaggtgagcgagagcgcccagctgggcgggcagggcgggcagctggttgtggctgaggttgagcttccgcagctccctcagagcactcaccacctccgcgcccagggcggtcagccggttgtggctcacgtccagctcggtgaggtggtggccgagctcggccaccgccgggggcagccgggcgaagcggttcctgcgcaggaccaggacgcgcaggctgcccagcgccgaccccagcccctcgggtacctcctccaggccgttgttccccaggttcagtgcctcaatgtccccgaggttggccggcagcacgagctggggggaggcgggggactcgagcgcgtcggccccggccccggggcaggccccggcggcggtaagcgtgagctggcgcaggttgctccgcagcttcctggcacgcagggcggcgtcccgccacagcctcgcggtcttcaggttgccactgtccatcccagccatggcggggccccgggccgacagcctcacgcggacgcgggagcccgcagctacatgccgcgccgcgccccgggccctccggctcctgcccctgcctgccctcccgcgctcggcggccggcggccgcgggtcctagcgcagccagcggccgagcgctggcggctagggggcggcggcgacgcgagcggctccgggggacgccgagcgcgtggagagcagcttgcattctccctgcggccgggccatgggcgcgccgggcagcagggccgccgcccgcgcgccgcggaggatgcctgctcctcctccctctccgcccgccgcgcggcgcctcggggggcccggctccggccccgctaccctcgcagccgcggtcccgcggccggcagcggcgtcgcctcctcgagctcctgggggagggcggcgctcggcccggcggcgggcatgctgcgggcgcagggctggggcgcagccgcggggagggggcggcggcgcctccttgtctccgtttccccgggctcgggcgggagcgcgggcgccgcgtccccggcgctgggagggcgcgattgggaagcggcagcgccgcccgccggagcggcccccacgtgaccggcggaggcgccgcgttttcccggcaccgccccgggggcgggagctgcggagggcgccgggtgcggggccgggggcgcctggcgcggggccgggtccgcgccccggaccatgctgggcggggaggtcgtcccagcggcggatgtggggctccggggcccccctggtgggttcgcccgcgcctggctctttgttggcccccagtctctaaggatttctttttcttgttctctaatgcgtcggatccgccggcttcccttactcatcctttacctgctcccctgccgctcgccttgcatccacgccgtagtggaactggcacaactcgggggccctgggtatcatcatagaagcttaggacaagagtgtggttaaacaaaattagaacaggcaaccattcattcatttggtaaatatttcctgaggccctatttcgtgttgaacatgggacaggagtaatgcaggctggtcagaggagaataaaaaataccaggcagcagtttcacttgactggaggctatgggctgataagaccctgaaaaccagggtgtgtaccaagctggctaagaccggctggacccgacgtggtcctggatttgacctaggtttctcctaggcctccattatacgctctttaacatcctaagtcacaccagtgccatgacaattccggggacacccatatttgaagtaaaaatgggtggcaccacagtcccgaaaaatctccacacttttccaggaattttcatgaatatttcaccccttggttaaagaaacccataaaggtagcagccccaagccccgttgtgagtgaccctctccacaatcccttttcctgggtgtgtacttttccctttgcaataaatctgcatattgtcactattttctgagttgtccttgaactcattctctggatgtgtcaagagcctg

SEQ ID NO: 50047 - DNA, 865 bp, Homo sapiens
ggtggaggctgcagtgagccatgattgcaccactgcactcccgcttgggtgacaaagcaagactctgtctcaaaaagaaaaagaaaaatagatacaaatgaggaagtaattactgaaaaagaaatccttttttcataatgagcaagaaaaagcacaaaaactttgacctctgagatctaggactagaaaccctgaccctctccatagttcaacctttgcatctcactgggagcttccagaaccctgattgcctgaatcccttccttcactggtggtggtgttggatccttgtcactagatgacttaagctcctttaaagtgttgctttccccctccttgctgcaggctgttgggacaacatttgctatacgttctcagaagcaaggaagctggtgtcatcattcagcacccctgttcaaacactccctttaataattcctcctgtttcgtctggctcattgggtgttgcccataaaaacagtttggcttttgtaattacaattagagcaggcggcatgactaatcagtcagttcactgcatctcttgttatcttctgtgaagtgagtcagtttcaactttgcctttgtgcttatgtgtcattctctgctctttgatgttcaagtctatattggttccagactctgttttatttaatctgtttgttttctttctaaaaacatattctatattcccgttcaagagtggagctaacttcacaggatttgggaaaattctgattattctagcccatacacagaatgcccaggacaaggaagacaccacttctctgaggaattgtgccaagaatacaagtcggtgaagtcagcatgcacatgttgaatgtttacaatgtgccaggtactt

SEQ ID NO: 50048 - DNA, 855 bp, Homo sapiens
agaatgtacccatatttagagtgagaaataaaaataaaatcctaaatcccctaaggccacgtgtggcagctcacacctgtgatcttagcactttcggaggccaaggcaggcggatcacctgaggtcaggcatttgagaccagcctgggcaacatggccaaacctacctctactaaaaatacaaaaaaaattacctaggcttggtggtacacacctgtaatcccagctactcaggaggcagaggcaggagaattgtttgaacccgggaggtgaaggttgctgtgagccaagattgtgcaactgcactccagcctgggtgacaaagtgaggctctgtctcaaaaaaaaataaaataaaaataaaaaaaaaattcctaaaccccccaaacttctgaatggaccccattccagccaagaagaccccagagaaaccttaaaacagagttccaggtcatctcaggacaggaggtcagacatgcctcagtctgccccttccttattaacctttaaccagaatctttcctaagaagtaaacaggaatcagctgtggaagacaagagccgatgacttactctattatcactattagccaattgtctgaggccatgacgagacttcccttccctctttacagtttcgacatgacagctcgccagtttcacaatgcataccttccttatcagagaccgttgatgatggagatgctctggccagtctatagagaatgcacagaggattttcggtcctctgcttcaccttctgatgtcagaaggctgaaaactccacactcagattatgctaatgctgccatttgtgtacatgtgacccatgaagaggtatgaagctcaagtgcacat

SEQ ID NO: 50049 - DNA, 471 bp, Homo sapiens
ttagaaacaaaaggcattttgctatgtgaaagtcacatatttagtgcagcctagagtaatttactaaccctgctgtctaacaatacattgatcttcactgacagctgactaatcccaggacactgaagctagaggaagggtaggtacatttttccactggggtgaatagagaataaccaattctcgaacttctcttttagactgttgcatagctgaaatactcagggaagctttctctttaactgttcaactatggcacacattttattttaaacaggaggtgctaaagtcattgggatttcccctttggtgttatgtggcaagttacagcagagtcaacatttaaaaacatcggccaggcaaggtggctcatgcctgtaatcccagcactttgggaggccaaggcgggtaggtcacctgagatcaggagtttgagagtttcgcttggccaacatggtgaaatcccacctc

SEQ ID NO: 50050 - DNA, 1782 bp, Homo sapiens
tcactgtctcaatgataattttgcaatggcagtttcacatctgaggtttctattgcgtgttccatggtattcaataatctcttcactctggttgctgggagctcaaatgattcccagttctgtgtgacctctcaccattgtttggtgtactgctccccagtaattgttctttcctggccttgtggagtttcacgttttttattcagttaaagattcaaggtactcctaagcagatttctgaagctctttttccatgtaattccctcctctccagaattctgccctacaaattccaaccgacttggcctaccccaatttcgtcaactccaatctctgtcttttcaacccaggagatcctaggtttccatatgatttcctttcatcgcaccacagactggaaatcgcctctgggcaaaagggcaggatgatatacggctccttttatttcttttctctcaggtaaaacagtccacagctgtccgttgtccaatgtctgaataggtgtctcctatattttgttccgttttctaattgtttatagtgggacactaagtcccgacccattttcttttcttgcccagagtggaagttttaggaaactccttatggaaaatgtgaattgttttattattttttatggtcgaaaacatctttctctatgatatcttcccactcaccctacttttttccttctcaggaaacactgacgggaacacacgtgccggtgctaccctccagtgactggactagatccttgcgcaacttcaacccgcgctagctccgcctacggccggccacgccccgtcttctcaccggcgcgcctccctcttgttcgtcctccctccccctgtggactgcggcgctggcgttccgcgcacgccggctcactgcgcctgcccggcgtgtggacgccacacgctcccggaagtgggaggtggccgctggagtttgtgtggccgccgccgcgggaacgcgagcccggtaatttttcaacggagaaaggcgaggctttcgggctctgcagagtgagagttagcaagtgtccggctccagcaactctcctctggcgtgacagccggcatggaggatccacagagtaaagagcctgccggcgaggccgtggctctcgcgctgctggagtcgccgcggccggagggcggggaggagccgccgcgtcccagtcccgaggtgaggagtcgacccgcgcctggctgttggcgccagctgccccgtccccaaagcgccctcggcacccctttcttctcaggtgtcccgcagaaggtgcagctgtgcgcccttggaccccagcctcttcctcggtgcccagctccctggctttatcctcgggtgggtgtcttggagccccctcagggccgaatcactctctgggagggaggaaatcgtcaagaccagttctgtctacagtgggttaacaggttctaagagggagttttgctttaaacttaattctgtgttcacggttgctgttgtcactccatgtagccgttatgggtagtttgcaaggctttatgtttttaaaatctcaccatatacgctaggtatgtcacttcatgcctgtttttaaaaaaagaaaaaatttaaaaagcactcaccagcatccctgtctctgtacctgttaagtggagcttcgtcttagctgcttttgctcattaactggtgtctcatataaccatagtataagattgaatgaatcattttgacatctcatcggttgaacttagttacagtggcaaagttgtagaacagtcttaaaacttattt

SEQ ID NO: 50051 - DNA, 583 bp, Homo sapiens
ctaaatgatgactaaagatgaagtttcaaattcaatgtaaatttaaagtcaaaagataattttttgtaaaattctggtcaagcagagcaatatctattgtaaatctaatatattgttgaaagtgaatcattggtcaactagcaatactttttttttccttaacattgttaacaaggaacctcagtgtggctgttctttaatttatggacagttcacacattggaactgctgacctcttcctcaaaggaaatgggtgagtcactcttgagtactctggcaccttacctagcattacatttccagtaaatgtgtgttgcattaaattgagagcttagagtaagaaatggttcctgaaccatcaggatcagttctgagttagggactgtggcctctctgtgattatccttccttgatctataattacagtttacgtgaggacaatgtggtacattataactaaggtaacaagctttaatagggataattagtactaaatatttttcaaaattatggaacatagctaatatttgtgatattgcatgtggaaaataacttacaaatgaatctttggaacttaacatat

SEQ ID NO: 50052 - DNA, 1442 bp, Homo sapiens
tagaaatagtaagtgaatttttgtattttaattgtatttctagcagcaactattctggtgtttactggttatgtggaggacctcatttgctttttagccagaattagacttctaaagtaagttttttctttgccatgaactttatatcagcttgattaatagaaaagctgtaacaaagcaattttagagactactgctttctttttgcagtagcggaagttaaaatgttgttttccatttgcttagaacatctgggtgtggacatcagaatctcctggtaagtaaaaaaataaagaaaacactaatgatactgatgcctggccctagtcccagagattctaatttagttctctgatagggcctctgacatcagcatttttttgaagcttttcagttggttttaatatgcggtcaggcttgataaccaccactgtggcctagtgtgaactctgatctctaagaatgataatttacaaaaatgacttttgaacctctctctctggtggaaagtttaagggtgaaatgactcatataaccctggtttctaagccaaataatatgtgtgctttagatacttgtcagtgctttattagttaagaaagtctagtaggaattccctaaaataatactgtttaccttataaaatctgagcaagaatatcctaacatctcaactttccaaaagtcacttctgtgatatcctcagttgctaccaacccacttgggagtaagtataaaaaggttttgtgaattaaaatgcataggttattagtgctattcaaaatctcttttagttatagtcttagcctatttctataattttcttatccaaagcagattgaaggtcagtaaattagaaggaaaaatggcagctatgaaggcaaataatcttgcataagtcactagattttacttctctcttactcaaggacgttactgtagcagttctccctcatttggacattatgatttattgcttttgtctatattgctcccactacacaaaaacatgttatatttttcacactgtgtaaaaacttcatcccacttcactgccagctactgcatttctttgttcctctttttgggaaaattcttcacttaagttataggtacttatatgtttatctctttccttttcttccattctctcaaatttataccataaccttcaataaagtttaagctgtgtattcaatcccatcattccactaaaatcactcatcaacatcatctttgacctttaccctaactcctggcaaaattgaccattctcacttttttttttcttttttaagatagagtcttgtacccagacttgagtgcagtggtgcaaacccagctgactgcaacctccacctcctgggttcgagcagctctcctgcctcagcctcctgagtagctgggaatacaggtgtgtgtcaccacgcccggctaattttt

SEQ ID NO: 50053 - DNA, 689 bp, Homo sapiens
cttaagttttttagtctttgatatgtttggtatgttaatacatctctttagttttttttaatctcttctttttcttccctagcagtttattttactttattcttttaagaaactgagtcatttgtcctgttgtgtttccccttatctggattttgtaatcatatcctggaatgtggtttcagaggtgtctctgtcttttgtatttcatgtcagtttatactccagttgagaagctcgatcccctttaggttctttttttgctacaactcccagatggaataatttttattattaaaaattaataaaccttaaaataattttcagtcagttatgcataaatctacagctcacagtatattagtgtaatcggaaagttgtagatattataaggcaataaaatgctccctccttttttgagtaaacagtggtttctctttgtgcacctgtttattttggccagtttgttagcctgctctttttgtgtgtggttttcccctcttcgtaatagataactataatgcaattagttgtataagtagaagaaacttatgttttccttctttttttgtaccttatctaagacctaaataaaactctctgtcacaagtttctgctgtatataatgctaataaggtatattatatggtatgtctaaaaacattttttttttaagtaaaaatgactttttt

SEQ ID NO: 50054 - DNA, 1752 bp, Homo sapiens
cctggctaattttttttttttcagtagagacagagtttcaccatgttggccaggctggacttgaactcctgaccttgaactcctgacctcaagtgatctgccctcctcagcctcccaaaatgctgggattacaggcatgaaccactgcacctgatccatatttttaaatttaaatttaagtttttatttttgagacaaggtcttgctctgtcacccaggctggagtgcagtggcaagaacatggctcactgcagccttgacctcctgggctcaagcaattctctggcctcagtctcctgagtagctgagactacaggtatatactattatgcccagctaattttttgtagagctgaggtctcactttgttgcccaggctggtctcaaactcctggactcaagtgatcctcccgtcttgggcttccaaagttgctggggttacaggcgtgagccactgcgcccagccagtactttatatttattgtgcctgcatttatatgggaacttcctgtcatatttcctttttaaaaatttctaaattcctaaaaccttaattaatagagcacatcgtcctcttaggttgtgagtccttctaagggaaaagcagtatctcctggtgtggtctggtgtggtcttaatcttcagtgtcacaagagcaagcctgcccccaccagcgccacagtgaggtgacacagaagagcgccgggcaccacgtgtttacttgcattcctctggtcccgtggaagcccattattcctttcctgaatcgtatctgagccaaaggccctatatggccaagattccctgttcggtgatgaaatgccagcacatgacattctttctaatgagtcacagtcaataaaaaatgttttctaaatgaatctgactatgtctccacaccaagcaacacagaagaaaagtcttatcaaaccaaaacatcttatcagctgagcccagacagacctttcagttttgcaagcaaggtgaaatgcgttcccacacaaagcgaaaacccagtctctccttagttttccttggatacatgtgttatatactatgaggaaatgagggagacatgtattgggaaatattttcagggtttggagactgatgagagattaccgaggagtttgtgtacaataataagaacacagctaaagacattcacttttgagagcctccatgtaaacattaggttaatatcacatgctgaacatgccttttttttttttgcaatgctttattttcattatgaacacggtctttacatggaatagcactgaccctattattagaagtggaaatctattagccatgcattttgttgttgttgttgcttctaaagagacttacagggggcttaggaaagccacaaagaatccccacggtgtgcacacatcaaccacagacaggttaacccttcaggctcagggaaaatgaacatgaactgaagaaataaaatgtaatgatcacccagaggttaactattaggtttactattacagtgaaagggaaaaataatcttaaaaaattttttatttattattttttatagagacaaggtcttgccatatgcccaggctggttttgaactcttgggctcaagccatcctcctgcctcagcctctcaaagtgttgcgattacaggggtaagtcactgcacttggcttttttttggagacagggtctcattgtgtcacccaggctggagtgcagtggcacaatcatgcaatcatggctcactgcagcctc

SEQ ID NO: 50055 - DNA, 1077 bp, Homo sapiens
ctcctgagtagctgggactacaggcacatgccaccatgccgagctaatttttgtgttttttgtagaaatggggtttcaccatgttgcccacgctggccttgaactcctgggctcaagacatctgcttgccttggaatcccaaactgttaggattacactgcgctcggccaggacagatgtttatataatagaagtttgctctgtgtttaaggatcatctgtaggggtgggtcggggggcaaggcacttggccttactagcctcattaaagaaatgtttcgggagccctcgccgcctagctgcagggcactgggtcatctggaatatagaaatcataataatcccccttgcgtcataggctgacctgaggatcaaatgagataatgtctgtgaaagtacttgataagcctgaagcactgtctaaatgtattgctgagggcctgaggtagagaggacgtttactttgggccattcatgaggttcaagtacaaactctccattgcatggcattcagtgcagagcaaacacattctatttggctttagccttgaatgaaaagtcaacagtgccttttcagttgctttgcttcctctcttctcctttcaaaacaaagccaggtcctctaagggtttcctgctgagtttataaagaggtgctggattacaaatccagccccggctcccaggatcttggaggctggggaagagtatggcctcaaaacaaggggtgtctgaggacacctacccttggttcttcatcaagggattggccttctctcaagccttgaaccagggccaagtaccccagaagcaatgctttctttcccatggaggtagtcacaggagaggcaccatgaaagaacttggacaacgtcactgctggactgtgaaagggctcactgtgaggatgatcaggagggaggagcggtggcttggggctgacctcggaagtgtggtccagctgcctgatgttgattgtacatttcaggcatgctttgagaagaggcctaagtgatccaaagtcccgttctatgaaatgaaatgtccatctctttacttctattgccatcttttttttt

SEQ ID NO: 50056 - DNA, 3022 bp, Homo sapiens
tcatcctacctttgccaaatccaaggcccagccccgggtcccccagtgctagagaggcaaagtagtgtttgtggaatgaacaacatcaatgcaagcatgtcacttaccagagaatcccatgcagaaagcaaaaggcatctgttgagtttccctctctctcttctcctccaaggggaggtgacaagaaggaatgaggtttacttaaagcctttccgtgccacacagggtttctattctggtggaagggaatgctgcggccaagaattcggcctctctcctggaatgcccctgcagccacggttccttggtggtttccttccaccaatttagcctgaggtttaatcaggccctcgtagacccacatcatttcattctaactttcatacttctacacggtctgtggtcctagtacgtgctgaggaagcccttgggaggaatgcagcttttcctgtagaaaaatgattatgttcactcctttcctggaaactgtatctctccagcatgggggacaacttttgagaatcatcatcttggtctctcagttctatgagattgattctggttcacagggacagttcttggaacaaagacttatgtcgtcctcctggctcagtcactgatgggctctgggacttgaagaaactcactcagggcctttgtctctcactctctcgctctttctttgtttttttttttttttttttttggtgacagagtctcacactgttgcccagcctagagagcagtggtacaatcacagctcactgaagcctcgaactcctgattcaagtcatcttcctgcctcagccccctgaacagctggtatacagacacggtaccacacccagctattaaatttttttttttttaagagatggggtctcactatgttgcccaggctggtctcgaactcctagcctcaagctatcctcccaaggtgctgggattgcagatgtgagccactgtgcccagccaccttcctctctttacccataaaaagagagctctgtgatatttcttccagcccagtcactgaggatgtgatgaagtccaagcaagtgtctggaatgtgattcactcccgtgattcctggagaggacacaaatagtgtacaaggtacttcttatgagagtctatatttagaaacctcttaaaaatgaacatgttggctgactctcaaaagcattcagggcactgctagagcccctggttaccttattcctactaaacatgctcagggccccttcagtagagccactgacaggagatgggaagccaaagaggtcggtggcagagcttggattggaagccagacttcctgaattccaataccttccagtggctctccatgctcaccagaggcgtcacccggaatatgtgaatgtcctctgtgggggttgtgggaaaagcacctggcactgctttgtatatggaagctgagtggtaaatgttcaattgaattactcagagctggacatttgccattctggagacattgctctagaaaagtgtttttttcttatttttattccagacattcctgaggtgttggtctcacaacttatgattaggtaatgattattaaaacctcactgaacctcaaatagacattcacgaaagccagagttaacgtctccacccttcctatgtctgtgaaggcaagttgtgggcagagtgtaaaaatctggagaaagttacgtacggagctcactttttgcatctacacactagctgctaaactttaatacactctgcctttccactggagccaccgcccacttccccagggtggcagaggacttgttgacatggaacttctagatgcagcttcccacccccactctgcctgcatcttgtcctgaactttggaaaaaagcagctctggaaatctcacttagggtgactatccgctacctatccggggctgttttgttttgctgcttagtttgtttgctcaagcagttaaaagctatggtagccatttatagttttcctgcttttgtttgaatacgtctgtctgcactgtacttcaagtgcaaatgacagggtaagaatgcctatgacctaggatcattaaaaatgggtgcagaataacactagctcctgtatctcttccctagcacttaccttctcagctatgctaaagcaattaactcctctctgccttgcacatttaactcagccattgactgcaagctttttctttggaaacctaagatctacatgtggaaacatatcgatttgaaatgtttctccacttactctggctctaagaatagaaggacactttcagttttgttttgtcttcctttattacatttttgcttttgagatacaaaccaacctctcataccacacaaagaacatccattcttgggatttttaaagtgcatttccccttgaactctgtgtacaaaaatatttatcttttaaaacatgcaaaaatttcttgacaaggcacttttaggtataaaatgaagatgagtccttggttctacattcacactgaagtaatagtgaaacatcatcacagctgcactctcaaagccctcagaggtccagcagtctctaaaaactcgtcaacaagactaaaaacattcacggctttacaatgtgggttacagagctttacaaccatgaccaggaaaaactgctcgtaacaacagctgtccttcccagttccacatgtgttgtctcactgcaggaaattaagataagctgccaaattgtctttgtgtgaccctataagatcccatcatccatgtaacttcttgtctccgatttcagtgaacatgtcaggagagacgtgatcgggactctcccaggactacattcaggtgagaaattttagaagaggaaacaaataaaaggcaaccaaggttttcatcccctatccattgagagggaagatccagaaaatgggcagttccaaaaaaggaacacttttttgattgataagcatatatggcccatttaatgtccatgactacaactaatgccttttttcaaaaagaaaatggtt

SEQ ID NO: 50057 - DNA, 1825 bp, Homo sapiens
gttatctgcaagttctctttgcacttccaagaagcctgcaaaccagcctcctacgtgctttttctgcatgttaggaaaagccttggaaactctcaagatattgtggaaacagccaaagcaaaaggatcaatcaaagaatctacacacagcccactagagccaatgtcccaagttctaatcccgcaggctgaagagacttagctgaagaccttggtagagtttcactgtttcaccccagtggcataaatttgtccctgagatccctttttatcaccaagctgtaagaacaagcagaagtccggcttggagaggccaggctctagtcagagccagagctaattaaacaatgctgctggcacttgaaggagccaaactgctattacaagattcttccatgaaaggcaaaagtaaggttatgatggctcaagagttacccgcaggactactaccccagggacattgcacaagcaaccccagtctagaatcccttcactttgtgtgtcaccataactgcaggtgaggacattaacctgtgtggcctcaatctggggtatgactcgactgtcagtcaccttgcctgtcccacagatagcttccagattttatttaccaggtcattctccaagaatcagcacaccaaagtgctggtttggtgtaggctttcctgaactgctcaggaactccccagcggactgtgacagggatggctgccgccatgcagaagtactcctagcaactgagatgtgcaaggtaatattaagttcctgaaaagaaggcacctggacaggtgcttcttttacaaatgacatgaaaatgatcggttccaacacaggaagcaccaggctgcagcccagcctcctctcctgacagactctctggctgctccagctctgtccttttcccaggccagggaatatgagtcaccaaagttggccaagggggaaaaaaaaagaaccagaagttatggacatacatttgaaccatgagagcaggactcaggatctgataccagttgcaggataggaatgagtgtatgagtgctgctcccaggtaggtatgaattctcaaacacttgcttccatagagatgcctcagagctcagggatcagtttctctggtgagagactgggccatgcttgagggtagattacagtgttcatggctaagacagggcaaaccctaacagatcatggagatagttttgcataaatgctttatctgttccactcataacacaccttctcaagacagctggccaaggttagacggccatggtgataactatagacctgcacagaaaataaccctatgaccttcacggtttcaggcagctgaactactgactttctggctgtacctttcatagggaggaaatcttttttgtatcagggccacgacattatcccctccattctcttattctctctctctctttcttctggtaagaaaagacaaaaaggccgggcgtggtggctcacgcctgtaatcccagcactttgggaggccgaggcgggcggatcacgagatcaggagatcgagaccatcctggcgaacacggtgaaaccccgtctctactaaaaatacaaaaaaaaaaaattagccgggcgtggcggcgggcgcctgtagtcccagctactcaggaggccgaggcaggagaatggcgcgaacccgggaggcggagcttgcagtgagccgagatggcgccactgcagtccagcctgggcgacagagcgaaactacgtctcaaaaaaaaaaaaaaaaggcaaaaaaaggccgggcgtggtggctcacgcctgtaatcccagcactttgggaggccgaggcg

SEQ ID NO: 50058 - DNA, 4124 bp, Homo sapiens
ggctaacacggtgaaaccccgtctctactaaaaatacaaataaaaattagctgggcgtggtggcgggcgcctgtagtcccagctactcaggaggccgaggcaggagaatggcgtgaacccgggaggcggagcttacaatgagccagagatggcgccactgcactccagcctgggcgacagagcgacactccgtctcaaaacaaacaaacaaaaccaaacaaacaaaaaaatcagatgcacaagcaacccaccaggaacactgaaagctgccgaactgcattcagtaaacattcacaaccaggttataattttcatttttaaagacatggccatctacctccctccaacaattctgtgttcccttccaaaaggtttcactgatccagcatgaagagagtgcatgtctttcccctttgtactcagaccatgggggcctattcacagccttaaaggctccttgtaccccttgatcctgtccccatcatccaaagcatcttggagactgacatttgtgaatacagttgcatattctaggaaagaggcaagttcaaatgacacagcccctgccgtctaaaaacgtacgagggaaaacagagtactaggctaagaatgcccgcaccttgctttgctacttgagcgagtcactcagctgctctgggcttgaggtcccctccaaggtccctgctggccctgacattgtatgttgcgacccacccctggtgccgcttctcttcccactaactttttttcctaaatacctcaactgtacttttgtgtaagtcctccagctgtcttcactttagttttggctcctggacaactctgcccaaggaaacatttcctcctctcctcctcttcctcccagaccaaagctctaattgtctcttctgctgcaccctgggtctcccaggcaggcccccgccactcagaccacaggttccaacaccttccaagtctccaagttcccaagtccagtctttcctctgttttctcctctttttcagaaaacagtgctctgacaggccccaaatcttccagtaagtcattaccggcccccactccctcttttgcagctactgtgccttccacacccctttttctggattccaaagagacgcaggagcaggccagtgctctccaggctggaggatcccacaagttactctccgactctgtcccctccgtccagtttgaccagggctgcactccgcccccaacctccctacaagcctccttggcctcgcgccgcacccaccttttgggccgcggagaagccccctccccagctcgctcgccgcatcggagagcccgcagggttgtggcaagcgcgactacgtgagcgtcggtgtgtccgggaggcagggcctgggctgggttcccggagatgtcggcggtgggaggaagacgacgaggaggaggagcccgttatcgcacccgggcggggccggcaaaggggcaaccccggccggagcaagcagcgcgacaccagcacccccgcgcggccgcctggcctccgccagcccgggacggggatcgtgctaggtcccgtcgccctcggtggcctgagagcctaccaagtgtatttcctcgcgttttatagggaaaataaggcccggagagagacgaagcggcttgtccttaagctccaaaccccactacccaactttggagaagtctccagacctctcgggacccggggctgggaacttgtgctagtttcgaagccagaacaacaggtggtaaagggatcagccgccgcagccgcagctcccgggtcacggtcgcagccgggcccagcagcgcggtggagcacgtgggcccgggaggcgcttcccagctgcggtccctggatcgccctctccacgctgaagcaacagctccctggggccagctacctagagtgttccagccccggtgtgccagtgcaagtcgcacggtgaaaatgtaggtgacaggaacccaaagaggtccccgctgcacgccctcgccttgttgtccccagcccttccctcggactcgagacttggggagctacgtaccgggttcagctcataagtcccgagggcagacgcgccagcccgcggcagcatacgccctgggggaacagggacagctgccgtgacggcaggagctgggcccgggctcgggttcgcgccccccgcgggcggcgaagtccgtccgtgcacgagagctgcgcggtcacctcctccctccagcagtcacccgggactcgagctccccgcggccgcgctgccccctttaactttcctgccagctctcgggaccccggggtccatcccaggccccctgccacgtgaacgccccccgcagccaatgggcgcgcccgggactccagccgccgaccaatgggcgcgcagccacggcgctggggagcaccgcttcgccacgtgatcggcagcgcgcccggagtgatccggctgcgggccagggtctgggaagggggtggtgggtcgccgtttcatcagaagccggaggacgggcgccagggggcaacttcctacaggagggcgtcccgttagaatgacagggcttttgcaaaagtctgacacccgtggcacagagcgccccagatatggagggtttcacaggtaggtatacttcagaagaaatttcctgacttgaatcggttataatcgctatctaaatctacagggcctccgcgatgcatattatgcaccttgagatctatagaaaatggtcttagaaaaagaaaaaaatgatgaccttaaagagtttgaatcagaggctcttcctttcttcagtttacatgtaacttgatctgaactagccactttaggcatgaggctaccagttttctaattttaatgaccagtagagttttagaaaaaaattagaaattgatataggattgccaactttttaaactgccaagaaagacatgaaaataaaccctgctgtcttctattactatccttttatttttattttttaaagtacactttaatagcaataacaacgaaatgcaggaaggatgtaatggccagtctttcccattggatatatttagctttctgaaaactcattatgttgaatatggcatttgggagtttctactgtaagggatacaggctcagcttcaattttactaggaatgcaagcctaaaacagtgatcggtgacaataatccaatacaagcctttagctctatagagagcttccccggagggagtcctggtgtctgaagaatgatcattaatcttcttccttcttttctgatgggcagatctgataagggaccacttgtgaagtcagctattggtaggtggttggcaaatagcgtttctgtgcaatattccctctgccaactttaaaccctctcttgttaggtgatgagtaggttgaagatttttaagccaagtactggctaagtttctcaggtgtagtgagcatgctggaggagtgggcaaagatgaagagccaagaggtattgcaaaacatatgcaggcaaagggtaatccgaaccacaccgggaaagagttgggacaagtaaatacagctttgtagcattagggtttgggagcatttttcttgcatagatctaggaaaccatggtcaataatttcccctgtggtttagatgactttttcagaccaggagagaggggttaaacttagttgtggtacaccacagccttagtaggtaggagggtgtcatctatgagtttgaaaagagcacagtctttgccatcaggatagagctgagatgcaagctcagaggagggctttaccaggagacccagcagtgcagagctccagagcctgagagctggacccaccctcagacacgatcttgcctcaccctctcattttatggcaacaaagagagaaagtgaaaatggaaaatttcaatgcttactgcatcagtcaatgcacaccaagttctttctattatatctggcattgggttacagctttaattttatttaacaaccctcctcccccaaccaaaaaaaaaaaaaaaaatgaaaccagaaaacagcagtggctaagcatagtaaattattattcttccataaactgttctttttctttttttttaatttatttatttatttttttaatttatttattttttattgataa

SEQ ID NO: 50059 - DNA, 623 bp, Homo sapiens
gatcctcctgattcagcctctggagtgtctggggccacatgtgcacgccaccacatccagctattttaatttttttgtagacacgaggtctcactatgttacccagggtggtctcaaactcctgggctcaagcaagcctcctcccttagcttcccaaagtgctgagactgtaagtgtgaaccaccactcccagtccgagacctggcttttgacttattatacctgtgctcctgcttcctgtgtggcattgggcaatcaacacagcctttctgaatgttcacttcctcaacagtaaatggaggagttagatgactcattcattccagaaatagttttgagcatttgctctgcatcagacccggtgccacgtaccatgggtgcaaaggggagcagcataggtaagatctgtgccttccgaagagggtagagtcttctggagggacattacaaataatcaggcactcccagtgctgggagctaagttctgttacagggaagagaaagaaacaatgggaataccaaggaggatatttacagagggggaaggctttgagctgaaattgaacggtgaataaaggctgagcagccatggtgagatggggggagactcttctgaatggtgt

SEQ ID NO: 50060 - DNA, 1971 bp, Homo sapiens
tactagagtttcctgtaagtgatcaaagtgacaaacacagtgtttagtactctgggacccacccattaccagtctacattccagaccataggtcctggtttgagtttggaaaccttagtctttggatccaagttgtattttcatgtcaagcttatcagaaggtccaggtgtaacttgcaatctcagtagaccctgaggtccccacagggacacatgaggttcaacgcagatcctggcagggtgaaggtgttcttgggtagccagcagggctctttgcagagttttacgcaggaaaccagaagctaaacttatgtctttgatcctttggatccttagagccttgaagacaactttgtatagacaaagctaaaaccagaattgtgaccgaattacaaccgggagctgtgtgtggcagttgaaatgctgaatagtcttttttttttttttttgtctttttagtagagatggggtttctccgtgttagccaggatggtcttgatctcctgaccttgtgatctgcctgccttggcctcccaaagtgctggaattacagacgtgagccatcacgcctggccgaaatgctgaataatcttaaatgttgaatgtctgaagatgttgaaccaagatcgatttgcttttcagttcctgggaagcctggattttctctgcatctaggccaggctgtcagctccacattcccaggccaaggatttggaaaaatggggccgcatgccacgctggcatattttatgtgtgtgtatgtgagtcagccttattttaggaatgaaaaagtacccctctgtacactttagataaggatgacccacagtttgttactcagggcaaagtctctcttctttttcttatataatcaaatcaaatacagtttaatcctgaaactaggcaagaggcaattagctgaaaacttctttggccagccctcaactttgggatgaacttacaaaaaacaaacaacaacaacaagaaaaaaacaaaaaacaatattctagtcttttcttttatacagaagtctcaagttacctacctgaattgcagcttttctaagattatagcatattgattctttgaaaagatctacttcttgtcccttatcccaatgtaatcattcacagatttttaaacatttattaaccgactcctgtatgtttgtaattgaggttgcagagcacagttcctggttttactgggtttaggaattagaagaggagaccaaaaccattttgagttagagaagcatgggcaattgaagttgtactctttgatgtttctgccacaaagggaaaaccttgtgagagaggacactacctcggagagtagacactccaacattggttggctgaaagaataagagcattgtctgggcctcagaagggaagacacaagcccagctagctctcccggggatgagtttacagtactgtgctaggaaggaaagaacagctcctggatagagtcctggatctggatctgccccgtgtggtgtgtgacagggcacagtcacacagtatgctcagtacctcagcttcccacctaaagctgaggcttagaaagaaagcccaattcatccattctcaagccactcctgcattttgattcccattcctctgtggatggagagactcagataatgagcaaggcctttgtgctctttagcggtgctcattggtggcgccacaggactaactcagaactcactttcataagcgcaccacaagccaccactgggggaaatgagtcattctaatctagaaaatgctatgattgattgagtgctactgaggagagaagccatttctcttactgtctcctgtctctgaagaggaggaggaagtaaaagttgaaaaacaacaggaatgaagtcagtggcaagaccagccggtgccactgatgacccggcctgaggttaaaagattaaccccccaactctaaccacatgtgctctcaatccat

SEQ ID NO: 50061 - DNA, 789 bp, Homo sapiens
cataacagtcgaggtaatgggaggaaacagtggaggagagatccccgtacaatttcaagagaggtaaagagaatagaaaccagctgacaagttggagaatcagaacatggaagccatattccagcatggtggaggaggcggagcggtggggttgcagaaaagataattcattatctggggaagaactggccacttggtggggaggcatcttctcacacatccctgagtttggaggtgtggcagccatctccaggcaaaaacggagctcccttccgtagagacaaacattctttctgagaattggggcttctagatccctgtgtaagtggtgtcctggccagattcctctgtctgcttaagccaaagtgaagcgctgccagatggtgacatgctgccgggacactgccggaatgtgatgaagagaagccgctgcacctagggcacatgactcctgcctcatgacccctgtctggtaatccaagctcagcacctgcctcaatatctatgaaaaggactcatatatcaatgacttcagatttataataacagaaatagtgtctattggtttttaaccttgagaatcagtctcgtaggacacagaagattaaatacggttatagaagaaaatgtgatatgatcagcttcccagtgtaaaagcaaattccagctgtcagaaagtgagaaaggtatgggaggaagaagaggggccctcatgtcttcatctaattgaggtgaaaatcaagacatactttctaaaatggatgtaatataaaatatatgcttacatta

SEQ ID NO: 50062 - DNA, 4523 bp, Homo sapiens
gccactgcattccagcctgggtgacagagtgagattctgtctgaaaataataatgataataataataataataaaataagaataaagtgtatatgccaacttttcttaaattttgtccactcatttctgttacctgcctgctgtataggcatgtgactttcaatccctggcctgagagtccctgaacttgagggaggatttgtttctgcacatcatgtggctgctgctggcggctgcgtatctgagctcaggagcggaacaccacttggcctgggcagaaacccagagtattgccacagagagggcaagcatccagggactgatcacatgaagctccatccacaatactgtgtggcacagccatgcaagagatacagttaactactaacagttttcagtttccagatgcctggccttgacaccagaagtgatcatcagcccctttgtgctgagccagactggaatggaagagtattttcttgaatgagaagtggaggtccctagagggagatacttgacttcctgggacaagtaggggcctatgtgattgattaaaacaataaaagatagagtcattcatatttttgtttttaattgacctcacgtggatagaattagattaattagaactcgatttgtaacacactctcatcatggccttctttgagcgtgtgagtgactgcatttgtttaattattcaaagagatgaatgcattcaaagtccaaattttatactgaagaatactgtgcaccacggtgaactctactcatatgagatctaaaagaagcccacagaatggacaaccagtatttattgagcatctatttgactcaaagtcctatgccgggccctttgcaaacattttctatttaattctccccaaattgtccctgggtaactgcttcttatcctccctgcctcactccctcctgctactgtaaactggctggtcagaaatagaattgctgtgagcgacaagaacattgcagtgcaatattctcaggtggttgggtggtttgctattgggtgactttcaattttcacagccgaactttaaagtctcattaaaacagttttttgttgctgtttgctgagtttacgtcagcagcaattcagcaaataagcagacacagcagattgcctgttttggcaggtctaataagagacctacaaaaaatgtgattgcgaaggaaaaacgtgatttcagaactaaagcctagtgagccccttggtaagaattgtcttctataaatcctaattgatctttacatgtgaatgactttgaaagaaaatgaagtctctttcttctcccccgtcattggacatgtttgtattggcagaagttttgaatgggtgattgctaaggagtttggaaatctctattagtgtctgatgcaacctgatgtcctgaataacattaaatttttttaaatcctgagcatgaaaagaatccctcttagattagagcagctataaagatcccagctggcccttccctagggttttaaaagtttttctaagcatctggctggaagaatcatgaggaaatactaaaatggcttgatatttattgcagcttcacctgtgggcaaaggactgtgcttggtgctggctgaatcagacaggcctctccctcaagttgcccacagtctcatgatggaagtaagacaagtctccaaaaattggaattcaaggtagaaagaaataagggccgtaaaaagtacaaggcagggccaagacttgcataaggagctgcagatccgtgtgatctttaagatgagagttgctagtgtggaaccgggttgtgcaaaaggttctctgggacagcgaaagacagaggatggggaagccacggtgggtggagatgagaagatggcagtgagaacccagcgagaaggcttccttatgtttgagctgctgtgagaagagtgaagatgaggcagaattacaaaggcagcaaggcctaatactgctgtgccctcaccctcactgagcccctttgttgacacctgctgcccagattctcagtactcccgcgctatggcttggtgtgcaggggctctgcctctgaggggccccactctttcctgtcttcctccttttcccctctctgttgttcctccctagggtccaggtctctacctagtaagggctaaattactaacttactgataggatgaaattagtaatgactctgtatttgtttcttagaggtcgatctctaagaatggcaatctccctccacactgagtcaaaaggaaggtatttgaggacttggatttgtaagttgttagaagagcctctaaagtcaccctgcccagcctcctactattctatcaaagctccctaaatcatctctgacaggcagataggcctgggtcttggcagcccccagtcctgcctgcctggggaagacttaggcaccatccccatgcacatctttattccaggtctctgcttggtatcagtcaagcgcgttaggcagaagctggtctgaattacgggcacaaagcccctcttcagctccagggcagcagggaggcctgggttcggggagaccttgcttagggcggggataagaacaagctgctactcagctgtgggctgtttatgtcagggacatagcagtccacgccaggtgcccgcggtccgcccgggtctgtggccggcaagctgccgacaggccggggcgtcagataatgtgggcattcattcactccggcagctccctgcagcactcactggaggagagggggttgaattctgaactaggagtacagacagcccaggggtgcaagcagccctttgccacaagtgcattgccactgtcttcgggggttcctctgcagggtagggggcggggggcactgtcagcttggagagttgagacatcagttcagggtaatatgtgaacttttgttgcctgccttgcctaagtctgtaataagactagttaaaaattgctagaatttccaaatcctctttgtgactttttcccccagtaggctgcctgctaagaaagagtagacagacccaatgtcctccgatcagtctggactcagttcatccttcccctggtacagaagagctgcgtcagtcattctctctgtgatctactgataagagtcctggacggggaattccaaggccatgggtctattcccagccttgccactatgaatgtgacctccagcagttaggtaactgttttggccttctgtttcctcacctttaaaatggacataatagcaactgtcctacctcccttccgggatggctgtaaggatgaaatgagaaagcaatcacaaatcatgtcatacacaagaggccagtaagtcctcaaggctagatgttggcaaacttttatgcaaagggccaggtagtaaatattttagactttttgtactgtatcaggcctctgttgcctattcctgtgtgtgttttacaacccttgaaaaatgtaaaactaattctcagctcctgggtcacagaaaaacaggccacaggctggatctggcacacaggttgtagtttgccaatctctgctcagagcgaatcagaggtgaggactggaggtagggtcagcagttgtgataagtctgaatctaaataaacattaaaaatacgtaatatatgaatcatatataaatagaaaggaatttacatatacacgttttttctgacttgtggcccgcactcatgtaattatttgaaccccagcccataggccatcttgtctgagtactcctagaccattttgccattcactgaattcttcattgcctagcctaaccaaatgaaacaatcaatcatccagaggtggctcagggtctgtctggcatccctcctgggcaaaacagcatctactctgaattgcttagcagtcatacaactagagggcagccttcagcctcagcttggctggttgtcactcctaagaggttcattggggccttacagaaatgaaaccgctggcagaccatcttgcctacctgggcagtgctgcctgggcatagctcctgcatggcctccttctcagggagagtgggacaaggatcttcatttggggatcgctactgcccatgtaaaaaccaattcgtgttaccggtgacaatgagcattctgacagtactttgttgactgtgtgtttaagctgttattatttctcccataacaccctaatgagataagctggcattatcactgtcatttgcaaacaagggaattgtgatgacagatatttaaacaacgttctcaagacacaaaagtcaactttcctgatgaggtggaccaatgtttctggtttctcatctctcccatgagatcccttttcccctttgcatgtctctttctccttttcccagcctcactcttcattagaagatatcagaggagccacagaatgaaccccttaatgagaacagctgataacaaagaatctttatttccttctcttcccttccaaaggatttccaaagaaaaatggcatgtcagtaacacttatctacagtaacgaaagcag

SEQ ID NO: 50063 - DNA, 4442 bp, Homo sapiens
gagctcctgataggcagggatggtaactactcattgttgcctcctgagcctagccttgtgcctggccatagtcatctctaagaaatgttgagacaatggagaaatgacctgaaactagatcttggaagcctttgatatcccagcaaaatgattcaatgctatcttcagtgatatccattgtagggtattcacagtgatccactggcggtcagggagaaagtattagaactactatttatggtttgtcaaaaattaacaatgaaagtaaacttttctaatattttctataaaatgacagtagcacacatatttgatttataaataaatacaaacattggccaggcatggtggctcacacctgtgatcgcagcactttgggaggccaaggcgggtggatcatgaggtcaggagttaaaggtcagcctggccaatacggtgaaaccctgtctctactaaaaaatacaaaaattagccaggcatggtggcgtacacctgtagtcccagctacttgagaggctgaggcagcagaatcaccggaacccaggaggcggaggttgcagcgagccgagatcgcctccactgtgctccagcctgagcaacagagcaagactctgtctcaaacaaacaaacaaaacacatacattaagaataggaggtgcctttgagaattgtaggctgctgttgtaagtaagtggaagccactgaaagactctgaaccgggggaaaacatgaaaaaaacaagtgttcagaagaattggtcttatagactagatggagatagagtcaccaatcaatgggcaaggcactgaaagggccatacacaagagacaaaagacgagacaagaataggagtgataggagcgggtggaaaagaagatctactaaagaatgatcatcattatctttgttagcatcgttccatcagtggaactgggtcacgtattgtcacagtaaggagaaggagaaagagccgcatggagactccaaatgcagttacagaatgagaccacaggctaaactcaaaggagaacatggaatactttgccccaggcttagagtctataagtgagactttcaaaaaccgtttttccccactggtttgaaggggcaacaaataaaggccactcctcgggcctgtccaatcccagattggggcttctcagtaaagactatttatagctctgattattgcagcaaggttatgcaactgctgcgtggggcaggcaggacagctgtcccgagcccttgccgggtgagtgaccgtctgaccgtcttctggctgcttcctgttggcttaggagacaacagaagaaggtggatttgtttgtccattgagcaacctgccattgccctgcctgtgcccgcctgtctccctttaaacattaacaatctcttaaaacatttgggttttgtgcccaaggccgaggggatcccaagagaaagaggaacagaaaaggggaggaggaggaaaagaagggagcggggaggaagggagagagagtgttccctgcgtcaacaatttattcattccacaaacatttctaagtgtccatggtgacccagacatcatgggaacttcagggttccagagctgagtagaacacaactcccatccttagggattcaccatccagtagaggagaaagacgtcgagacagaagacagaagggaaaggaaaagctcaatgctgtgccttcaacttagcttctccattttttggagaagggttaataggggaagcagagagagagagatgagagaccaaagtttctagggcctttatctccagagcagagggtctgaaaccttagtgagcaaaaactgatccggaagacttgttggaggcataccttccagttcagcgagccatttcagcagattggaggtgggcccagggctctgcattttcccagctctctgggggatctagatgcaggtagtctgtcatcacaaggggatgctgctcttccacagtgggcctggagaaccagaactggcaactgcctggccccagagctgccagccatgaggcgggtccaccagagactgatggaggaaagaggaaagggaacagggaacctcagagaggattagggtgggaaatggaaaaagagaaaatccaaggagtgcaaaagagaaaagggaggcctctctaaggaggacagcgagtattagcggaggtgctagggccactcagggtgactgatgtccatgtgttagccacggacattgaaagatttttggtctttcaaactcgaggacttgcctaaccaagcacagagcaaagaacagaaagctgactttgctagatgcttgggcatcaatatcacgtggaaccagccttttctttgatacctcttgcgtttcttgcagatcccctgcctgcagcacgtgctgatctccaagggtgaggctggatgaagccaggggctatggaaagggagactgtttcagaggacttgacaccatcttcagtaatttctctggttcttggcagctccatttggctgcgtccctaccctgcataaccctcccagctagtctactccagggcagcatccagctggtgacctgagagggcagtggcgcaccagtctccatgaaggttgagctccgatggccaacagccatttccaccttgtggtctacaactcttcatcccgactgcatggaggttggtctctctcttcagctggatttaggccaccatctgagcccccggggtacgttttgtctgaccctggcgccattcgaacggttcttctacagcatcaggtacgatgttcctatttagttcaaccccattcctaaggcgcgtttccactcctccactcctttccaaatggacatctcctccctcattctctctcttttttttttaaattttataatataaatatgtattaaaaatagagacggagtcttgctatgttacccaggctggtctcgatccccttggctcacgtaatcctctcacctcagactccgtaagtgttaggattacaggcatgagccacctcacctggtctcctccctcattcttcaagcgtctgctctagcgttaccttccctgtgaattctttctttcctttttgccatttggaatcctttttcttttatttatttaattgacaaataataattgtacaaatttatggggtgcatagcgatcttttgatacatagaaggtatggtgatcagatcgggataattagcatatctgtcacatcaaacattatcatttctttgtgttagaaattttcaagatcctccttctagctctttgaaactatatgtttctattaactacagtcatcctacagtgctatagaacactagaccttccgcctcctatccagctgtaattttgtatcatatagcaaatctccctgttctttatcccatcttcccttgtcccatttgaagttcttatcacgtggtactggcactccgtttgggtatgcgccacccattttactgcaggttccagagatctagtctcatggaggtcactggggcagaatgattaggaactcaggctaaactaattcagaatctcagcactgtcacctgtcagctgtgtgacctcaggcacgctacttcatcaacctactctcagtttccttacctataaaatggacaaacaattgtatttactattaaggttaagtgtagttactattaaggatataacttggtccagcccctggaacattgtagctctcaataaatgtttgttcttctcattatacatatgcatatccttactttaatctctgtggatttaatacagagtggatgctcaatcacgtttatgggattagcagttaagatatgtacctgtatcgctgcgtctgtccactagtatattttaagaaggaatgggtaattcgatatatctgttcatggatcaatattttatggtctttcctctatgccaggattggttcagagtggaattatctacccaagctcgggcaggtccatcaatcgctcttcttttgtgtccgttgcttcggagtgcctttctcacttctgttcctatccttatatttgctgccctgtttctgaaggagcagatcagaaaatgggggctttttaaaaggatcttaaactgagcctgagctgtctagaggaaaacagcaaaagaattctatcaagtctgttgtaatttgaattccccctttcccctatcaatttccaccctgtgaaatgaggtgggaggaactaaatacactctgcagtccctgtcaatcgcagtggtctgtgatcttttttgtccatgggggcacttttagctcagcaaggtaaagcaacgttagcaaacaaacacaatttaatgactagttctggctctctgataaggatactctcaaaaagaaaacaggtgcaatctctactgtttgcccaatttgctgcttgtctttgcacttgcctggaat

SEQ ID NO: 50064 - DNA, 1072 bp, Homo sapiens
cacagagaatcagtcaaggttccttctcccttctctctggtgaagacacagggtacctttttttaaaaaaacataaaaaatgtaacttcagaaactagaaagcaagattagcaccagggaaagcttcagtggtgaattgttttcatagcatctctactcccttcaaagaccatgcagacagggagtatctactttggtgtggtccagcctttagcagccattgcttgcaaaagaagtggtgtttgggaatgctttcaatatgcagagatgttttgttggcccgggtcctatctctatggattccaacagcaggagcttgcagatgtgtgtggaaagggcagaaaagcttgcccaggaggctgagctggaggagcctcagcgccaggctttgtgtgttggctggaatgcttcttgcagccctcagtgggcggcaaagaaaaccacctacaggccggagaatgtgaggggtgtccaagtgccatgagaacattctactcaagtccacttgatagagctgttgctcctgatggtttatcctgtgtcccctctgcctggactgcttccaagcctccaggccagctggtctaggagctgctgagaagctacgtgtgcgaatttcctacaccgtggcagccagtagccaggcacctgtcaggcttcggggtgggagttcacggaggggcatggatttatccttccaccatcaatccaacagagggcctctttctgccctgaccttattcccttctgcttccattatactaacaccaccacctcatggacagacctgctcactacaggtagtattcattttatttcattttttttcagttactactgtcctctgggaaaatgaatcctcctcctgacaagcgcttcaaacttctaggctgtgggcatgcaaaggaaaacacagcccaggaaaaatatccctagggaatatgagcatattagacccagcgtagcagacattatgtgtattcatagacatatacaggttatttatgtatgtatgtatttacatatatgatatatgcatgcaatatgagacatatgtacatatatctacact

SEQ ID NO: 50065 - DNA, 1595 bp, Homo sapiens
aagctattttatttattgttattttttaaatttattattattttttacagacagggtctgactcttgcccaggctggggtgcagtggtgcagtcatagctcactgcaacctggaactcttgggctcaagtgatcctcctgcctcagtctcctgagtagttgggactgcaggtgcaagccatcatggctggctaattacattttttttttaagagaagaattttcactgtgttgtgtaggctgctctcaaattcctggcctcaagtgatcctcctgcctcagcctcccaaggtgctgagccacaatgcccagctcctatcacctattttagaatagtactgaggcacttctttttcagtctggacattccagcccattcattgacatggattactggtgattttgttggtgaggctgaggcagctgtccccaggaatggaagtgctgtctgcagtgccatttggaaagcagccctcagctctccagtcagacaggaacatgtgtcatttccttgtggactggactctacaggtcgattggggcctcttgctactaccacactgtctttggtctagagggcagcagtttgctctgtcatgggcattagtggatctttagtgccactagcttaagaatcttgtgatttggggtttcagggaagagcagcagtcatctatcccctatagatacacgatctcagaggctctgtgggcacatatccatattaatgtatacagcctgcctggctccacctccacttaacttctcactgcagagaaatatgggggcgggcgggggaaagagacttaggaaggaaccaggcctcctgtatcaagttcctgggttcttgtgtgtctattgcttgaaagggaagaactgttttttgtgtgttttttgtgagagaaagaaaggaaggaaggaaggggaaggggaagggaagggaggagggagggagggaggaaggaaggaaggaaggaaggaaggaaggaaggaaggaaggaaggaaggaaggaaaaacagggctgaaggtgaaagaaagccaatcccctctaggtatgtcaatgctcctaaagcctacccctgtccctgttatcttggggtacggtggggttggcactaggttgtggtagctgatggaaggccaatggagtatgcttggctcttactccagcaaacaccaggcttggtgagtcacctagtgcctcccactcctccagggccatgtgttgagtagcaggtctccctgggtggtaagatttatgccaactgatgatatcaggacccatgggttgttaacagactgtgacgtcaagtggccatattcccttcatccaatccagttaaaggctttcctcacatatggaaactcaggagtgcccacaggagtgattctcatagaatgactcatggacaagcaggggtctgtaaggcttctccaggtggccactgatttctcataggatagtgagaattgctcatcattctgcaccttcaatatctttcttactcccacatcatccccattggcaaatacatctaacttggaatagctcatcttaaaaacaaaacaaaaacattcccttgaccttataggcc

SEQ ID NO: 50066 - DNA, 1193 bp, Homo sapiens
atcacctgagcctgcaaggtcaaggctgcagtgagcgatgatcacgccactgcactccagcctgggtgacagagtgagaccctgcctcaaataaatacataaataaattaatttaaatttaaacatgtacttattcagttgccatagttacatttcaagtgtttcgtagtcatatgggtcaatgactaccagattaaaattgtgcaactacagaacatgtctgttacagaaaattctattgataggcacagttctatgtcagagatcagcagctttttctgtaaaaggcaaaataatattttaaattttagggccatacgatcctgtcatgtctactcacctctgcattgtagcatgcaagcggccacagacagtaagtacacagatgaacatggctgtgttctaataaaattttattacaaaaacaagcaacagctgaatttggcctaagagtcgtatttttagagcaaaggtcagcaaactatgacctatgagccaaatttggcccactgtctattttgcttatttttaaaatagctttattgaaatataattcacatatcatataatttgcccatatagctcagtggttttcagtatagtcacacagttgtgccaacatcaccacgtttaacaaacacctttttatttttttttttgcaaaaaaagttttacaggaaagcaggtttactcatttatttatgtcttgacctatgcctgctttcatacctcaatggcagagttgggtatttgcaacagagactatatggacttcaaaggctaaaacatttagcgtctgactctttagagaaaatatttgctctagaatgtcgtctgtacccataaggcacaagcttgctgtgtttgacctggatttcaggagtgttcatgaggtgttatctctgctctctgtcagggtcggaactctaatgtccacagcactgcttgcttgatctctcatcccattgtttctccctcaaccctacagcagctgctacttggtgagcctcaggtgttgctgcccgttgtatatacagcataaccctcagctacagaccttcaaggactccagtacaaatttttggaacctatttctttttttttttttctttttcttttttcttgttctttttttttttttttttgagacggaatctcactctgtcgctcaggctggagtccagtggcgcgat

SEQ ID NO: 50067 - DNA, 4678 bp, Homo sapiens
gacccaattttccaggtaccgtctgtcaccccttcccttggctaggaaagggaattccctgaccccttgagcttcccacgtgaggcgatgcctcgccctgctttggcttacgctcagtgggctgcacctactgtcctgcccccactgtccaatgagccccagtgagatgaacttggtacctcagttggaaatgcagaaatcacccatcttctgcgttgctcacgctgggagctgtagactggagctgttcctattcggccatcttggaacctccccagatgatctccccacacctaattttctaattaaaaaattatttagaactcggctgaagattccttcaagaagcaacatgaacctgatcgtggagagtaagaaggaattcagagaaaaaaggagctagagatgtcaaacaaaatgtccctgccctcaagtggctcacaatctattagctgagcataggaacttctgtgagtgaatgggataaagaatatcccattaaaactatgtctagatatttatttcttgcccctcaaaggcatttttgaaaaagcacagcagttggccgggcacagtggctcacgcctgtaatcccaacactttgggaggccaaggcaggcggtcacgaggtcaggagatcgagaccatcctggctaacacagtgaaacctcgtctctactaaaaatacaaaaaattagccgggggtggtggcgggcgcctgtaatcccagctactcgggaggctgagtcaggagaatggcgtgaacctgggagtcacagcttgcagtgagctgagattgcgtcactgcactccagcctgggtgacacagccagactccatctcaaaaaaaaaaaaaaaaaaaaaagaagagaaaagaaagaaggagagaaagcacagcagttgcagaggagtccagccatttcacaaggaagaagaggaagcacacagataactaatagccaaacataaatgtctacgcttttcgtttggatgggccatgggccacgttccagctaacatgattctttcatctctcatctctttccgccctttcctttcctcctgtgttctgatcctgactaccaccaggcatcctcagaaaggatttttcatgctgataattagacttgatgtatttatggagctctgttttcccagaggatcatcccatctgaggctgacatccctttgaaagtttggagaatgtgaagcttggaagagctaaacagttcccagagaccagaaccgcagggaattaaacttcaggatgatcttaagatatttagtgctcttatcctccatgtgcagagtatctctttggaaaaattttggtggcaaaagtcattaatgaatctatataacaccctgtttaaccaaagtatggatccaatttttaacttgctgttttgatctctattagatttgtggtttgcagaagtttggactactttaccccataacaaaaaaggagtcacatacacacactgtaagatgttgaagtctgagtcacttgagctatctttttattgcacaaagctcctgggcgatcttgcatgaatcattgttcaacactgagaagttctaattcagtaaacaaaatgctatcacaagttcatctttagctgccaattatgcaatttgaaaatgacacgtactcacagcattcagtcccttcatagctccacaaaaaccaccttaggacaatttgttctgttaaatgagtagctagaaaagttacacattatgccaggcataatcttcttgtttctctggcagacagctgcctaggaaataaaatctgtactgttgtttattgcttgagaatttgtttctgtaggaggacaggtgcatttaccatgccagtgagggatggataaaaggaaataaaggagagcttaaaaggaactctatgattttaggtcacttattaaaccccctaatcattagtttgttcatctgtacagtgaagataataatgttccatgcccatcttacaggatgatagtgagaatcagttcaagttagttagtaagcaaatgagaagtacctactatgcacagcactataccagatatctctggaaatagataagtaaataaaaattactttttagctcagtggccatttaatgataaaataaaatgtaggtatgtacattattatgtacattgttaaactccatttttatgcacaatgttaaactccatgcaaatacaaagtagtagtagtggggcaatggtgaccacagtagtaaactcagaaagtcaaaactagaagggggcttagacattctgtagtctactcccctgagtttaaacaaactgacttccagggagattaatgctttatccaagaatggacaaacagcagaagcaaatatatgttgttaatatgccctgattttctttctttctttctttctttctttttttttttttttttgagatggagtctctctctgttgcccaggctggagcagagtggcgccatcttggctcactgcaagctccgccttccatgttcacgccattctcctgcctcagcctcccaagtagctgggactacaggcacccgccaccacagccagctatttttttttgtattttcagtagagatggggtttcaccatgttagccaggatggtcttgatctcctgacctcgtgatccacccgccttggcctcccaaagtgctgggattacaggcatgaaccaccacgcccggccaatatacccgagttttcaagcagattcctggaaacccagatggcaactttagcatcatcagctaaaatttaatacggggagaattgaatacatgtacagaaatctttcagctctgcttaccactgtggataggaaggtgggctgacggtgttagattctggccctgctactcattaattagtgaccttgggcaagttacttaatttccatgtctcctctcctcatctgtaatatgaaggaaatcatagtgccaaacatcaaaggattattatgaaagttcaaggaattaatatgtaaagtgctgcaaagagagtctagcacatgacaagctctctgcattgctgtctattcatataatttaagcccagtggaggctgacacggccatcctgttggtgagggaggtgtctaaggaagtgctgagctggggaagtcagaacacattagaacaaacgggcagcactgaaagctatgaaggcagggaagatttctttccccacaaaccaaaccaaagaggttacctttaggatacttttttccttttcacaaagatgtcagctaacatcctgagcatttcaggtatcatgtctgagtgccaatgcagggaatgagcctgtaattctaggacttgagcagtgctctcatcaattcagctcccaaccacagcttactctgggttgaattaaggtagcaaatggtttacagagaagaggcagcccctgttctgagataaaggtattgatcacccatcattatcaattcatcagcctctgcaccactcaacctgcctggaagattggcaggcgaagcccgggttgggggtggggaggttgttaggtttacacacagatcacacgtgatcacatgacatttcctaacttcagcagaacatgatagccactgaggaccctgaagctcagttagggtcgctctgggacagctgtctatttcctggcttcacttggtaggcagggtggaggcaaggtcaaagaagatcaagaactgggctgtaacataatccatggaattgacactgcagaacaaagaacatgtctagtacaagaggtgtgcccagcacaggacaaaaccgtgtccaggaggaagagggagtcatgtacgtccaggtctgtgtgggagtgggtgacctgtctggagattcctatccctttggtggagagtgaagcatcggcttcagttaactttccaatcaggcagccggcgccctcttctcactctgattctagcctctccaggctgtcttctgatgatcacttgacttcccacctagattgcaccacagggagagaacgtgcttgaaacaggatgtgtgtcggatctcttggctgattttacttgtcatcgtaaattaataaaatggcattttgatttacacacccgtctcttgtgaacttggtgagtgtgactgagagcccgataaaccgatcttacctccgtgtgctgacaaaaccaattttctcagtttctgaacctgaaaaactaagggccagcccttagactgcggtgaaatcaccaaggtaaattcccttttgaagtctctggcagacagacagccgccctttcctccacctcctgtcaaacacatttctcttgtggactttcatctttcaaggtgaacactccatgttcaatgcccactcaaatgattgattccatggtggtaagctcaggaaatgggaaactttctcctcccctgagccacctaatcaatgttttaacatgtctataaaggcacttaatcaaaacataattctaataagcatgtggtttttagcatcttatgtagatcccctattcaaaatgatgaaactgttattcagttgtaacccaagctttcgtaggccacaccagacagtacaaattaggttatgttccctttaaatccagtggtgctggtggggtgaccccacctgcagaaggctggtcattaacctct

SEQ ID NO: 50068 - DNA, 1390 bp, Homo sapiens
ctttatgttatgtacctcacaagccaacttgaaccctactctaattacttttttgattaattaaaacctgcctctcctgattttctcttcgtggctctgcatgaggctttccccttgcatgtttaatgggttcccctgaagtttgtcagttgatgaagctaaagccctgccacggggaacaaaaggaggatctgttgtttccccagccatggccagccccatcccagaacagggagaaatctgggctgaacagtccagaataacactaggaaaagccccacatatggtaagaaaataaaagccaagtcatcttcttgcttgtttgtcccataagagactttataagtaattgtttttctagaaatattcccattcactcttttttaagtaatttcaaaatatctgatattgttaaccctagggagttccttgaagagtgtgtggaatccatcaggatactaaaacgatctctttttttagagacagaatctagctctgtcatgcccaggctggagtgtagtggcgccatctcggctcactgcaacttctgctgtccgggttcaagcgattctcctgcctccgtctcccaggtagcagggattacaggtcaccacgcccagctaattttttgtatatttagtatagacagggtttcaccgtattggccaggctggtctcgaagtccctacctcaggtgatccatccacctcagcctcccaaagtgctgggattgcaggtgtgagccacggtgcttcacctaaaaccatcttttaataccttcctaggctctgggattacttttgaaggacaccattagaatactatgactcaaggctaatgacaggtgaataaggacaatagaaaattttccacttaaaattgtgtgtttgtgactcaatatgttgagatagctcatcaattattaaccaactaggaaaacttccaagtactgcgtcaaaacatacaacaccagaaggcattcacccaagcaggttctatttattgaatgctgtttactatctcttggcagctttgtctttttagatgtgtttagaagcctccctaatatatacactgtcaactgaggagatctctgtttgaatttttcaaataaaaggctggcagaaacccaaaggcaagtacgctaacttcagatccttagagagataaaagtaggccgttcatctgcaaatccaccttggttgagtgcgttcaatttgctgaatttgtttaggaatacagtttagtgataatgattagacctgccatgccgtggtgcaataccataaaagtcagagcctaaaaagtgagtgtgaacagaaaaacgggtattcctagagaagaaaactcacagtatttcagatgtgagttggtggtattcattcttggc

SEQ ID NO: 50069 - DNA, 1270 bp, Homo sapiens
agcggagcagggcaaagaaagccgactgaaagtgagaaatgcaggaaatgtttcccatctaggcagaagctggttccagcattcaaatctctccagccggcccgccaccacgtcacaaagcccgcctctcagtgacaaagccccgccccgttcccttggctgttctctgagctcccaatacttccctccttctctttggcccctgctaccccgcctagcatcatttcctgtgcgctggatgctgattggtccgacagtcggaagtgagggcgggcggtgggggccgttgccgcagtgacagtgctaggggagtccgaagatggcggcgtcgcgtcgctctcagcatcatcaccaccatcatcaacaacagctccagcccgccccaggggcttcagcgccgccgccgccacctcctcccccactcagccctggcctggccccggggaccaccccagcctctcccacggccagcggcctggcccccttcgcctccccgcggcacggcctagcgctgccggagggggatggcagtcgggatccgcccgacaggccccgatccccggacccggttgacggtaccagctgttgcagtaccaccagcacaatctgtaccgtcgccgccgctcccgtggtcccagcggtttctacttcatctgccgctggggtcgctcccaacccagccggcagtggcagtaacaattcaccgtcgtcctcttcttccccgacttcttcctcatcttcctctccatcctcccctggatcgagcttggcggagagccccgaggcggccggagttagcagcacagcaccactggggcctggggcagcaggacctgggacaggggtcccagcagtgagcggggccctacgggaactgctggaggcctgtcgcaatggggacgtgtcccgggtaaagaggctggtggacgcggcaaacgtaaatgcaaaggacatggccggccggaagtcttctcccctgcacttcgctgcaggtcagagacttttgaattgtttattaagggttatgggtttgggtgcagggtccggttaggacaagaaaacaggttattgtgatgggacaaagtgggggcgtggttatggttcttcatcacctcaccagaagactggaggttcctttcttttggtggtgcctgggtgatgggggcgtggttgggggggataagtgaatccaaggaattcttcagtggttgcacagtactcattacaaaactcactgtagttggtagtctctgcatatggatatatttac

SEQ ID NO: 50070 - DNA, 1795 bp, Homo sapiens
cccatcctttcaaagaggtttctttcacgttccagaattcagattgttctgtgatttcttttacatcagtctacccatttctgcaggcagccctgaaagcccttgtgttgattcagagtgtttgcagagaaatgcagttgaaccctggtagtggggtgtccctcacacacccgcgcacccctcccaaagttcaggatgaaaggctagaaaacccattcaaagttaggaaagaacacagatctttgaggccgatagcctagacctagaagatgaccttgagtatgtaaacattgtctccgtgacacaaaacactgaaactcttcatgtgcatataacacctgcttctgctcccattgtttcaagctcatcttatctttgtagtagtaatgtttgtctttgatacctacaaactaaaaaggtacttttatcaaggtttctcaaaacatttacaaaaccagctttgagaaaatgttatgttgcctggcaacagcactcggagtagtaattgtgttttctcattgtgatgttggtctgtgtgagcaaccagtgtagtgactctttggttcattattcgtgttgtttttatttttagtctctgtgtgacccaacagtggcaggggttacaaccccctctcctttcttttttgtatttatctatttgtaggattgtcagatcaagtacaagatgcccagttaagtttgaatttcagagaaacaatttcacgttaagaatgtttcatgcaatatttggcatatatttacagtaaaagcattcattatttgtctgaaattcaaatttaactgagcatgctggtttttctcattgtttggtttttctaaatctggcaatcctacagctgtggtcatgggaaatcacctacagcatgttaaagtcctctagtcatcatctcgtcacctgaaatggaagtcctttttccctcaccctccacttctttccaaaggagggcatcaaggaacttaacctgcctgcctggtgggtttctatttaagacatctttgtgattatatttaacctgcaattgtgctttggcttaatgtctagctcactgtacttgtaaatgattaatattcaataaaaccatttttaaagtacacttgtgtggatagcagttagctcttaagtattttcattttgccctgcttgttcatttctgcctgaccaaccttaacacaactgacttgaaaaactgtcagaatacaaataccaaccctccctctccatcttccagtgagacctgggttttaagtgacttatcctcacgtctcagcccacatggcagttactgaataacttctgcaatagcacgggcaacatgggttcctttcagaaatatctcttaaacaaacaggctgacactttagagccagacctcctaccaggtccaaaggcagcccaggggccttgcacaacatgattgctcacagactcaccttctccacctctcgggggagacggaggggaagaacgcctgcttcatgcaacagtcagtattaaatacttagcacagtgcctggcgcagaggactaagaaaatccttccattcttcccctcttctttctccatgcctaggggtccgttacatagcaaatttgaacctagaattttatctgtacagtaacttttttgccagagggcttgtcagagcaacaaacagacataattaaatggaagtattctagtaaccctgcaaataacaatagccatcattgagcccctacgtgaaccaagtactttgtatacatacattttcattagtaaccccaaaaactttgc

SEQ ID NO: 50071 - DNA, 1079 bp, Homo sapiens
ggcaaacatgtccccaagaaagataagattaagggactgagttattttcgtacaggtagttaacagaattatcattgataaatatcagtgaaataagttatctgataattaagttttaaacgaatcaacataaagcagttttaaatgagataatcccatacgattcactgcttcattcattcaacccacaacttactgagagtctactatgtgcctaggggtatcgttttctgcattaagaatcagtctaatttatcaaagctggatgactttgcaatacacctttagactctgggtgaagttgatgaacaacctattaactgacagatctaccaaatgccctctcagcttaaaaagttggtgattcacgccaggcacggtagcccatatctgaaatgtcagcactttgggaggccaaggccgtagggtttcttgaggcctggagtttgagaccagcctgggcaatgtagtgagactctttctctaagataaaataaaataaaataaaataaaataaaataaaataaaataaaataaaataaaataaaatagctggtgaaccaaggaatttagagaatttctgattttttccgcgctgccccctgaatttcacagaagagaaaaataaagagacacaaaataacttgtcaaaggtcacagaactggttaatctaaaactagattacaatccaggccacctcttggatactcattcacctccccatttgttcatttactcaacaaatgttttttatgtcctacaatggaagtccagtgctcttggcttgtcatgtctttataataaagacaatcatcatcaccataactgttattaggcagtatgttaagtgtattcacttggattaccatgtttcacggtcataaatgtttagtaagtagttagaaaagataaggttgacaaataacagtatttacaaaactaaattctacctgtgtcctttgtgggggtgtacaggggggaggtctctgtgatgtaagtctgaaaggtgtgtatgtatgaaggagtttagttcatatactaatcagagaacacttagataacagaataagagactagg

SEQ ID NO: 50072 - DNA, 2026 bp, Homo sapiens
acaacaccaccattaagtccacctacactgccttaatggtgctgttggtgccttgctcccgtattttggccgctgcaaaatgggcttaaatatgtttgtaaatacataacttaatattgaattcatcttccctattccgcgcattttgagaactgtgcttagttttcactttggacgaatagcaacccttctgatggccgtcatgacaatgtctccaataaaaactgacagtctagctggctgcaaggcaggtcctcttctatcttactgggcactgctaaactgcgaagtcggggcgacacggcagcaactttaaaatcaaaccgcatccccaagggctcggcgtgttttttggcctctgcagcttcacgtacttcgtacgacaggagcgcacttgttctctgtccgagaacttcgtcccgagagaacctcaggaactcgccgggccacaccccctgtccagggaaggaacacgcccccggtgacagccggtacggccccgggtttgggcaacctcgattacgggcggcctccagccccgccagcagcgccccgcgcccgcccgcccgcgcccctgccgccccccggttccggccgcggaccccactctctgccgttccggctgcggctccgctgccggtagcgccgtcccccgggaccacccttcggctggcgccctcccatgctctcggccacccggagggcttgccagctcctcctcctccacagcctctttcccgtcccgaggatgggcaactcggcctcgaacatcgtcagcccccaggaggccttgccgggccggaaggaacagacccctgtagcgggtaagcactggccacacggaaggcgcgggcggcgacgctgcgcatgcgcgcctttgcccggcggcagcgcgcccgctgcccggaaggaagccgtgggctggcctcgggcgggtcgcggggtgggggtctgcgcaggcgcgaaggggcgccggcagtggccggggagacgctggggtccactgacgtccctttgtctttgtttggctcgtcatcttctggagccaaactgggcattctgaaggaatctagtgcatcggtctcacttacccggagtgcataccgtcgcggccccaagttttgggcaggaaatgtgccgctggggtctggccttgctcgcgggcgcccgcggcgctgtgcctgcgccctcctttcttgtctcctctgcgccggccgccgggacccagggcacctgcagcggggctggtgcgagtgttgtcccgggaaatgccggaatgagacgagacgatgaaaaccttaagtgtggaactgcgtctcaggccagtgttctggctgagtcacccctagtcacccctcgtgccctaggtcggccccgctgtccccaggggcaggggctgccgtatgctgggtcagcttaaagcgatgctccacaaacttggacaactttctagtcgttctcacatcagtactttgggaaaatacaataagggtgaaatactagaaaaatgttcacgtgcttcgatgccatgtaatggtaaactgctataaaagttttcaaaatcttggcaatttctgctgcagacagcacgcgtttcccagaacgagggccacacgttaatattaccttagtgcagcgcttctcagagtgcccccacctgccgcagcagcagcagcatcaccacctgggtgggcgttcccccattactgaatcggagactctgggggtggagcccaacaatctctaaaacaagtcctccaggtgattgtaatgtacgctgtagcttgtaaaccactgccttagagctgttggaggattaagtgatgtttaatctacacatggctcaatgccagagaaattcagcatttaaaaaatttccttagaagtttctttttcttttccttcaagaattgttgaggataggaggaggtcatattgagagtttgtcatctcgtagaataatcagtatgagattagaaaaggtagaggttttttggattagaggcagtttaaaaatcgtgtgact

SEQ ID NO: 50073 - DNA, 1033 bp, Homo sapiens
gaagacatgattttgggagatgtttcaataataagaattgtcacgtgtaaagcatggttgtgtttgcaaagtgtcttatcttcctactagaccttaaacatcttgagggttggagcctttctgatgtgcctctatatttcccagagccttactaatttcagcatactataaatacaacaaatacctataaaatgagtatgttggtggatgactcatgaacaggttgtttccttcctgtgtccctgggagagcatgtctgtgcttctaccacagctcatgcatggcttgtgtttataatgatttgtttgcatgtctctctgtctgtcctgagctccatgatggcaggggctccatatcccttggctcatgcctggcaagtagtggttgttcagagagtgctggagagaattgttcgagtgaatggatgtgtctaacactgaaggaaagcagggaaaggagaccagatctgtgctctttggagtttcagattgtagctctaaggatctaaatttccagagggagagaaagtagggaaatggtccataactcatttgtcttccattttctgtcccgtgggctaggtaggtctgttcttgatatggttgggagagtggttgcctgtctcagtgttcaatgtcagatgacaatattagctcacattgtaaatattctgagagtgccataccctcaaggtttcttgttaggttatttcattagggagtgttttctaagattggcttaaagtaaaggattttaaactttttctaagagagacattttaaatttattttaattttcatgggttctccaaatgcagtagactttttggcaaaatctcaggtaaacctcatacatataaatcacagaaatggaagaattaggtaggtgcaaaagtaattgcggtttttgccattacttttaatggcaaatacttcagttaatgcaggggtgatctaggacctcacctgcttatcatttctttgtcctttgtcaaagccctgaagcatctgggggactttagggctccttggaa

SEQ ID NO: 50074 - DNA, 1192 bp, Homo sapiens
cccaaggcagggcagaatcttgctgcaacttcgatgttgagcattctggcccacgggacacacacagcccaccagttttcaaaatacattctttgttcctttgccaggataagaaataagacggctgctttcatgtctctacttctcaaatatgtcagtcttttcagtgacattcttttattcaatgtagtgggtgatctgaattgcaagaatatttcctattttcccatgggactaaattaagttatttgcattttgaatggaatagaagactctaaacacatttatttttttcttcctgaatcatccttggaaaaagaggttgctcgctgttgatttatttcacaattttatctgggtaaaagccacttgcaaaaccactccccttatcttagtacaactgtgctagtgcagaactaaggccaaagggtggaaaattccgtgagagtgatttggattcactcttaaaatgatagcagcagcagcagcagcaagactcacagcagcagagctagctaccagaaacaggtggccctagagctccttgtccccagaaatacacaggtagaggctgggtgctgtcagtctcagtccctgaggagtagacctctgtgttgggtgttacattaggccagtctgttcttttgagatctaagattctgttattttaaaggctttcattactatcccattagaaggatcaatttgaatttcttgtatttgagtggaaaatgccgaagaatactgaggtttgagtttctgatgttttgtgaatttttcactgttgatatttcatcagaaagaatctgagaatgttatgatgtaaagtgggccagatttgctaatctattttaagaacatgtaatctgtgaataataaaagcactgatttgaatattggaatgataaagcaatattcttaattttaaatgattcttgttttaaaaatagcatgttttaaaccacttctcatgatctttattttcacttattttttatactaaattcgggggcgggggacaagtgcagttttgttacatggatctgttgcgtagtggtgaagcctgggctttactgtagccgtcacccaaacagtgtgcattgtatccattaagcaatttctcatccctcatcctgcttccaccctcccaagtccccgatatctgtttttacactctctatgtccatgtata

SEQ ID NO: 50075 - DNA, 2545 bp, Homo sapiens
aaaaaaataagggcttcctgtaggaagcttagtcagtggaaaggatttagagaggaagggacaggaaatagagaacagcaggccgggcgtggtggctcacgcctgtcatcccagcattttgggaggctgaggtgggcggatcatgaggtcaggatatcgagaccatcctggctaacatggtgaaaccccgtctctactaaaaatacaaaaaataaaaaattagccgggcgtgttggcaggtgcctgtagtcccagctactcgggaggctgagccaggagaatggtgtgaacccgggaggcggagcttgcagtgagcccagatcgcgccactgcactccagcctgggcgacagagtgagactgtgtctcaaaaacaaaacaaaacaaagagaacattctagcaggagaaagggcgttgagtgcttgggttgggtcaaggcacaagtctggctgaaatttagaatctttgaaggaaagcgatggtgagattatttagactgggaagatgaacctgccaatcttatttcttattctgcgtgtgtcacttgatgagaaggccatgtctccaccctttagtaaaggccaaggtcatttaaaaggttacctggcctttttaagtgacttgaaatgtttagcacagttttagaaggtcagtgtctcaccacctgacccttatttccttggtttatgatggccaatttattgcgtctgttttattcaaaagaaaactgagggtgcttctgaagtagtttcttatttcaatgtgtacacacctccactctgaaacatggctcccttaactgcacaggcaaatttatcacatgtagttgtgaacatatatttgtgtgtgtattgcagtggaaaatccccttgaaaaatcagcaaattggacttcagcttgaaaagtatagacagagaacaaaactgtctgtgtgcaaatatatgtatatgtgtgtatctaaaaacatatataaacacatgtatacgtatgtatatataaataaaattggattgagtcataaaagtataaatatgtccaatgtaaaatctactagagaaggagtttgtttttatgactcagagggaatgtgtaataaagaggtatttttaagaccgagagccagtgtgtgtcagcttctttttgcccattgtttgtgtcctgggcaggaagatgactcactagatctgaatcacaaggcaattaagagccccaggaaaggctgatttcaggatggatatttagaagcttcagctaaatcaggtcttgggtatctaggtggattggggaatcagtgaaacaaatatttctcttcattgttttagattctgtggatctcttgctcagtacagaagtactttttttcccccaaaaaatcatatgaagaaagaggaagcgctgcccattctgaaggaggttgttaaaaatgagtaacgcacacttcatgttcacagcagcagtattcacaatagctccacgtgcccgttgacaggtgaacaggtagacagaatgtggtctatctgtgcaatggaatagtattcagccttaaaaaggaaggaaattctgtcacttgctacaacagggatgaaccttgaggacatgatgctatgagaaatcagccagccacaaacagacacatactatgtaattccactgagtcgaggttcctagagtagtgaaattcatagagacagaaggtagaacggtgatttccaggggctgaggagaagaggggatgaagagctgctgtttaaaggatgcagagtttcagttttgcaaggtgaaaaattgctggagattgatcgtacatcagtgtgaatgtacttaccactactgagcggtacacttagaaatggttacgatggtaaatttaatatgaggtgtctttcaccacaattacaaaagtggaatgagtgaagcttattaaggatagacagcagatggctgagaagttggcctggctggaccgttgtctggggggagcatgtggatgaggcatgaggtggggaaataaggaacctgtctttcttccagttaattgttctttcccccttgccttccaccttcctttccctcctgatggctcatcctgtctccctctcacgtgcctgctgtatactttcttccttttccctgctggtccacccgacctatttttactccctcacatttggttgtctttatcctcggaggagaatgctcacaccagcgtctttcttcaggacagctttctaccttcctttttttttgccattttaagaccgacagtggcataaggtcactgggtgaggtagagatacactgatctttttttggtggcagttagggatattgacattggtcatttcccaaagcgacagcagtggtagcacaggtgagggtgtcgcccaccgtctgagaaacccatgaagtacgctggctgctcttccatgttgcccccttcataacaaagtgttcgctatcacgttaagaaatatgttcgaggaggaagccgtgcaacagcttcagaaaaaaattctagagctagaacatgcagttggttttcaaa

SEQ ID NO: 50076 - DNA, 852 bp, Homo sapiens
tgtctttaattcaggaagcaagagcattgagagctcttgttcacattttacctgcagctgattcaatatcctgtctgactcttcaggtggtgttttaccaaattatgtcctggaagaggccagtccatattccagaagttagaccagatgctaatatgctctgcagctggctggaggagggctgggtcatataccacgtgatggggagagaagagggaggcagaggacacagtccagcctggagcagacatggagtcaaaggctgatcttggctcttggaagatcctggggggagattgaggtaggacaggtgtgtcacaggggcttctgggcagcattcagctctggggtgctcacaaagtgtggtggctgctggaaatagtgacctatgcctctcattagagtatttcagctgaaagggcctttggaatcttctcttctcccagggtaggaaatagaaactcaacaaaggtgatgactcagcattgtcaggcagctagcccatagcagggactagaccagaaccctggccttttcacttttcagagttcttttagaaacagttgaattgggctgtaagtgatctatattaaagtacatattttaaagtgaacagtatacgttttgacataggtagacactgtaaagccctcaccacagtcaagataatgagcagatccattccccaaaaaaagttacctcgcatgccttcatcattcctccccctgccttcctcaccccgcagccctggtgcccaggcaacctctgatctgcttcctgtcatgacaggtgtgtttgcattttgtagaatttttttctggaatcacacagatttctttttgtgcctggctt

SEQ ID NO: 50077 - DNA, 839 bp, Homo sapiens
tgctgtttgcaaaagtgttatttgcacttttaaatccttctgtcatataatactataaagcttctatttaacatttttcctttgcctttctagtgttacaagggtttggtgtctgcactctgagtgacagactcttactgaaggtctttcctgagctgtgcgcaatgctaagtgctcatgtgtacgtgatcccatttgctccttaaagcaacctatgaaccttagacccattttgtagaggaacagaaaggcccagtgaggtgaagtgatttggcacaagccacttactacattgcttgacggaggtggaattcggacttcagggctaaaatcgaagcctgatgttctttctgttgggtagcacatggccccacagtgctacacaattctatcagaaagcagaaaacatgacccactggaaacagcagcacattatccgatgattttaaactctttgtgatgtccattacaattttataatcctattaaggatttgcaagatgaagaagtccaaataatcaggcttttgaaaacttttagccaggaagagtttcacatatcttagatagtaatggttaggtcatttagaatttgaataaattgctgaaatggtatgaaatcactaaaaagaaatgaagtcagaagaattactagacttcacataaaagagtactgaattaggtcacagaaaaatcagagctggtaacactggcaggaactaggatttctaggttccaggaatggcaggctgagttattcagaccaaattgcccactgaaagcagctccaaatgttgaataaaatacaactatatatataaagcatcacatcaaagggct

SEQ ID NO: 50078 - DNA, 886 bp, Homo sapiens
ctaccgggggcgggggggaggtgcagggacgcttttatttctgtggcgccaagagtgaagcagggtttgccgtttcctacaggggcagtgcgtttgcgtttcaaattcccgttgattgtgtcgcagcccgcgtggtcccgagctccccggcctgcgcctgcacggccgcgggacgcccgcttgcatttccgccaccgaggcaatgttcatttaacgcttccagagatcagagctttcatgtttgccacgaaagccagagagccgggagcacctcaggagcggagatgaaaggccatttgtgtttgtgcatgtgtatttagcgcttaaagggcaggaaaaagaaagaaaatagatggtcccgctttgcacttacttcaaaatgtgccttactccctctggtgggaccatttaactccagcgcgccacccctcccccgctctggccgctcccgtctgccccgctgcctcggcccacgtgatggctgttcgggccccgccgagccatcttcccgttgctatggcagccggcgcggcgagcccgcccattggctgcaagcgaggaggaataaaaggctctcgtgtccttaggtctagtgccctgcgccatggccccgtgcaggtagaggcctgggcatggtgcgttgcaggacgggccgggcgcagggaccgccccccgcaccgtgcgccccacccagctgtccagaaacggtcagggtcaatgtcatcagcttctccatggaatgggaagcaggtgaaggacaaaagcaaggctcataagggaaagtgagccaccttttccttcacccttaacacctcccagctctgtttttttttttttttttttttttgtagtgtttgaatttgaaatccggccctgtgaccctttc

SEQ ID NO: 50079 - DNA, 385 bp, Homo sapiens
aaatcagtctagcagaggccagatggatggagctgaggaagcaggcactgatgttcgaggagtttgaaggctcttgcagaagtccaggcagcatcatgaatgagtcatctcagcttggcatgcgaacagtttttgtcatcactcctctgtttataatgaaatgctgagaatgtctgcacatccattgaccctgggttcatcctagctacagaaagtacctttcagcaccagacactgggaaaccctccctgaagtccaatgaaacctgcgtacgtcctcaaagctacagatgtcccatcttctgtgggtttcagaggcacatatctttaataaaaatataaaatggtgctcctaggcacacatcccccttctgtacaaaagctga

SEQ ID NO: 50080 - DNA, 482 bp, Homo sapiens
ggcattgtctgggcttattaaacctgcatgttgtgtgtgtgtgtgtgtgtgtgtgtctgtgtacacgcacgtgtgcacacgcaggacaagcatagcatggaatttgatggagtggatgtggagggaattgaagtggtctccgtgcagaagggggaaggtaggaaccaagtgaagtgccttgtacaggcgtcctgctgccgctagagggcgaagtgagtctagaatccacatgcccgcgtcctgcctgcgagttttcccctaaagcagctgtgctggctcccggacagcagcttcaagttgacctcttagaagcccgaccctaatttccgatgggctcagggtcataaattagatttctgttctaggaaactaatttcataccaccacaatactttaaaaagtgatcacaaaatgaaatacacatatacgttttacaaataattacatgaaaacctaacacttaaggctaaattcctttggtg

SEQ ID NO: 50081 - DNA, 851 bp, Homo sapiens
cttggcaaagcagggaggactggattagaagctgaggaggagcatccatctgcctgcaggagctaaggcatagccacgccaggggaacactgcagcagtcagagctaggagcctgcaggctgccgcctccaactcgccctgtgaccttgagctcatcaattgcctcgccaaagctggcccttagttcccaaacaaggaggtggggatggcctgctcacccagtgctacctgaaatgatcccaaaccagattccacacaggacgcaatctgcagaatcacacacacatctgcggaatcacacacacatctgcggaatcgcacacacatctgcagaatcgcacacacgtctgcagaatcgcacacacgtctgcagaatcacacacacatctgtggaattgcacacagggaaagggaggctttgttcacgtgaaccaggcaggacacacagatgagcaaagtcgacctggcacaaggcctcagggaggaatgagggccatagggcatgggtccaccaccctcctacagatgtccacggtctgtgtattgcaacaccatgcaggccccggaacatatacctgctaccaggtgaggggcccacttagacagccttcctgtcactggatgctggggaggctgctggggtgtgaagtccacactgtgctttaactgtttcaggggagcagattcacagacatgcttccctgtcactctcaaagagggggttcattctctggaggtaggaaatatctcatgaatgacttggctttttacacagcagatggtttgcaacacacactagctgaatggacaagagatcttggaccacccatagttctgacctgctcagggaa

SEQ ID NO: 50082 - DNA, 887 bp, Homo sapiens
ctgctctgaaacagcagatcccatagcagcaacccagccttcccccacccggccccccactgggcccagcgcaccttctatccccaggtcagcacctccccaccgattccactgccgaaccacacccctcacacttttgcaatttccaagttgagctctgagtcttactttccagaatgttccaaaggtgcaaaccaggacagccccaccccccatccctcccaggctccccatggcctagaattcacactttgggtacgctgtgttggctgtagatggctttctaatcttcatattttgggggagggtatggaatgggaggtggggagaactggctgcctggcgtttccttgtgttgatgcagatgtggttttgcacctggtttctggactttgcttgcggtcacagccagggctgtgaggtaagtgagccagccactaaacaactgtccacagagctgaaaattctatcccagtagcaaaggaatccccttggaaggagaactggaatatgaccaccagcaaggccactgctttcatgccttccgggcagggaaagggggaggcaggtggaagaaacataggatggagattttcatgcccagggtacaagaggaggcaaatcacccatgactcaggcacaggggagaaaggtcagtcctggctccagcttggcgggagtgggggtgagggacagattcagcagggacaggctgatgcgatcccctccctctctctctcccatccccctaccaaatctgttcctctcctccatatcagttatcacattatcactatctgcaagcatcttgattgttacttgctcaccatttcccgctctgcttcttgccgggaagaaagtaatatagtttgaatgtgtgtccctgc

SEQ ID NO: 50083 - DNA, 738 bp, Homo sapiens
ctaacaagtcctgcctctgccccactgcagagctgagttccaggactgttcctacacacgcagagagctgggaggaagggatggcagagatgtcactctcagccagcctgggccttcaagtggagaaaagagaaagaggggtaaagtttgagagttgtcaaggacaggttgaaagaaaatgtcaagacaaattctgcagagtggagggtttcactttcactttctgtttcccagcccgtaggggagctggggtcagagaagggagctttgcacctcccggcaggcagcctcctgcctgggctctgcctccctagataaccacaggcaaattgccctccattgctgggactcaggttcccatcagtaaagtgacctctaaattcacgtcttgcacaaagaagtgaattttttcattttaaaaagctctccaggtgattctcagccagtgttgaaatccactgagccaaaacactggacatgatggaatgacaactgcttgccaacacgtggtgttaagtctacaacagagattcataagagactggtcatcgcagcgggagaaattggatgagacttcccagctgggcttgtgggggctgggaggtgtgcaccagcagagtggggctaagggagccccctttgcaggtagagtcttgctcgagtggagtgaatgcctggctctcagggggaatggctttgccgggtttgtggggaggaggtttgtttacggctgccaca

SEQ ID NO: 50084 - DNA, 462 bp, Homo sapiens
atcgatgacatcccagtgggtgcccagtgcctcaggccactgttagacaaatcaactccgggtctgaggcagggtgaaaactctttctgtccctgtgtggctgggttgtatcagcccagcacctccagcaagccacagagtggttgctcaagagatattgttgacagattgatttactgactaatttatatgacatacttattcaatgacacaggtctcttggagggagttcacaggaaagtaaccaagatgattaaaggattggaaaatgcgttttacagggaaaggttacagggacgggttatttaacttggagctgagaaagctgttgaacactgcatgcacaggccatcgagctggaaagaaccgaaggcttgtttagtccagaccccttgatttccacctaagagaccaaaacccaggagcagaggagcagagaactatgttgccagccacagtcta

SEQ ID NO: 50085 - DNA, 704 bp, Homo sapiens
gagagagcaggaagctgtttgctgtcctcaggagggggcccaggcggccaggggcagaaagagctggcgtagctggcaagtcaggtccctggcacattccagctcttttccaccttgcatcccaccctgtccgcctcctggcattgtccccatttcagaatgtgggtgcaggcagcccaggcaggagcgggggtcctctgtctgttttggctaaaatccacactgggctttcagtcatcttggaaagcggcttctccagggatgtttttgttgttgttaatctggagctaaggatggttgcattgtgtttgcattctagataacaaagctggcagtcgcagtgaaggagggtcatgtttgcacagcagtgattcagagctctgccaggacagctgccagtgcagtttatctcccagtccgatcaggccttggcgcagggagggaaggtggccctttcttcaaaagcttcagctggctctggcctggcaaacgcctctccaggacgttctgctctccacaccaggccagaagaaggagtcctttccttgtgccttcttggccagcctctgggaagctctgggcagatcacatccagccatctcccccgggtcaagggtgaagccaccagccgtggcacagaggggcgggagtcttccagcttgggacgtcctggtgggagaaaaccacaggaagggggcacagtt

SEQ ID NO: 50086 - DNA, 1032 bp, Homo sapiens
ccttcccctcctcattcctctcctcctccactcgtgctgcatatcctcgcaggtgctggcctccaggggcttggggaccatcttcaggaagttcccagcagccaatgcaaatgagggccactccctgttattgaagagcaacttgcaggcacagatctgtccgcccggcagccagcggcttctccctgagacttaatccctccactttctgagtcaccaggaacttctcaacccgaggcccagggagtgtggtccgaggccaagaaagtgtgtctcataagccggcttccaacaagctttgctgaaacccagaaccagccaagagtgtctgggggccgaaagttagaattcagcccagggactccttccctgttgacccaggacaaggtctacacttggtttgtatgacctcttaggagcaggtcacagcccatggccacagtggggcatcggccaggatgataagccgccaggacacccaggcacggctgctgagcacattcacactactgagcctggcagacttctcttttcagatctgggttttgtgtacggctgctggggctgaacagaagggctcagaggctggccttcgccaatgaggcagacacagccacccacagctgcaggatgcaggtgaccccaccccatgctccgtcaggccaggccaggctggaggaggagcagggcaccttctggcaagttcagagaaggtgtgatgagtcatctgatgaagctcacacactgtcgcacacacacaggcccagagtccagcttgctgatcaaaaatgatggcctcatgcctgctcaccctctgggatccctcaatgggcagcctctgctgtcctccatgcggccaccgacttccctctgggatggccccaacctctcacgtctggcctcagtacctctccaccaggttcttaaccccaaggaatttgataatcctatgtacgctatccttggaggtcctggtgttccgtgatgaagtcaactctttcacatggcacatagggctgtcatgaaccaccc

SEQ ID NO: 50087 - DNA, 1632 bp, Homo sapiens
tcagaaaaggcggaggcttaggagttgcatggagtcgacatagttggagaaggagactaaacggtctgagatgcagttactcaccggggcagcgacgtacctcacaaaggtgaagatgagggtgcttccttccgtcaaggtgctggggtcactctagattgctcaagaccttgattctctaaggtttgaaggccggagtcggagtttgccttcagcagttttccatgtaacaaatgtgtgttgatacctgtttttgttccatccaggttcgaggggcgtccccagttagtgggtggaggctacctggaggccacctggaggccacctctcctctcccatctctatgcaccccatctgcacactcagcagatcctctagagacaggagaggcgggaggaagctgggctttatcttcagactgacctgttaagagccattccacgtaggcaaaacacatttctaatgcattctatgtggaggaaggcacatactataatttggcgaatttatcacagagttagaaatgttgttaagtgtacacagttcctcctcaggttcaagtcaaatgagctggcaaagagcttctcacagctcatccatgaatgccaaagaggagaggacgcttgctagccacggtggaggaggctgcgtcccgggcataaatgtactgagattaatccaggacacggcagtaccttctaaatgacacacatttgtagaacttgaaagtgggtaggctctgtaatgcgtcagtcactctgctgtcaactggcctggagcccagagtcggtgttcaataaatgttttcagaacaaataactgctttcagcacccacgcacctttttctaaggaaactcaacacagaacatacaaacagaaaatttcagctataactgattacaaaattctcccccctagctaaagacttcactgctgctttccttaaaagttcactgctaatgcctgcacaacaggcagctgaggtgggaggaagtgcgcctcacgcaccctgcaccagcccccgacccactcgtccacagcaggagaggcccggccccacccacccttctttacctgccatctttgtctggcttattcctcccttttactggttccatgaaggctttgtgtatgtcactgcagtatattcagtatttcctaaatagatcggacacttttatgcaaggagtttagtcatcgactttactaggacacggtactaatttgctcattaataaccaagcactataaaatcacacaccgagcacccgacctgacctcctgccctgccctccagcacaacaggctccgaaacgcagcagctgcagaaccagcgagataaacagggcggtgacgaagaggttcttactccaatcaacgtacagctgctgcctgctgatccaagggctgagatcactcggacagactgtgccgaaagccttctctgatactgtttcttaataaacaggtctcagcgtgtgcctgccagtcagtgaacaggtggaggaggagggaggcagagggatgacctccgctaggaaagagatgctcactgggatttcatctctcaaaagcatcagtattttctacaagttgaaaacattctttttcagacttgcaaacagggttta

SEQ ID NO: 50088 - DNA, 3309 bp, Homo sapiens
caaccaggcaattcaaaagctgcaccgatggccgtttaggaaagtctcttggcagtaagccaggtaaaactaaactctttccatctcctcctcaattacttttgcaactctctcaaaaggtagagacaccttttctaaattcagaaaaggtgaattattttcagtctaatggcctggtcactgtttctgaaattacataccatattacctgggagcttgttaagaatgctgatttctagtgtcgagccagagcctacaatatgcatttctaataagtccaccgggtgattctgccagcttagaactggaggcggtgaatcaattactgcttagtagctcctcctggtgttagtttttcagaaaataatcagttttcccaaattgtgcacaagcagcaatgatttgatattagaaaaatgagtttgtactcacgtacactttcacagcaaggaaattagaggtaagaacccttcctactttcttgggaaactgatcatctgtattataatatttaaattttatttcaataaaacacagtatttaaaaaaaggttttctagtttgtcaattttttttttcagtgtatttggaatctatatctggacagagtacctgcaaaaagtaacagattcacttaaataattttattataaacataaacttatgttttatgctgttaactatatttgaatacaatcatcaatttaagatggtctcaacagaactgttgagactttaaagggtgtgttcatgcttcacgtgtttgctgttgcttttacaagcgaacagttctccttgaggccccgaggcctgacagttgctggggaaatgatgggacagacgtgtctgctcctgtttccatccttcttctgcctggctctgccatttctcttactctgcattctagacctgccaccaaagattccagttcattccccaacacacctgcttggcttatggaggtccaacttcaatacgctttgaaatggacaggtgagcggcctgactgggagaaagcattcgggcaaaagtggagccactcagaccacattggtgaccactccacagcagtctaatcccacttactgtccctctctaaactggggtgcagtagacagaaccacaatccctgcatgtctgagtgacgggacatgacacagggccattaggtaagaggagccgctggcaggggatcaagggaggacaatgtccaaggactacagactagaacatggatgctgggaattttactgggcaaagtaggttttttccaagttagggccacttccaacaaagctgaatagggaacatgttctcaaccacggtctgagttagtccttactgggctatttgtcattccactagctgactgctaaggctcagaaaggttaaattcctgccaaaggtcatatgactcacaagggcagagccgagactgcgatccaggtctgcgtgatgacacatcccggactctttctactacaccacaccattcttgcatctgttactgctagtctttaggattgttttccttctcagttttgatggaaataacattttttctatctccactgtcacttccacaaagtgagaccttgggtgcaggaatattacctaacaagagtctgatgtacagcatttggtattattcttaaggattcatgaacaagaacactgcgtatgtataaatgaacttgtccgacttaagagtcaacctgttgctaaacgacactgatgcaatcagatgttaccgcagagttttaaataatgtcaatgataattattttgcgattcttttactgaaagagctgttataagtaacttgggttcttcttggtcatgatcattctaaaacaatagaatggagtttatttacatgatctgactgagaataaactttttttttttttttttgagagcaagtctcactctgttgcccaggctggagtgcagtggcgtgatctcagctcactgcagcctccgccttctgggttcaagcaattctcctacctcagcctcctgaatagctgggattacaggtgcacaccaccacacccagttaatgtttgcatttttagtagagatggggtttcaccacattggccaggctggtcttgaactcctgacctcaagtgatctgcctgcctccgcctcccaaagtgctgggattaccggcctaagtcactacgcccggccaagaataaagtaaaatttcttaatgttacactagccccaaatgaaaaaggacagcactctcttctctttgctttcccacctcagaccataccacttgatccaggcgctcagcttacaggacccaaatactgaagcatgcagatgacaaatctgtcccaactctcctttctgcaagatggacactgagtcagtgtgagatggcggcccctgggggagtccctggcatcagtctcttcagctttctctattttcttaatagatggataatggagtagaagctctatattttatcatgatctcagcaagataaagaggaatatattttaggaagacactgctggtagaaaaccgaattccagaacacaaaaacctcagtgaactcttcttcccagtaccacagattaatcacgcctatcctgcagaaagggaaggaagggggaagtgaatagaggaaagggatggatttccaatgatggcttacgaaagcgtgcttccaactcccctcccatatgctaaaggaggagaggatgatggtgccccagctatctgcttagacttacttcctccaagaaaatgatgactgcacatttgctttatgccttaaagagtctccaagtactttcaatccatacaatttcatcaactgctaaagtgagcataggctgtcatccacatttcccaagtgaggaggaagaagatcagagcaggtatggtgtggtcccctcgcctagaagcaaaaagctggaattctctctgcccagctctgaagtgggcaagcttaacctctataaacctcagtttccttttctggaagtccagggaagacctagatggtcttttccagctataaaatttccagtgtgatccaaagtcacactgagggctcagtgacagagctgggacttgagcctaagtttctgacttttaaagcaatcagaccttacagaactacagcaaaccacctctaatgaaaaagaatttgtggtatcattctaacctggctcctggatgctttaaacctgtgagcaatatctcaagaatccagactgccaggagaacagatttgcctaaaagataaaggaacctccatcgctgaccacgggtatcgtcctgg

SEQ ID NO: 50089 - DNA, 1242 bp, Homo sapiens
tggagtgaactttaaagacatcaaatgatttgatctctacaaggagttctctaaagactcataaaatagaaaataacactgagcatggctaagtgcaggaagtagatcatggaaacgacaatcggcctttagcactgggtagtgacccctgcagatctgagcagcctcagcatcaaacggagagaccatgtggtctgtacacacgatattccactcctaatcagacgattctgtcggcagctgtgattgtcagggtcacgggcggtgttggaggggtatgcaactatgattggggttagcacaagggaggccttggtggtaatgaaatagttcaggatcttcactgagataataatggttacacaatccacaaatgtgataaaggggcacagagctgtatgagcagatggtaccaatgccaatttcctggtttcatcatgctgtactgtagttacgtaagatgtaaccactggggaaaaccagatgaagggtacacagaacccctttactatctttgcaacatcctgttcatctataaaaagttaaagaaaaaaccctcatgactattaatcaagggctgcagatgtttcttagatataaatacattcagatcatccagttcaatagagagacgaaaaaatacacaagcaacacaacatctatgctccagatgctcaagctctttcttaattcagcctccagccaataaggaagtcaagtcgttcttcaggctggcctggacacctggtcacatgcttgtcaacccctaacagctcacctctgactacaggtaaggtaaagaagttttgaaatttaaaccattattttccacaaaatagcaacagccaatcattttcccacaaagttacgatacagcatcaaccactggtgtctctggtgaagctcaacagaagctgctaaggcctaactaacccccttcaatgtagattttttgttaaatgagaaagagttcattaacttcggcaggactgctgtattatcggagaaaggctgattttggaattggacggacacagatttaaaagcccacgtgtgccattttggagcattctaacaattctctctgtgcctcagtttcctcactgctacagaggagatactgatatttacatgacgggattgctgtgaggatgaaatgagaaaaatccagcacagggtttggcacacaggtgcttaataaaattggaattctacgatggcagtcaggagctgtagaaatta

SEQ ID NO: 50090 - DNA, 1566 bp, Homo sapiens
aaaaaatagaaccgacgggttcagtctaaaacatactcatttctatgggtctccgctggtcttactggcaagaacataaagatacagagataactggatcaattttgccattttctacctcaatgactaggggcaaattattttcctttgaacgtcaatttctgcccctgtaaaatcgggatggtgcctgacccatttcgttttgtgctcctaagtcctccaccctcttagaaaagagagtgctaacagcacttatttcacaaaatccctgtgctggtctgcttgatctgttaaataagctgtttctgttctttgctcactgtacaactcgccaagcaggacccgcttttcaggatcaaagcatgactgccatctggcggcaagcgaccttcgctacaggtacaattcagaagttcagcagcctctacagagacaggggtttcaccgactccaccaagtgaagataaatgtcaaaggtaaacaggcaggacggggcgctgtggccaactaacaaggtcaaaaacgccagtctcacttagaattacacattagccctgcactccctcgctaagtggctgacgtcccatatttgagacttctaactcctttgctttttctttttctgggtccaagacatcttggacaatgtgattacagtttcaagtgatccttctgctcaaccttctctttttaacctcaggaagctgaggtccggggtgggtgaagcaaccagtccgggaccccacaaagggcggcggcggggccagtcccgggacccggtgttctgacccacttcgcacgcgacccagggtgattctgagaacggcgtctccgggagacacttgcggtctctctcactagcagacctgcggccaactttcggggagctctgcggcgagcaggacaatcagagccgggctcggctccccggtcccccgatcccatgcgccaggcgcgccggcaacccgagctcccagccactccgggctgccgtgcgcgtcacccggcatcttcaccaacgcgcctgggtcgggcctccgcttccgacactcacgttcagccagcatagacatgtcggagagcctgtgataccgccgcctctggacctgggtgactgcggccactgggcgggctggagactccaggagaatcaggacgtgcgtaactccctcgccggcggactgcagcggacggggcgcgtgctggtgacgtcagtagcgcgcgactcgctcctcgagcacgcggcggcgagggggcggagcagggcggggcaacctggggaggtgacgggagaaagagggactgagggggcggtggccgccctgcgggaggtggagaaaggagtacgtattcgctcattggctagagggagtgtgcgtactaagctattgatgtgagtaaagcccgcctgggcgtgtctgccgcggagcataagctcacgtggattacctgtagggtctccatcaggaagccctaggtgccggcaagaagggtagtggaaagacgtgacctgccctcaagcagctcagcctcacggggaaaagaaatgtgtaaagagctgaactt

SEQ ID NO: 50091 - DNA, 1942 bp, Homo sapiens
tgaggatttaaaaggtcaatgaagtcacagcagaccagcactcaaacatatttctcttctatttcctacttttgaataaaaatgtcagaagtgggcggtgggaaaggaacaagcaaaggagtaattatttgaataaatttttggcgaaacgtgggtgtctgacggggaggctgtgcggtggtgaccaacgcacccatgcgctgggtttcacagatgcagactgaagtccaggctctgctgcagattaacggggtggccgccagcaagtcaagtgacttgctcttctgtgcactgcatgtacttgggttcctctcacaggtattcctgtttttcctctttcttgctccaggttacacctcgtggcgcggcgctctcggagagcctgtggagtggccctgtgtccctccctgacccctggaggattccgtaaggtcacagtcaccgcctccatcccctacttgccatgtcttcagggctaatgcataacaattatcacaatttacagcagccccacgctctgaagagcttctggaggggatactactcaagcggaggaaggcaagacagggacctcctccctcttcccggacctcttctgataaggaatatttgtaggtggttaagaaaggcagcgggagggcgtgaaggcaaagacaagctttttttctcgtaggaacacacatcttctggtctggctgtgtttccggaggcatttccagaggacctagcgaggaccaacttccggctgcgacttccgcgtcttccgagtttcgagacctgctgcttccgcccggagttgttgtgggctccagcagcgagtagccacttccgctaggagtccctagcggccagggcgtggaagcggattctgaggcggctttctcctactgccctccgcttgccaacgcgggacccggagcccaacggcagcggcggtccttgggcctgtggagaggggttctctgtggccgagtcctaggcctggtgaaccgcgcggtgcgggagaggcgcttgggcctcgtccagccccagcccctgtctccccgcggccggtgccggcggctgtaggcctcgccgcgcccacccagcctggggcgggcccagcctcaccgcccggcccgccccgccccacgggccagccccgcgccgggtgtttccgctacttccctgcggcggggtaaccgcctcgcacctaccgggctcggttccctggctccggccgcgggggagcatggagtttgcggagctgattaagaccccgcgggtggacaatgtggtgctgcaccggcctttctacccggctgtcgagggcaccctgtgcctgacgggccaccacttgatcctgtcctcccggcaggacaatacggaggagctgtggctcctccattcaaacatcgacgccatcgacaagcggtgagtgcccgccccaccccagctccgcagggagccgggggtcccttgtgggcgccccgggaaatacttcctggcgttttccgcgcagcctgccgcccagctagccggcaagatgagccctctgtggcctagaatcaggatttaccaagctgaaacccgtccagatggaggacccggtttccattaaacctggatggagttctcagggttatcgtgtggctggtaccatcctgatgatcatttctggttcgtaacaccatttgggtggattttcggcattgtctttataaatttcttcttcttcttgccccatcgtattccttgaattggtattgtcagtcaccgttcatgaagtgattggatgtgatttaggtaaagtctttaccatttctgaggaaaactaaacagattataaagttatgagtgtctacatgctacagaaccatttttttaatttctgaaaaatgttcagtgtatcatattatttcttaccttctgggtcatcaaaatttaattctcactaagggag

SEQ ID NO: 50092 - DNA, 2004 bp, Homo sapiens
tgggttagggaaatggggggattgggttcgggaagtgggtggggctggattaggggtatgagcggggctgggttagggaagtgggcggggctgggttagggatgtaggtggggctgggttagggaagtgggcggggctgggttaggggtatgggcggggctgggttaaggaagtgggtggggctgggttggggaagtgggcggggctgggttggggaaatgggcggggctgggttggggaagtgggcggggctgggttaggggtgtgggtgggatcagggctccacaggacagcgctcctggggttttctccaagcacccctgtggtctaccctgccgggtaagcattccctctggcacatgtccagccaggacagcactagccttcccccttcctggaagcctcctgtttgctgccggggtttcccctccctgctgcacacccttgtgagaactcggcagtctcttctgaaggacattgatgctgtgccacaatgtcatatgctggctgcttcatgcctggttctgcttgaacctcatctccacgcaaaccccagcctgggccacaggatggagcccagcgctcgccttcctggtgcttccggagctcatcacttactccgtgatgtttgttggtgtctgtgtgtcccacccttgaggatgccagctcctagcaggcaggggcttccgaattctgttcctgactgtgaccccggcactcagagcagtgcccggcacacagcgggtgctcaggaaacttgctgagtaagagagtgggtacatgaatgaatgaagaggactttctgggcagtccatctggccctttgtccttgtctttggccctcactggcgagctaggccctgcactgcctgaaagctcatccgagggctcgcctcctccctgaagccctctcacactccccaccttccaggccacctttctctgaattctccagtcacttgctttcctcatgctgactgcacactggcccgcatgaccttgaactgtgggagtctgtggtcctgtcttcctgaccagacatcagctccttgaggggcaggacactgctgcaccttttgtgtcccgagcacagggccctgtaaacagcagatgttcagtgtgtgctgatgacgctgatgcggtgaagtcagcgaacaaagtccagccagagtcgttcacagctccagatgacatctccccagcagacctcccacagcttcatgggtaagactttcaaagtcagaatgcttctggtggctgagtcatctttcttgagttgagatggggtggtttgggatgctggtctcaactttatgtctcatccttccgcgatagccttatgtttgaatttgactcagtcttcaagcctggatcaaacagcacctcactcgacagtcttttgtgctcttccgaatggagctgatggcttcctcccttcacacttggatctgagcactttcctgcccactctcagtgcagcagtgcacctgctggatggttttactgagtcacatttctgatgtgcctctcgggtgaacagatctatctttttccagcatcccttctgtgggcatcactcctgtctaatttcaggtggttctgaagggaccatgagtcacagcacctgcccatcacccctgccccaggaacactcacgacacctagaaagagacgttcattttagcccttactctggcaatagtgactgggcctggggatgtgcaatgggccacaaaagaccaatcagaatattttcatgggatttaaacacagacacttggagaaatagggtattttcatcaggagcagctcagctgggaggatataagcttggagtttccagagtctggagaaagcccgtctgtagtaaaaagggaataagcctgaggtaaggcgaactaagggaaaaaaaaaacagaaagagagagaaagagagagcatcctgacatcttctgagcccttaggcccagcagaacctaaagagctgaacttcccagtgaaatg

SEQ ID NO: 50093 - DNA, 1061 bp, Homo sapiens
tgtgccgttccctcaggtcacactggcttgggtccttagagcacccttgggtccaggtgccctgggccacctcccattagttagggaccgcatccgtggggacagaaacttccatctcactgaacctatacacaggagccaggctgggcttggaggtcaccagccgcctgggagtggacccggagaggctgagtgcggccctccctctcagacggcagaccccgaacctccacccagaatccgagcccggacacggccagcagggagctaggagatgaagtccagccctggctgcccggctcctctgggagggcagcgaacccgcgggagcgcatgagcggcctctcccgggggggcggtaggagcgcgtcccctccagggcgctttgggatcgggctgctccgggccagtgctcgcgctggggacctgcgacgcctcagcccctgcccagactgcgccgcccgccgcggccacacctcccagtccctgggaaagtccccgccgccggcgcgaacccaccttccgggagcccaggggccctgctggggactcgccggtgtccccgccgcctcctcctgcgcgggtccgcgctgcccggcctcagctcagggctcccgcctcgcctccccgagctccggtgaattctcggcgctgctcctttcggaaaggactttttttttccccctgcgttgcgtcagggcggttgcctggcgacggccgagctctccgccgcgagcctttcaccgcgatcccggcctcgcgttctcgccccgggtccgagcgcgccccgggtcctagcgccctgtcggttcaccggcccgggcagcccccgcgagtggagaggaactacatgccttcgccaaaccccagatgaaaccaaacccaaacatccattttctcattaaacccgaaaccaaggcagtttcccccaattgtggcaacgtgactgcgccactgtcagaagtttgtccgcatggagggcgcagggggaccccacgcccagggcctcacccacccccaaacggcaggagttcataggacccgcggccacgactgcccgc

SEQ ID NO: 50094 - DNA, 1487 bp, Homo sapiens
ttcaagcgattttcctgcctcagcatcctgagtagctgggattacaggcatgcgccaccatgcccggctaattttttgtatttttagtagagatggggtttcaccatgttggccaggctgatcttgaacccctgacctcaggtgatccgcctgccttggcctcccaaagtgctgggattacaggcacgagccaccgtgcccggccaacactgttttatcacgtctgcgcgccaactgctcttggtttgcgcaccacctggaaaggggtgtggctttcactcattctggtaccaggcacagcatgaacaaatattcaacaagcaaactggcagcattcctggatatcttagctgccttgtttgtcttcccagagcatgaggtagccctgtttggaacctgacaccagcaaaacaggacggcgcatggaacagacaaacatgccccgtggttcagccacagtttttgggcacagactccagagcacttcctggcccaggaaagcagcaagccactccaacctggtcagctgccaggctatggttcacatcttaggattgagacttggtttctgcttcacagacagaactagaggcagaaaagaagagaaaaatcaatacaggcacccagagatgggcttacctagggtcctggaagatgcgagaagccacagtgcagaggacagactgatgaacacacagagaaatcacttctgcaagaacccactgatgtttcatggtctgatcaaaatgtttcacaatcagccctcctagacaaatggctctgtgggatgacgccataggcttacggggaggagacagggagtaggaaggagaaagggagaggaaaaggagggggtaaggaggaagatgaggaggcagagggggagggggaggaagaagaagaatcacaataacatcaacagcgaaggcgacatgaaggagaggggaggggagagggagaagggaggcaaaaggaagggaagagagaaaggttcagagtgggttgcactctgcccagcagccaagtgtcctggagtgaggagcccatgggagtcccctggacactgtcagaataaacaaatgagcaggactcttcccctcttactgtctcataaaggccttgatccagcagactgggcagtccagtggttgcaggaagggccagaccagcctggggctaacagttctgcagccaaggcccaccgtggtgcccccaccttaggacaggttcctcggcttttcctctgggaccccctccctgtgcccctccagcctggcctcagttttcctactcggtttccctatgggcctctctgcacccttgtgcatgctcacagagttgaaggacttggattttcttagaagttttccaagaggaaaaacgatctgttggcaattgcaaatactttagagtgtctgcataaaagcctctcaacctcaccccacccccagctgggccttctcaccctgatgttcagctgcgcaagt

SEQ ID NO: 50095 - DNA, 949 bp, Homo sapiens
ctggggctgcagagacagaagcagcgaatgaagccagggaagaacccgggagcgactcccctccccttccccgtgtccggcccccccaggtggtttttcttcctgagccctccgctcctgctcttctcttaaaagtctccaacatctctctggctcccgatctccgaagctgagatgtgagtccagggtggcctcctcacttggattcaaacgctgtcacttctcatcgtcaaagtctgcctggaaaactcagggcagtccatcttccctgcaatcactagtctgtgcagagcacactggtctttatcctcgtatttattcattcaccctgtgtttgctaaacacatctgtgtgctggccaccacgccaagacacgaaatacggtgggaacaagagtgacagtccctgcccatggggcttagatctgggggtagatacaagaaatgaacaaatcatcacacagcatagcaaatgctagtaagggtttggtgaaagatacaaactgagaaggaggtgctgatttaggtgaatagtcaaggaagaatacatcagtgacctctaggtccaggtcattgattactggagtgagtcattatttcacaaacaaaattgcaaatcccaacggagaaaggatagaaatgtgaaagacaggatagaagggagggagaaacgagaaagggaacaattaaaaagaggagctgggcattgtatgctaacgtgggttttgtaaagccaaggggctctgataatgcaaagttgtttgttctgggaagggagagggcacttcagtgtatgtaagaattttccaggaaacccagccagaccctccaacaccctggacatcagacactgagatcactgaagcttaaggagtgtaagtgcttagttaagcaaagaggcaccctggaaatgccgccttaaacccagggatccaaccgatggaacgcgt

SEQ ID NO: 50096 - DNA, 1222 bp, Homo sapiens
aaaccaacacacaggaacagactgaagaagtatctggtgctaaaccgtaacccagggctccggggcagtagggatgcagggaagggggtgtcccatggaggctggtcagggacagcttcctgggggagggagattagggaaggagctatggaagtagggaagagcattctaggcgggcactggaggaatggaggaggcccggctgataagctgccctgtgggaatgattgcaggaaggagcgggagagactgcaggtactgccgtcatgaagggcccagttggctaagcacaggccttcagactgcatgctggaggttgggtgagcctggcctccctcctgtcctactgaggcaagctggccaggcctcccagaggtcccagggatgctcattgattagcttgtgaaaggccacttggctagctggttgccgagagacagccccagaggccagggctgggattagtgagtggccctgtttgctcttcttgctgggcggaaagaggactttggtcccagcttatcaaactgcccgggtttgaaagcccaggaatgcagccttgggcaaatgtgcaggttcacaggacactcattaatcaaacagctcccttccctccacccctaataacctgacccccacttcacacacacactcctatcgcactcacatggtctttcagaggtcccagaaaagagcgtgtccaccatgcctcaagccagctggcagctgcgcaggcccaggtggaggtacttcaggaaagccggccaggcggactctgtctttccctgagtttgcccagtgggccccaagaggcagcccgaggttcctctgggggctgccggaaggtggacagagctgggcccagctgcctcactgctccatacaactagcagtgttatcccttcaagatggaatgaaaaatatcccaggcagcaacttctagggaaaacttttgcaaaatataaaattcttttttcacacttttcggcgtgaaaaagggcatgacttatgtttttataagcagatggaactacggttgaaagtcacaaatcaatctagaggccaagcctcgaggcttctgagccagggctcttgctttaaaggagaaagcggtgcaggtgggaggacttgaatcgaagaaaattgaatctcattgggataatgcaaagaataatcataaatgtgcgttcctgttattaagcactagataccaactgccgag

SEQ ID NO: 50097 - DNA, 539 bp, Homo sapiens
caacctgtggacacccacacatacacacaccagtgaagttgcagctgggccccctccagcctgggatgagtcttggaaaatctgtcgccatcctggagaagccgctttgggcctgcaaaaaggcaagggggttggagtcggacactcagcctgcagcccctaggggagagctgggctgttctccacctggaactacagagcagtgctctgccctcccctcctccctgagagctgggccttgtgtttccggcacaaagagggccgggagcccaaccggggatggagcgggggaggtctttgacatcagagccgacccaggtgcagcggggaggagaggtaacctcagctctgccagcacagctccctggcctcggcagggccgtcctccctcagcagcaaggtcactgttatctgcttcgtgagcggtttgcagggcctggaggctctccaaatatgtggagggagtttaccctaacccaagaccaaaaggcctcccacgcctgacattttccaagtgctgtaaactccagacaaggaca

SEQ ID NO: 50098 - DNA, 682 bp, Homo sapiens
atccttgcagccctgaatcaagcttgttcactagattcttaactacaagagacagagaggaaaacaaaatccctttgctcaggtcagttggagtcagggttttctaacatttttgcaagcgaacaagtctcaagtgattcgctctactgtttaaaaatgcatatgatgacggcatgtgtgtaccgagctggggcagaggttagagaaatttaaaaatgcgtatgaataacagcatgtctctacagagctggggcaaaggttagagaaagcgatctatgtaaacgagctgccaggcccgtacacagtaggtgctccgtgaaggctgtctccctgccccgtcctcaaatatctgcttcttgatctgggcttcaaagctgatcccattctctctccagtcacctctcaaactcctccttcttttctgttaagtagcaagtctggtctttccttctttccgagcagaacccaggctttacagttaatatcctgccgcctctgattgcagctttaagaggtgtaacatttgataagctccatttagcttggctgagctgcattgtttaaattattcgaagacagattgctccctccccctaccctgaggatttctgctctactgagcttgcccacagcaagttaccaggaaacacggcagggaagtcagcagggcagtttgtcaccg

SEQ ID NO: 50099 - DNA, 459 bp, Homo sapiens
ttacatttgcagggtctttccagacctttcttggatacaaatttgaacctaaatgtttgaatttctgtgttttgtatgtaaaggggatggtggtggtggtggtggtagttccctggtactattattcaacaaacaagaacaaaccgttctgtgacccaagccattcaagggaggcgaatgcactgttagcgccaccaggaaaacgtggcttgtgagctgggtgagaacagagttcattcacctccctcaggagagactttactcccagaaagactgattcaggccagctccgggtggcctggctccttcccccccagcccacaaggcccccaggtttattggcctcatggactcaactagtaccattgtagtcagaggtcagtttaatgggaggtggctctgagacagcagcgaattggtgtatttgagtgacttgacaaaaacgaataataagacaag

SEQ ID NO: 50100 - DNA, 590 bp, Homo sapiens
ataataagagagaatgcacacagagggcttagcacagtgcctgctactgggagagcccaagaaatggtggtcattgatcaagacagtcccagttcaccaatgtcccagttcaatgttaatgtgtcaagccagagggagggagtgtggctcagttgcagacgtggaccaaaaaaagtgagccagcatggagctgggccagccaaactccaaggagcacactaactacaatacgtgggattttacacaagaaacttccagtaaacatttactgaatccaatcaaattgcagacttgggggatgaaaatgttaagatttcaatacatcagtattgcataaccattgcataacagatggttgcataaccttgtgcgatactaaaaaccactgactcatacatttttgaagggtaaattgatgctatgtgaattctatctcattttgtaacagtggaagcctaacaggctggaacagggagcatcactcattgcaggaaggaaatgtagaggttcagtcggagcctggtccatcagtccacttggtttcaaattattctcacttctgcccatgctgtggggacttcaggtaactc

SEQ ID NO: 50101 - DNA, 3162 bp, Homo sapiens
ccgcttttccgcagcgccggcctccgagatccccagcaccccttcagccttaagttcccacgtttcgggtccgtggcgccaattctgctaagtagcaggctaggaattgggggaagtcggagaagaaaccctaagtgtgtcgcccccagcttccgggatgcaggcccgccggggtctagaggggcggctgccgtgcgtccagcctgtgcgcaggcctttcgccgctcggcgccccaggcagcctcagtttcctttcctctgtttgcgccccagtgaacctccgcacctctcattcagggaagagaattccccgcgcagccgcgctcgtttcttcctctgggattttcctgagaatccccaggagttggccacgatcccatggggggtttccttctacccagccccgcgtcctggcctcgtccttaacccccgggttgccttcactcaggctgggaatccacgattgatttcctactacggaagcgggtggcgttcccagcctgctttcggagcagcacgggtttcgtgcagggtgttatcccgaccccttcccccatccctctaatctggcttgagaagcccgtgctggagagaaaaacgcggccttaaaaaaaaaaaaaagtttaaccgaaagcgtgagagccacccgccggctgttatctggggctgaaggctgcggtaatcgatgggttatttttacgcggtaatagggccctgtgattgctctattaacctttagacctgtctgagggactctccggctcgcagccccgctgcgctggggcctccaggctctgacgccgactcccaactcaggcctgacacattcccctcccccataccctggaagagccccctccatgaagaagctcccctggaccgcctggctccccagcccttgccacgtcccttggattggtgcagagccgccgcaggctgcagaaaaaagggggaaagattagaagagaggaggccacaggagatgggaagtgtcgccaggaagggatgcagattgcataaatacataaaattgaggctgaggcctgggctcccgaccatctccctgggattttgggaaggcaaaagggaggcttcggtctctacgctctgattttaggaggcagtctgggtgtctcctgaacctccaaggaatccggggctgggaggatccccactacccctgcccaggaactagcatccagccgggcaccccgggtgacccagtgccccacacaagatcgagagttgagcccaagaggtcaccttcttctctactggccccgcccctcgcccgccgctgcgggatgaggaccacaggaagggggggcggggagggagaaagggaactcattaataaagctgaccctgggcaccacagcgaacccaatcgacctccggctgggttgcgggtgattccccgctccctggcggtagcacttgggcattttccgcggagaccccagagcctggactttgcctgctgggggagctttccgcacagtcccgcagcctgcgcccagcggaggtgtagccggggccgcgcacccccgccccgcccttgcacgtgactcccacaggccagtcagcgccctagggccgagttgctgggccggggacccgagccgcgagctggggacttggaggcggccggcgcaggggccgcgagaggcttcgtcgccgctgcagctccgggggctcccaggggagcgtgcgcggaacctccaggcccagcaggtagggcttttttcttccctttctttgctccttcccgcggtcccccaaactcggagcttctccgcctttgcttgtctggaggtagagaggtagctagtgggaggaaaagagacgtgcgctactcacttcaccgaaattgcccaacccctgctctgcttttgactttgccttagcaacttctttaagtcaaagtaagacttgggggcaaaacagagaaatattggaagcgcctttggattctttccgtgtgaacttgaacgctttcaatccctgtccccgtgtgcacattctccaacccttgtttgcatatcgcaggccggggcctgggtggtgatggtggccgcgtgaagttaccgggactgacgggcccgggacaggctgcacggcagctcgcacatggagggaagtagacggaggcttgtcgcccaccagcgactccggggacgcagggtggcagtgccaggcagctccgctgggcctcaggggcccccgggagccgctctgaggtgcggagaggctgctgagtggcggaactattcatgccctttctggccggcctcctcgccctcggggctggggtccagggactgaatgctcctctggaagctcaccaccccacctgcccgcgctgcttctacctgaaactggccaagggcccgagcccggaccggagccgtgacttccctccgccggccacggggctgcccggatccgccgggttatgtcgcttggctttgggctcaggggtcaccgtgggcagaggggggtgccggggtcgcggactgccaccaggttgaggaaaggaggggccttttggctggggaaagagcgtggtgggggacccgcggccgatggaatccctggggcagcgcggcccgcaccgtggaggttggggaagcgcctcggggaagtgtttcctgtgttcccagaaaaggaagacaaccgagagcaggtttcaggcttttaaagaaagcctggggtgtggaggtgatgctccgcacacgtctgtgtctcctcccctgctgcggccggcttggttgtgccggctagcgtgcgaccgtcctcctcgctgcaggccgagagcggaggcgtaaacccaggccagcgaggagtgtcctataaagggacggggacttttcggcgcttgcaattctcccattctgaaaaatagatcggaagagggctattggttgattcttgaaaggggagcgcatttcctgttggcctgcgaatttggggtgaactgggacaagtgatcagaaggagagcaaaaactccccgattttggcagcctcgggagctgctgggctttctccgccaactgcaggatccaggctcaatttcaacaaccagccagaggcgttttccaagagcagctaattccttgtttttccagaaagttatagaggagtattttctccaccttct

SEQ ID NO: 50102 - DNA, 492 bp, Homo sapiens
agctgggtttggtggtgtgtgcttatagtcccagttacttgggaggctgaggcaggagaatcggttgaacccgggaggcggaggttgagtgagattgctccactgcactccaggcctggcgacagagggagtatgtctcaaaacaaacaaacaaaaaaccgaaataccatgtgaatgcacacagtattcagattttgaaatgtcagccatgccatgtagaggttgctgatgaagtgatgtttcccaaattcccatgtcagcaaatggcaagctgacctccctgtgcgtctctctgccaagaactgccacctgccttctctgggctcttcccggatagcttatgaagtccacagcctttgaatctggcctagagggtggtttttctcttctgcacccagccaagtgttttaggagaggtgcggctctctgtgagggaacacagggcatgttgaacttgttggcattcatagcttcagcgtgttatgcaggtgg

SEQ ID NO: 50103 - DNA, 2554 bp, Homo sapiens
aactggttactaagagtaatttaatggctatctctagagctactcttttgttaccttctaaagaaggcagggaagaaaatataaatggggttataataggaataatcttgaatctgttttaatttatacaaaatacatttataagttttggcacattcacgtttggatactggctaacaactttttagcgagagtagcctgtatcttgcatgtcattccattgaacagtaaggtggatccctgtcaatgaagaaatcatctgatgccagggactttgaagtctttctccaagaggtagatacgatgatctctgttttgctggaaagaaagctgatacccagaaagagcctgtaatctcaggtccccgtgggtagtaaacagccctggtttggaacccaggtaagtccaacctgcaggattgtactttccccctttccccacactttgtatttgccaaatctgatatgagggcacttggctcttcagaaccagaagctatgtgtgattgaagggctctattaaaccttaggattttccatgacttgtcgctcccatccgcttcctctccccagggtagcttcttgtctgagtttccgtttgcttcccaccaatcactgtctctctaggagcaatgtcgtcctacggaatcttccgtatcattcctcaactgtaagctctgcagttcaggaatgcaatgttaggaatcccagtgttgcacaaacttcctttctagccgttggattctggtgtgcagagaactaaagagacttcccaggattcagacccttccaatgggaggattctcctaactctaggggaactgttggctgcttaagagcaaaaccatatggctcactcaaaaatccctttcctaagagaaatctataactgaccctctgtgttcccttttctctgaagatttcaaatatatttgtggtaaaagcagagaaagaagaggagaaaatcataataaaagcacaataatgatgattttagtaaagataagaatggggcatggatcaagacaatgactaaaaccccaggcaggaaaagccccgtggaattggtctgaactgaatgtagcagcccatcagtggaagttttcttgtttctggcaggtggcctatgcttttatctattactgctctgtaatcagaattgagccacgatattcaagtttcttatctgaatgatgggaatttggttttctggccttctgcattttgcaggagcccaagaattgacctgatgttttaaaatatattttccctccaaaggaggagtaaaatccagacaggtgggccattctgtgtgtttaaagtcattgaaaagcctctgcaagtaaaatttgaggctgtctgtaacccacattgaatagttacagatatattttattttggaggataaaaaatcaagaagttactaccacaatttggtgggaattttgaattttggagttttcctttgtactcaagcttcctcacgattcttccaggcagatcaaagccatgggttttgggatcccctaatcgcaaatccagttttgcttcttaaaatctaatcagtccttaagttattttttaaatcttcctttctactccccagttgaaatctccatttctacttctagaaatccagtcaaaccttatcgcctccatttagaactgatcgatagcaactggtgagcaggttaattataatcgcagaataaacgctgaagtctcaaagttcaccacttttgcaatgtttccaaacccctcgggaccatgccaggaggcgctcattgacccattccgagcaggtgtgggagtttgaaccaggggcagacaatcagatctgattcaaacaactcaatttggttgcttatctagaggttttcctatcttatgatatctgtcattttagataaaaaagagttcatcaattgagctgggaaatggcaaagttacattttattctgataaaagtttgctagttgttgttttatcagcttgggttgaaattgtgtctccgtcaaggtctgcaatgaccttttcagatattttatcaggtattaggtgggggagtcctttttttttttttccttctttgacctagaaaagaatgacctgacttccaagatcataaatcaaaccaggtaaagacaggcaataatacaggttgcccctcaaaattgagtaggcggggaaaacaaacaacaaataaaacctttccctagcatttggggagaacttaacttgacccgaaataaagaatgtagttcccacggagtgcacagatgtaggaaaatactgcttattttaaaaaagaaaatgctttccaggcaaaaatggcttcagagaaacacgtagtaattttttttcaagtagtataagggaaacttctttattttatgaaactcaatgtatatttattatagaaaaatggaaaactcacataaaccaatgtaaaaataattggtaatcttaccatccaaagataaccactgttaggcattaatccttgacttccagttatcctacatacacaggtatgtgtataactacattattaa

SEQ ID NO: 50104 - DNA, 985 bp, Homo sapiens
ccatcgtgcctggcctcagtgagtggttttgtgggctggagtaaggatccagctgtcttcgctgcaggagtgacagggacgtggtgtccatctcagaggagccaagtgggcttgcctaggctttcgattcttgtgaagatgagtgaactgaaaccagacacctcttagatctatgggcccttctacctctgatgatctgtgagattcagtgaaggtgaacagtcactgtcggggatgttttaatgattttactaaaaatcggaatagaatgtgaaacagggggatctgaagagtgattatttgtactgttctggtcaggagctgggagctttgtctggcctccacgtaggggcctgaggacaagaactaggcagaggtgcagacagcgaagaggaggatggctcctgggtgttcaggccatggccagcctggtcagcagagcagctgtgggaaaagggatgatatttggtggtagcactgaggcccagccaacactgagcgcttaggatgtttcctgctgccctggcattgttttgttatttattccagcgactgtcctgtgggcaggaactgtaatgtccatgggcaggagaagaaacccaggtcacagggacctgcccaaggccacagaaggcccgaggctggcgggacctaggtcagcctgacttccccggccagtgccctctctgtttgtctcgtgtcatctgccttgggagctcacatttcagggcatgtggcccagtgcccactgaggtgcagcccgcgtgcctggacggctctgtcagggcgagcttctcgggcagtcttccttccctctccatttgttgctgcaggattctcctttggtcctgacttttctggtttttcatttccttacctgtaatctgttcactcttggtcagcaagagaataatattgcagctaccactgcctctgagtttcctcctggaagactgagtcttatgaagacccggttttgaggagt

SEQ ID NO: 50105 - DNA, 858 bp, Homo sapiens
agtgacaggtgtggttgcctgttacagccttcacgctcatctttctctttgtcatttgtaaaacctctttgcatatgagcgggtgtattttcccctatcatttgttcttcaacctcttcctcctctatctctctacgttcccccctccctccgttcttgtttttggtgttttgttttttttttttcctttccctttccctttcacaatgtccttgcctgtttgtgatttaggaaaaacaaaacaaaacaaaactgagtcacattctgtcactccagccagctgacgtcctgggttcttgtcctttataagggtcagaagcagaggccttggactctgtggggtgactgcaaggtgggcggtaactggtaaccgcctctgttcagcagctgcaggagcttccaaaataggtgatttcatccccggccggagcgccgctggagctgtgtgggcctccccgtgacagcctcctgtcacaggcatctgccgagcctgacgaagcccagaagacccagggctcaagagctgccaggaaaacctcaggctttgtttgggcctcgtgccccacacccaggcgccagccgcagggacagatccgggcctgtcgggaaatccaggctccatctctggtgaactctggatgggacatgggcctggggttcagcaagggacatttgggtggggctgagactttgctctgaagcccctttggttcccagggaacggtttctgggcaggtccctcccctcctgcccagtctgggctggggtctggccttttccaagaaagccttctgtgttgtatctccttggccccctctggcccctcttgtgtagcactgcccagctgccccgggcacg

SEQ ID NO: 50106 - DNA, 1112 bp, Homo sapiens
ccgcaaaaaaaaaaagtttccaagagcgtctctccaatgttagtcccagcctgcacccttcttccatccctgctttcactcgcgaccctctaatgcagccctgcctccagcgacccccgggatggaacccctcgcccacccacaaaagagcagcctcgacctagacccactttccagggaatgagccctgcgcctgcgcgcaccccgccaccccctccaggccggagtccacgcccacttgggggaggagccccgcagcctccacctacaggggcgtcccctaaggggacggaggccgcatgggccgccgagccgggaaatctccgcccccagctggagcggctgtgcgggctgcgtagcggtgctgggtcgggccgacgtgccacccacccggagccggtgagtgcagccgcccgccctccggtagatctgcggcctggcggagaagtcgggaggggacaggaagggagggcgggccccgggccctcctccgtctcagccgcctgcggaggtgctgcccacgcctggaggcccccactgaccctcagacccgcgtctgcgcccctctccccgcaccccgaggcagagttgggaaagcagtggtcttagaccccccacctcgggcactcggaagagaacggcggagacaacccctcctcttccctggctggcgcagcgccagcctcgagctcctcggtagcccccgggcagggagggccggagggtgggcgcggcatcttcagcgactcttcgaagtcccttccgcgtctcatctttcaaggctgttgcagaggcggcttgcttcccacctgtccatctccataaaaatccctaaacgaaacatgcccacgtgtccggagattttcaggacttggtgcatttcagatgaaggcttttccagaagcttccccgtagaagaggatcaggcatccaactggttaaggtcagcagcgtttggcacgtctccttccagcctggcggttttgtcaggattccctggggagtgtctggaaagcctgatgaggggaaatagtacatctcagcgaatcggcaccagcgagtgtaagatgcgcgttattgaatgtgctgctgccgaatatgagaatgccgag

SEQ ID NO: 50107 - DNA, 4671 bp, Homo sapiens
ccatttaaaaaaaaaaaaaaaatgaagaagaaatagcactcgaaggctgggcgcagtggcttgcctgtaatcctagcactttgggaggccgaggagggtggatcatgaggtcaggagttcaagaccagtctggccaacatggtgaaaccctgtctctactaaaaatcgaaaaattacccaggcgtggtggttgggcgcctgtaatcccagctactcgggaggctgaggcaggagaagcacttgaacccagaaggcagaggtggcagtgaaccgagactgtgccactgcactccagcctggcaacaagagtgaaattctgtctcaaaaaaaaaaaaaaaaaaaaaaaaaaaaaaaaggcgcttgaacattaatttactaagcaggccatttttacttcctgcagaaagggtacactcgccagcagttttgccatgggagtataccaaacaaaggagacagggtcatttataacctgactcgtccaccccactgcttgtgtctagtttccattggctggaacggtgcctcacgttctgtatttgtcccgattggctagcaacttagaagtttttaaaagaggcaaaggtagaggagaacaaaggaaggaggaagtaacttgtggaatggtgacaaaggttgaaacaccttcaaataaggaagaggaacaggctatgacctaatgctttcttggaccactataagcatgccagggcaaatatttaggctaaattgtgagagctaagaacatgaagtacattgatttctttatcatagctagcagatatttaagaatgttagcacaggtctttgaataaagtttgcttctaagagaagttactatttattcctaattaaatggggaggaaagtctttgaagaggaacctctactttactttttataccgtcatggctggaaactaagtttttaagatttttctggggttcccttggccgaggtggggagtgggagggctgtccagtggtagggacttaggatttttagtttacagtagtaggggaaacactctgtaatctaatacataagtaaatgatgtattagaatatggtaaatataggcaagtagacccccactgggattagcagtggtggaaatgtgagagagggcaaacaggtgggtctagatgaggtgtgagcagactcgaggggcacaggagttagtcaagccagtatctgggggatagtgcaggaatagtgaacagctagacaaaaagtcctagggccagagaaagcaaaagcataagagatggaggccagagaggtaatctgggtggaaggctgcagcctctcaggatccctataggtgctttggcttttgttggagagacactgaacagctttgggcagtgaacgtacctgacaggtttcctgtttgtttttgagatgaagtctcgctcttgtcccccaggctggagtgcaatagcgcgatctcagctcactgcaacctctgcctcctgtgttcaagcgattctcctgcctcagcctcccaggtagctgggattataggcgcctgccaccatgcctggctaatttttgtatttttagtagagacgcagtttcagcatgttggccaggctggtcttgaactccagacctcaggtgatccgcccgccttggcctcccaaagtgctgggattacaggcatgagccaccgcgctcggctagacctgacaggttttaaaaggattactggttgctgtgttaaaacagactgcaggatggcttaggtagccagtaggtttttttttttttttggagacgtagtcttgctctgttggcctggctggagtgcagcggtgtcatcttggctcactgcaaactccgcttcccgggttcaagtgattctcctgcctcagcctccggagtagttgggactacaggcgcccaccaccacactcggcttttttgtatttttagtagagacgggtttcaccatgttggccaggatggtctcgatctcttgacctcgtgatccacccgccttggcctcccaaagtgttgcgattacaggcgtgagccaccacgcctggacgggtagccagtagtttctagggctggagagatctaggatgagagaagtttccacattcctgttacaggctctctaaggcttcagctcctttttctaggactaagctggatctcaagtaaacactagagagggggcagctgaagctccaggagtgtgtggggctccctggggctggatggcggtggcgggcaggcgagctgggctgtgctcgggtgtgttacagtaaagacgcccagcttggcgctggcccggccttttcacggttttaggctctacagagagcggctgcagagctcacccggctggcaggagccaccgaggccggacacgtgggcgacttattgaccaagtggggaggaagcagccccgcactgctctcccgactgcggaccaccgttgggctcctgcgcatcctaagccccaccgcctcacctccagtccccacagcgttcgcgctcccagccggggtaagcggaagaaaacaaaggcccggctccatcagggcaccaatcccgctcgtcggcctctttctcggcctccaatgagcttctagagtgttatcacgccagtctccttccgcgactgattggccggggtcttcctagtgtgagcggccctggccaatcagcgcccgtcagcccaccccacgaggccgcagctagccccgctggcggccgaggccggttgaagtgggcggagcggcgggcggggcgtcgccgtactaggcctgccccctgtccggccagcccctcgaagcacctactccacaggtccagccggccggtgagcgcctggggaccgcagaggtgagagtcgcgcccgggagtccgccgcctgcgccaggatggagttcgtgaaatgccttggccaccccgaagagttctacaacctggtgcgcttccggatcgggggcaagcggaaggtgatgcccaagatggaccaggtgggccgagcctccctgcttgcccggggcggggaaggagctcgctgggccggcctcagggcctgagcggccgggcccggatctggggcaaggggcgcggcgagcagggccgacgcctgggtgttcccgtccccctttcctcgagccttccccctgtagggcccgggtggacgcggccgtcctggctgacctgtccctgcccccgcaagccgccctgggcatgagcgacttttgcgtggttcccggtggttgcgctccccgtttcgtcccctccgtgagcatcggcgcttaccggtattttaacccgagggttacacatctgaggcaatgtgggtgggttacgcgggagaggacgagtgagttttttggtaagcggaatgaactatgcagataacatcacatgaaggccgtttctggaatgaagtctgactcctccagtttcaccacctcttccggagctctccccgccttgctgccttccatcgcttcatcctcggtgcttcctgagttttaaaatcgcctatctacgcttccaagttccaatgagttatctaacgtctatggattagctaggtggttggtggaaggtcagaacttggttttacttagatttttatctgcctcatgcctgtactatttgtttaatgaatgcataggaggtgtttttattccaacaagaaaattattcgtacgcgattattgaatgaatagacaaattcagccaagttcttctggtctggaccagcctggctgatttctgtaacttttttgggccaacaggacagtagcaaatgtgactcaggccgaggcttgataggtgcctgaacatcggagtctttctttcagtgtccatgtgcttcagtaaacacactagaaaataaatttctggtttttgtccccagtagactacaccctcatttggtgttatttttcacgtgctatctttaatacaggtacatccttcagtctatttgtagaacattcagttttcttcatcttttctttgccggtgctacattatttgaattattttgctacagaataacttctattatttgatatggcagatgtcactttttatatttagatatagcattcatttatttaacaaatatttgacgaccagttgtatatcagatagtgttctaggtgctggaggtacaacagtgaacaagctaggtgaagaccttgattttataaaacttactttttagtggaagagagacaatttaagaaagcgaatgtacagtttttcacgtggagaaaagcactgcagaggaagatactagcagggcaagggatctgagtgcagtcagacctcatttgggtccagacttcattcctctatgtctctttcctttctacagaaagactgttagagaaaatggtagcattggtttcctgttgggagggaaagtgggtggtcatggtaagtgggtagagaaagacttcacagtatactgtttttgtacattttgagtttttttaaaagcgagacttgagctattctagctctgataatatggtgcagtatttgttatgttagttgtagtctttctgggcagtttttacatccccatgagccgttaaaaaaatacctgaacctttaattaggggaaataaattggaaaaatacatttcccttcacttaacattatcttagtttctctttttttt

SEQ ID NO: 50108 - DNA, 2011 bp, Homo sapiens
aaaaacttttttatgaacacgaggtctcactatgttgcccaggctgccctcaaattcctgggctcaagtgattctcccaccttggccttccgaagtgcagggattataggcgtgcgccactgcacccggccctgttggataaatgattccagtctctcccaaaaagaactgttgtaagactgtggggtgaggggagggaagggacaaataggaacccgccgtattttccactccctgtgggcctaaaactgctctaaaaaatagtccatgaaaaaatacatagtacaaacagcaactctttctgatatgcttgcatttaaaatcaggctttttctcccttttggaaaaacacagtccttgtttgctttagggaagagtaaaggtcagtgcgctgcattgcattaatttcgaagggaaagatgagaagacatcttgaaaggaatggctggctttctagagaatagtagaggcttaataggtgtcatagaaaaaccagggttggacagtggtagtaaaacggcaaaacagattttattcagaaaaactactgcagtaagaggagagagacctcggtacagaactgctccactgcgaatacaaagaaaagtaggaattgatggcgggggagccggatgtcagtggatggaaaattattacgaggaaacacaggggtgtgcattcttgctgaaggcaggccagagttatcagacatcacctgagggatggagggggatgtggaacctaatcggctgtctagggtgatcagatactgaagttgggggattctggtcaaatcaatttagcaggattcttggtaaaactgggcgatgcaaagacagatgcgttgagtacaaagtccaggccttattgggaagaggatttcagcggagcccgagtagagtttggtctagggagactctgtcactgggaggacgagcgagccgctcggaagtgcgctgggttcccttagcggccagtgggttctggtgagaagggcaacagcgggaggaggcgccggtgcggagcgggaggccgggggcggggctgcggggctgcggggcgggcccgttgtgggtcggcccagcgcgtattcgagtagagggcgagcccgtcccgcccctcgtcgggcgcttcccagatctgcttgagtctatggaggaaaaactccgcggggtccgcgattcccatggccgcagccgcctgcggcaccaaggccatggccctcttcaagcgcaccttggtgctgagtcccgccgcggcgcccaggggcccgggcgcaggcaccgccccgcggggctgctgcttgcctcctgccgcctggccctgcaaggactggcctcggggagagggcggcaggctgtggagccgcctgccccagtcccactcccactcccactcccactcccactcccactcctgctcctcgacgtctcccaccgccgtgtgtgttgtctgcccgcaggactcgctcagcagcagcctgaaaacttgctacaagtatctcaatcagaccagtcgcagtttcgcagctgttatccaggcgctggatggggaaatgcggtgagtgatggaggcagcgcctctggcttggaggaaagcttgtccgggacctttgagtgtgttggaagctaccttttgatatagcgctcagcgttgcagcctcgttgctgtggcttatccagaacatagcccggccctacgtgtttactttagaaagcccttccaggctctttgccatctagtagagtccctgcgggcccagcctttcagagaagaggggggagggggtgatgtttattaactttttttagtcttggcagctgaacctgcctgtgagcaggtcgtgtatttctcggcttcccttatccaactttgcatttctatttctagcatattgggttgattcttttgaagctgcctctgtgcacattacacccatgaacttagaccagttgcctttatgtatgatcgtatttatactgagaagttactgtgttttttgactttcttt

SEQ ID NO: 50109 - DNA, 1217 bp, Homo sapiens
ctaaatatatttcatcgttaatttactctttgtgttatttgatctataacatcgtttaacagggaaattacctagtacataatgtactgttatctacattttatctagatgaggaaactgaggcacagagaaattaagtactttgcctaggattacccgtgaagttaagtgacagaatcaatgaatctggaaggtctggcttcagatctcttgtgctgagtcactcgcatactttactacctctaaggtttctaatcagaggaatttgtatctgtattccctgctactcttaccctctatgtgggatttggcctttctccattatccctgtgaactcgctctgggaccttccttcttgtacttggaaccatcagaaagtgatctgagaacatagaaatctactgtgttgtgaaacagaattacctggaagcggaaaaagccctcctggctcaattcacatgtcacggcttatggtcgtatccggggaacatatgaaactgggcactgagtgcggagtcaggaaagccctgtccatcctctgggtttctggggaaaacgtggaccccttcattgtcactttctcctgtatatttttgtttttacttttagaactgtacaattacgtaataaataataaaaagtcgttggaaggataggtgaagttcagaagtgaaagtgttttggaggagtctaagctccttcccaccctcattgacctttcctctctaataaatagaactggtctaaccaaggatctgtggaatgagcagagtccaacggagattcagggattctaataacctcttgtagaatcactggtttgtttcagccacaagaaggaattaccttttgacattggcttgaacagctgttgtgcaaagaaaaactttttggaaagttctggaagtaccagattgattttataggtttttttttttttttttggagggacatgggggtattgacagttgatgttaatcagaaatcctaaattatgtgtattcctggtatgttgcaatcagccggccacctggttttcctctgggctcttaattttaggtgtattccgaggaagtttttctaacttttctgtaaacacagaccaggtatattgcatactttcaatgtttaaccaaatctcttcactgtttgcagtattatctgtaggctctcatgttttaagacttcccatggtgtttttgtattgtattttgcta

SEQ ID NO: 50110 - DNA, 1926 bp, Homo sapiens
gcggtgtcggcagccctgggcagcatgagccctgcggacgccagagaggccttcactctcccacttcccactgccccaaaccaacgcctgccactcacattacagcggtgcagaggagcaggcactcacctctggggtggcttgggcccacccaggaaggtaccacatagcctcttcaagtagctcatgtccacgttgtagaagttgtgcccggcctggaagagagtcacccactgactgaagggtctcccgggatggcggtggatgggcacgctgcccacacacgaagcccaacccagggaaaaccagagaccctacccaattcaagggcccaagggttggggggcactggggaacagcccagagtgacacacgggcagagtgggtgtctcccctgatctgctcccatttgctgacaatcagagaccctctccagccctcaacatggctcactcctcattcttggttctcagtccgagggtcagggctgggcagagacaaagggaatcaggggcgggactgataaactgccactgtgccacggcgggcgtcacaggggctagctggttttgaacacttccgaagctcacttactcccccacacacctccacgtgcacacaaccatatattcatacacatgcacacacactcatgcacacacgtggggtatgggacaaaggagggaggcgtggtccagagccgacatgactcagggtcagggccatttttcaacagtccaggacaatgttctgtgggccacagtgagggctggcttcccattcctggagtcagtgtgcacagaccgacctgggaggggacatacataggacgcagccccacagcctacctgccacgtggtattccgtttgttgacatagttgaccagctcatccgacaggggatggaaagagggcctgctccgggcattggccaacaccagcaggcagcagagggaggcccagagctgccacatgttggaagccggatcctagatccacctggagaggacagagggcatcaggacacctctctgttatgtgggtcgagggctcacacacacaggggcaccgtctcgggcatcagtggggacccccatgctcgtcctggcccaggcggagaactcttaaggagctgaggtgtctatgggatccccgcccccctgcccgaagcacgccatgacctcgtgtgggtccccgggggccaggcggccagagcccagagagagagccaaggggctgtgctggacgagaccgagtccagggccttcgctgctatttttaaacggcctttgcatggatttgtagaacagcttgagacactttcccaagtgagtgatatgaaacagttaagagcctgtctgtgtgattacaccctaagtggaggacccaggggacagggaaatgtaagaaaagttacaatccaggagtcctagtttcgacaggacacagacaaacaagctcggtgtgggctggtggaggttgaggctgagaggtggggctgggctggccatccacccactcccggggcctctctggtttttccagtcagccaagggctctgcttccggctgcggagatgaggcttctgagaaggaaaactctcacctcgatgccccagccgtttgatcttgcactggctcatgagtcacaagccagtgctttccagcttgaactctgagtcaccctcctaagtgagcagctcaacaaaagcaatacatgtctcctgggcgcctgcatccagggctggggagagccgcggcgcggggagctgggtgaggcaggggttcctgtcagtcactccaggggctcccacgggtgggtgaggtgttctacctcccacaggtcacaggtcgtcatgaaagtcacaggactgcggtgtcagtgcttaacaaactgcctggcacctaggggttctatctgaagaac

SEQ ID NO: 50111 - DNA, 6621 bp, Homo sapiens
tcactgggagcgtgaaaagccatctccttatacataggacagccaacgtttgcatcccagagtcatcatttctattttcagaagtatcctaatttggatgaaaaataatggaaattgtactatcagtgacaaggccttaaaagttgatttgttctgctgtcttgactgccaaagcaaagcatgtcccaaacaccaggaaggctgagtgggttgggaatgggtggcaggtggcccccagcactctgatgtggtttgatgatacgcttccaaccctcgaatgggaaaagcctgtggctggcaccgccctcctgggacttgcgcaagccaggaagctgtgtgactgtgtgtgtgcacattctgccagagtccaggtcagcacgtcagagggtcatgagacagcccggccctccgggctcttagggcagaatatctagatgtcttctacagggctctctactggtcccgttaccatcttggccacattgggcccatccttctccatgcatgcttgctggtgatgctagattatcttgatgaccagaccaaagaagttactggcctggtaaagacagataacacagtcaagactgccagccacacatccttctcagcacccagcatttagaaaacatcagttctgggctgagcacagtggctcacatctataattctgacacttcgggaggccaaggtgggaagattgactgaacccaggagattaagaccagcctgggcaggatagtgacctcgtctctatatagaaaattaaaatttaaaataaaaaataaataggctagcggtggctcaggcctgtaatctcagcacttagggaagccaagacaggcagatcatgagctcaggagttcaacaccagcccgacaaacatagtgacatcccgtctctactaaaaatacaaaaattagctgggcgtggtggcacacgcctgtaatcccagctactcagggggctgaggcaggagaatcacttgaacccgggaggcggaggttacagtgagccgagattacaccactgcactccagcctggcgacacagtgagactccgtttcaaaaaaaaaacaaaaaaacccagcaaatatgccatcactgaccaacaataaaaacaggaaaagtgtcactcaacccatttatgccagaggttgcaattttttaaatttttgcacgagtaaaaacatcagaccttggcgatgaccttgagcagtatgatgtaaaaactcccacatgcttagcgttctaataatggaacactaggcataagtgggttactgttgtcctacagcaaagattaaatttgaatttctggtcatgaaattaaaacaggggtaccacttcaaacccatcagattggcaaaaatcaaagtctggtactatctagtgttggtaaatgtgaggaacaggaactctgcacactgctgggcgagtaaattgatgcaaccacactggagaaccctttgccagcatctagcaagatggaagatgaacacacctcatgacccagaaacaaactctcccacatgtgccctgcagaaactcttctaagtatctgggagacacaggatatttattgtagcatgggataatagtgaacacgaaataacataactgtccctcagtagataaacacactgggcacttaacacaaatggactagaactggatgtagcaacagaaataaatctcacaaccgtgagtgaaaaaggatccatgtagtgtaactgaagtcatataaactttaataacattgtttatacactgatgcagagttttaaaagtacaaaaaggcctggaggtgactcatgccttgtaatcccagcatttggaaggcctaagtgggaggaggcaaggggatcacttgaaaccaggagtttcagagcagtcctggcaacagtgagaccctgtctctaccaacgaaaaaaaaaaaaaaaaaaaaaaaaacctgggcaccgcctgtggtcccagctacttactactcgggaggctgaggtgggaaccagatcgcttacatctgggtggctgaggctgccgtgagccgtggtcgcaccactgcacaccagcctgggagacaaagcaagaccctgtcattaatcaaacaataaatgaatgaatgcatgaacaaaaaaatgtgcagaagaatccaaaagaggggcagcagacagggaatacaatggcccttggaaggatcaggaaacaggcacaggagtggtctacagaggcggacgataaggcttgaaactaaaaaagagattagttaaaagtctaaacacatggctgggcacagtgactcacacctgtaatcccaacactttgggaggcgaggcgggcagatcatttgaggtctctactaaaaatacaaaaattagccaggcatggtggtgcatgcctctaatcccagctactccggaggctgaggcaggaacattgcttgaacctgggaggtgaggttgcagtgagctgagattgtgccacggcattccagcctgggtgacagagtgaaactgtctcaaaaaaaaaaagaaagaaaaaaatgtctaaacacagagtggaatttgatccctaaacctcctaccccacacaagctagggtaaatataaacattaacaaccatgccagggcgcaaggtttgcctcccacatgctctttctcaggcagcctgggaccagacgtagagactgctgcctgccaccctgatatcccagaggcacagcacatctgtacatgcctcccctagactcaactgcctgtcaccccaaccatctccctttacatggaccatgtggaagtgcccagtaaatatcactcaaccgcacatgtttccaataatttccttaggccagaccattgaaaagaggcagcagactgggcgcagtggctcatacctgtaatcccagcgctttgggaggccgaggtgggcggatcacgaggtcaggagttcgagaccagcctggccaacgtggcaaaacccccacattgggatttttttacattggatttttttaggagagacaaaaaatctctactaaaaataaaaaaattagctgagtgtggaggcacatgcctgtaatcgcagctagttgagagactgaggcaggagaatggcttgaacacaggaagcggagttgcagtgagctgagatcttgccactgcactccagcctgggtgagagagtcagactccacctcaaaaaaaaaaaggagagagagaaaagaagaatcgacatacctgtaactcctccctctcaatgtttcagtccatatctcgaaaggacggtatgttactctacacaaccacaactcattaccagatttaagaaaattacccctccaccgcgcggtggctcatgcctgtaatcctaccactttgggaggctgaggcggatcacttgagatcaggagttcgaaaaccagcctggctaacatggtgaaagcccgtctctactaaaaatacaaaaaaaaaaaaaaaagccaggtgtggtgatgggcactggcaatcccagctacttgggagggaggctgagacaggagaattgcttcaacatgagaggcggaggtggcagtgaaccgagatcgcaccactgcactccagcctgagcgatagagggagtgtgtctcaaaaaaaaaaaaaaaagaaagaaaaagaaattaagaaagaaaagaaaatcactgacagacatcccaaggcacccctgaaacgtgacctcccttcaattcacttcccaatccaaccaagagcaacagaaaatatctgttacccctaaaatgggtgcaacttctcttccaactcccaggtccagcagctggggaaagaaaagaacctgcctacaaaaagagcctccccagtctgctaaatcagcaccacatgggcagtttcaacctggaaccaaagggccaccacccctcaccgcctaaccagttggaaacagggctgtcctgagccaacacccaggagagctgtgccagggccgtgtctggcctgcgttgccacctggggagcaagggacctgtgcctttccaccagggggtacccccagctagaggacaaatgaccaaagacgaagggaagcctctgttctccaggagacgtttgactctgtctttgggaaagctacacagggtgggcggcccagcccctttctccaggagctggcgggttctaagtcaccagcaccagagccaacaagaaacagttcttggccaggcaccgtgactcaccgggaggccgagacaggcggatcacctgaggtcaggaggtcaagatctgcctggtcaacatggtgaaaccccatctctactaaaaatacaaaaattagctgggcgtggtggcgggcacctgtaatcccagctactcgggaggctgaggcaggagaatagcttgaatttgggaggcggaagttgtagtgagccgagatcgcgccactgtgctccagcctgagagacagagccagccaacgccctcttaggcctcttcgccttacgttcctgaacgtttggattcaaagagagtgcatctcagctatcctctcctccggcagcaggcagtgggaatgtttttccaggctacaaaaaggtgccaggtctgcatttgaaccccacagcgtcacttctccagtgggtttggggggtctctcgtccgttaggaggaggagtgtggggcctgcgctagggtccttttctttgccagcctgctggctttctcagcgcctgggaagggggtgacagaggcccaccaggaagccaagtgcaattcacttccacctgggtcgcccaccccagcctgcctgcaacgccccacacccagcacccactgctccccagaggccaactccccccggcctccagggctactaaccgagggggaggtggcgccccagggactctgcccggcctccctttactggagtccaggagcagggtgcgcccccggccttctccccaccggcatccaatcgcccattcgcctcttggtttcgctgtctggtttctcttcctgtttatggatttaacaccgtgcggcttcctccccagcccacccagtgccagattcctgttcttcaacaggacctgtcttctggggtcccaggaattgcgtgggatcttgcgcagaaagttggccaggcaaatccttcgcaatgagggggaaataaaccgaaaatagatgccggcagatgcgattatgtcggcagtttggcccggagacaccgaggcccaggcgctgggagcgcggtcccaggcagcagtctccggacccggccgagctcttcctcgcaggcgcctccctcggcggtcctggccgcgtccccgctccgagggccggggtccggcgcacagcccggggaggggagcggagggcagagggctggcgggcggagctgttttctgcttttctcgccgacgcttcggagcgcgcggactcccaccccagcccgcccgtcagggacagtcccgagggtcccggctccccgccggcccccagggacgccgcggggccgcgcctgggcccgactgagggcgcagaggaacccgtctcggcggccgggtagcaccgtccccgccaaggtcacttacgctgcggtggccccgggtccccagcactcacccagcgctgcagccgagagcctgcagcccagcctgcgcgcagcggagcggttggcgttgccggagcggttgccggagccctgcagccgccgtagcctgggccagccccggccctaagtaccctcccggccccgccccacgtgaccaccgcgcagccccgcccgggccctcccgccgcccgcgcacggtgcttcccagcccccaccccctcccgccaccttccgccgcccgcgctccccgcttcccggccccgcacaccccccgcccccttccgctcggggtccggggccaccgccgggggcgggcgggggcctgagcgcgcgggctggggaagaagggcttggagccctgcgggccctgggtggcgaaacgctgcgaattggggccaggggatggggaaaaagcccctaaaggtggtcccaaggcccccaccccgcctagaaaagtccccccgcctcgcgggaccgcctccgccagaacccgcgcctgggatccctgcctgccgagttggcgggggtggggtggtggagagggcgccgtcgcttatttcattcattcagaagccgctgcagaggctgggggtggcgaggctgtggaccccacagaacagcctttagaagggccactttgttgttcagagaacgtacccacaaaacactacagctacgtacaaatagaaaagagtggctgtcactgcgaaggaacctaggagctgcgtcaggatttctaagaggagaaggaccttgggggcggaaatcggtttggcacaggagtacccggagacctgctccgagaggacggacaaagtgcacatttacttggggtttattaccgggaggccctggaagggagatgcaggggttggctcaagactcaccctcctccagacactccccaaacagctttaatccttaagacaaacctgcaaagcaggcatgaccccagttgtattcaagaggctcagaggggctgggttcggtggctcacgcctgtaatcccagcattttgggag

SEQ ID NO: 50112 - DNA, 2485 bp, Homo sapiens
cagctactcaggaggctgaggcaggagaattgcttgaacctgggaggcggaggttgcagtgagtcgagattgcgccactacactccagcctgggtgacagagcgagactccatctcaaaaaaaaaaaaaaaaattagccgattatggtggtgggtgcctgtaatcccagctagtcaggaggctgaggcagaattgcttgaacacggaggcggaggttgcagtgagccgagaatgcgccattgcattccagcctgggcgaaagagtgaaactttgtctcaaaaaaaaaaaaaaaaaagggtaggggggctcactgacattggtatgaagccatgaagggcagtgttcagtccaatatatgtcgatcccatgctcacacagatccctttctgcttgtggaagttggttaatttttctggttatgatactgaatgttgctacattttccttgatagtatagtatcatctggttgatgattttgcatcttagcattatactccccttctcccagcagccagtgcctctccagtcttcctcagccacaccggggctcactgcaacctccgctcagctggcccagatgcagccatctttcaagaaatccagatcttgaggcaaaatttcagagagcaaaactttcacagggactttcaggcataatttgaccaggtcattcgaccaggttgtttttctttctctttctgtccccctatctgcgtggttcttggcctgctgtcagggcatgatttaagagggttgtttgcttaccttgagtggacgcccccacaggccagttccctccccagaaggacttgagggcagggtgcaggggggcggggggagctgccgaaccatggatgtcagacctgtccacgcacaggcaaagagagggcacaaacttgacaacacagcgaaactccacttgtttcttcacaagtctttagaaaggagctttcatttctgtagttttgcttcctctctgaatctttggcctgcacagtgacctcagtgtctcctgaccacggaatcacatgcccgtatctactttggagtttgagcttttcaaaactgcaactctttgccaatagctggtttgtgggcctggtgtcagcagtggggaacagtcttcctgccactttccattcatgtctacgtgactccaacctaaaatagatttttgggggagcccttgattgtaaccttcaacaaaggaagtcatgctaggcagattctcctgagacaggtccttacgtgctagtaagagcctttggtgagtactttaggatttacaaagcctctccaaagacagactttgatttgatccccacagcaatctcatgggaggtgtttcaagtccattttacagatgagaaaatctgccactgagtgggagaatggtggggtgggaagcgtggttgaagaagagaaacagcatttattacctttctgggcctaacactgcgctgttcgctttatatatgtttgatcctttaacacacttgtgaagccagtagtattttcacactattgtcttttttaggtgagttcactgaggctcagacaggcacagcagtaagtggaagcacaggaactgaaacacatctctgctatctcatggtttgtgcttttgcccatcactgcttatcccagttatcttttgctgagaagcagtttacttccaaacttagtggtttaagacaacagtcatttatgatctcatggtttctgtgattcaggatctgggagtggtgtagctgggctgttctgacctagggtctctcatggaatctctgtaaggggtctgctgggggctgctgtcatctgaaggcttgatgaggctgctgcttctgtttctgaggtggctcacttgcatggccagcaagttggtgctggctcttgccaggaggcctccgtttctcctcatttgagctgcttgagcaccttctccacgtggtgctggcttctccctgagcgagtgacacaaaagagagcaaggcaaaagctgcagtgtcttttaggaccttgtcttggatgccacacggtcatttctgcaatatcccagtggctacacagtccggccctgtgcagtacaggaggatcagcagaagttgaggtcgctgggcaggaccaaggtccagagaggaagcacaggggtatgactcccaggagcagggattgccggagctgtcttgagctccaagtacaacactgctcatcttgccagcgaacgtggatgtcggtgttggctgctgaaaaacagtcaatacaggaacagcattttcttttttttttttttttttgagacggagttgcgctcttgttgcccaagctggagtgcagtggcacaatctcagctcactgtaacctcctcctcccgggttcaaacgtttctcctacctcagcctcctgagtagctgggattacaggtggggtttcaccattttgtccaggctggtcttgatctcctgacctcaagtgatctgccc

SEQ ID NO: 50113 - DNA, 1864 bp, Homo sapiens
agaactcatgattgcaaagatgaggtggggctggtgcgggggaggggacagtcaaagaaaaagtagtgcagaaaggacaatgagaaaacaaatgtagaagtgtgcaaatttgggtttataaaaaagtgacttttggaagaacagaaaagccaccatacctgaaggttttcctccctctcgggcattgatccgaaatgctgaagaatttggcttcgaaatctgtctcttaaattctgaaaccagctgcaggcttgagagtaaaccaaatcatgaagctctctgagattcttaatctcatcttcattctcaacctagaaatacaatagtcagtaagacttctgtgtctaatcccccgtccatatgccatatgccaaccgacacaaatggaaaaagggatcagaagaacagggcaatacctgtttcagtgctgacgtcccagagagtattattcctatgctttaatacacatttctgtctcatatagggctgaccagactaaagaaagacaacaaggcctgacctatgcctaaccttgctgacttagcagtgcaatattgcagaaccctacaacagccctcaagtgggaagagtaagattgagagtgagttctggttcagaggtctaatttggaattccatttgtctttatggatcaatggtttttgaaagcagtggaacaaaaaagtggatgatagttgctacaaaaaaagaaaagataagtagttagggtgtagatgacatgacagaaagtagtaacaggaggagtccaggcacagttacatcttttactagggaactgggtcaaaacacaaaaacaaacaaaaagctacaacaaataagttagcatataaagccagtatgtcagagagtcaattacacaatgatgagcttctgctggcaaggcccaaggctatggctacctctggaacccctcagtgtattctttagactactgggtcaccaaactgcaaatgtaaaattaattgcatcaggcttccagcctgagatagaagagtagtctcagagaacacaggtgggaagatctaagtttaactcatccatcttatactgatttctttaatgcacacttacatcccacttgctacttgccaggtcgtgctctgtctcatatgcacaaactcatctgaaaaaataccaggcctgactcagcctttcatacttcaaggatgactcatttaaaaacaacaaagggactctgaaaacatttcgaaatataaaaataagactacagcacaccagagacaaaaaagcaaactttttacttttgaaagatttgaaatgaaaactaaagtttaaagagcatctgttttttgcataacaatgtgaatgtacttaatgccactgtgtgcactcaaagatggttaaaatggtaaattctatgtatattttaccacaataaaaataaacttttaaaaaaggtagaggagccacacaattgaagaattttggtcctgaaatgactatacatgattcaggcccctgctaacatacattgataggagcaagaaacaaacttatgccttgttaaatcttttttttttttttttttaaagcatctgctctgcaccctcacaaaattcaagaaaacaaatgacaggctctggtaaacaaggaatgataacaattataagcgtcagtgatgaaaaacggagctggccaaaaagcaggcagagacgcttttaaagtctctgcctgctttttggccagctccattttaaaagcaagcttttaaagtcaaggaactttactgtgataattttaacagaacttaaaatttcattagaagtcacagaaaacagaattattataagaagaggaaaatttgccatataaaacaaatttga

SEQ ID NO: 50114 - DNA, 3231 bp, Homo sapiens
taaagtcagttgctattctagatgtctgttttcttggggattattcccctatcatttcatgccaatggatagacactaagatcttgaaatacgcgtaacacaaggtttatcaacagtggcacttggggcctgataattctttgttgtgggaatcctgctgtgcctagtaggatgtctgagcagcaccccagcctctcccactagatgtcggtaccagcaccacccccacaagaggtggcaaccaaaaatctctccagatattgttctaaataatgccccctgagagaggggagataaaatccccctggtagagaactactgatttatatagaacaactcttccttttacgtaagagaagcttgaaactgccccctttcagcgcctaaaaccaccttaagaagaaagtgctaacctaggttaggaggccgaggctgcttcttggagactaagaaatgcactcaagacctataaggcctttccccacagcctgatcctaagtggaaaggccaggagaagcgtggcagagaactatggatcaggcagcccctctcatctttaccataagctaggtgcactgcaaagtacataggaaataagcaggatctgaaacaggccagctgaaactttcaagaggaaccagttcaggcatttccaggtagcaagggaccaccctgggcagctccgccccaagccccaagcccggcggcctgcagggcctcccggggccgggcgcccgcgcggagctcccgccacgcccaccggacgtcacccgttacacaacgccccccgcccccagcttatgcaattctgccctcccgcggttcccaattgtcccggtgacttttgtgggtgaggaagggagacgccgcctgcccggcctagttgccctcgcgggggattctctccccgccccggcagtcgtttccccgcggcgggcccggcccgagagccaattcccggaaagcgcgcggcaggaagcgagcggccgctcgggatagcccagctaccacccatcccgcgccggggcggcctcggtccaggtcacccactccgcgccgggagcgcgcgcccgacagccaggccgcggccgagggaaccccgcgccgagcgcccctccccgcgccgcgtcacagtcggctcccagggcgatccccattatgaccgaagcaccccggggcgccgccccctcccacaccccccagcaccccgagacccgacacgccagcggcccagcggccccggggaagcagaggagactctcggggcgcagacaagctccgggtccccggccctcggggccaggagggtgcggtcggcccggccccgccgcatccccgcgcggtcacctgctcgcagcgcctcgcaggcggcggccagggcctcccggtagcgcccctggtgcagtagctccccgagcctgccggccgcccgggcccgctcgcgctggcccggaaaccacttctcggccaggtggttgaggacgacgctggttctgaagtctgaagcggcgatggcggcggccagaggcggcggccgcggggcggtcccttcagcatcagtggcactggcggtggcgggcggcagccggtcccggcagaggcggcagcgggcgcggagttccctccgcaggcagcggcggcagtagctgtggccacagggcacggtcaccggctcgctcaggaagccccggcagcccaggcatctgaggagcccgccggcgccgccgtcagcgcctgcaaccggggccgcgctccagcccagcccgtggcggagccggtagttgaacaccaggcagtccaccagggcgcccaggcactcgggcctggccggggccccgcggcgcagcgccgccgcgaacgcctccagcgcgcccttcaggtggccgcccagcgccagcagctccccgcggcggagcagcagctcccagcgctccgactccgcggccgcgcgctccagccgatggccgctgccgccgcccacttcccagaaccggcctcggccctgcggcgctggggccatctcccgactccctcctggggaggtcctcgccaccgccggagaggacatggcccgcggagggctgcgccgccgccgcccgccgccacggtcccggagcctcccgggcgcgcggctccgcacgcggcccgcgagcaggggggcgtggcgcgcggacacggcggggctgcgcgcgcccgggaagccccgagggcggggcctggcgagggcggggccgggctcggcgacggcgcccgggactcccccacgccgcccgcggccgcgctcccgaggagccaagcgctgggccccgccccttccgagccccctccgggtgggggacgcaggtcggatgattcctccgtcggagatctaattggcttctccggaaaggagggctcggctcgtgacggaacaaagccggaaggaccccggagcttcagtccccgcttgcctgtctgccaacgccgccacctgcggtggccctcgcccctgccgggggttgggggacgctcccctgccgcgcgggactccgggtcaccacccctcccccgacgcccccgcccaggccggacctgccccaactcctggcgggcgggggtctccccgcgtggcctcgcgcttgtgcgggtctgcattttcatagctctacgcccatgttccaggtgggcgcgcccaagcagggggcctgggagcgcaccttcggcagatgactgggactcttcggttctagaggactcaactttaaatatgaacaaaaaacccacgttcctggggcgactccctccagagggcaaggagtttttcctggtgccaggtgactgcttgcccgtcttgcttaaaactcatcgtgggcccacctcgagggagaaagcccacagcttcctcaggtgtctccacacctcaagcactgccttacagctggttaaggtctatatttggcagttttaaaagaaaacaccaagaaacatgtttcacatggcggtcaccgtattactacaacccaagctggctctgcagttttgctgacagaagaaaatgatcgggttgatatataatgggtgctatttcccttaaacttcacagcagcaagtttaaagctctcagctgaaaatacagatttgatgatagggtattagatcgctaatgttggaagtcacttaggacttttagtcctttttcaaatgattggaaacacagggaaagttatttgtcaaaaatcacacagctaatac

SEQ ID NO: 50115 - DNA, 1152 bp, Homo sapiens
atagatccctgatgataacggagttgtttgataataggcggttgaagatactattacgttagggacctggaagaaagtagttaacgctattgtcatagaagcaatggggggaggaaaggtttgtgtccagttttgggcaaaaacttctaagttccaccccgccttctgatggatgcttttttgatggggctcgttttgcaaaactcagcagattaggcatgttgtgtagtggaatgatttggagcgtctaagccgtggcaccctacttaacccccccatctccagttatcccaatgaaccgaccccgagggggcatttccgctgaagtccggggctgtaaaaaattaagtgagaagagccgcgctaaagccaagcgtcgtcgtcacccaaggtactgcgctgatgcgctgcgggccgaccaggtgctcccgccggggcgtcttctcctacgcaggaagggccacgccgagagaggcaggcaacaagggcacggctggaggccggaaggtcaccccgtccccggcggggcgggcgcggcccagcctcacttcccgggcacgttcgggcggggcgattgcagggaacggggcggggaggcgacagtccccggctccgccgcgcgccagcccgccttcgctgcccggaggcgccgcaggcctgggttcccggacagctgagcccgagcgccgcctcccgaaaggtgaaggcggcccggggaggcggggacggtgacgggggcgggggccgcgggcggtctcccgacggctgtcgcggggccagcccaaagcccccgatccccggtagctgcgcttcccgcgcggggcgccggagtagggcgggccaagctggcctgcggccgcggcgggaagaagggctagcgaagcacccccgaccgggcccaggcgccggacgccggggggcgcctcgctgcaacttctctttggaagccccgacacgagccccggcccgcgcgcgcgctcccccacggccacgcgcgcaccctgccgcccgcacccccgcgcgccctccgtctattttttcctcttcctttcatcctcacactctaaaataggtcaaggggtggaagttacacctggtgcagccctcggctctgatgcaaaagcagcttttgcccctggctgcgggacagcg

SEQ ID NO: 50116 - DNA, 405 bp, Homo sapiens
ggaatggcacatgtgctatgtggtttacgcagttaccttttactgtaagaatgtattgtgtctccagccaagtggacattaacagagaaggttgtgttgccaactcccatctttatgaatatattagaggggatagatgtggggggtgcagagacagcaagaggaacagacagaccagttagactagctgagatactaggggatggcagtacaaacagaaagacagaaagggggcaaaggtgccagcactgtgacaactttgatcttctaggctggcattccaatagcacattgctatctcagcagattcttttgctccagtcagagtcccttcatccatttgtgatgagtcctgttggcaaccctagtggccatggtacatctctttcactgtggcccccactg

SEQ ID NO: 50117 - DNA, 703 bp, Homo sapiens
ttaaaaagatctctcaccaaacaaggattgaaattgtattgcaaatgaaagagctcagcatgagagcacaatcagaaactgaagagagttgatcaaagagaagattctagctgaattgttctatttttaattccccagggatcctacggtctatgacacattaacaggggtgtgaatcatttcagttacatcacatactctgtcctcttgtggtgcgggtcttccccagttgattatacacagataatcaatgactttatttgggagggattggagctatagaataatctatcttaccaatctgatggaccatttgtaagagctgtttgtcaaattggatcttcatttgacaaataaatactagagctgcagaaagtaaagtttactccaacccaattaatcattaatacatccacaggaaaaatacattttctccacatggaatattgatttttctatgaatattacctccacattgaaaaacgagtgagtcactgcagttaagccagtgtaccttgatgttgaattccctgaagaaggtacaattatatttacattcccttagcaagaatttggctaagtgataagcacttttctcttttcttttctttttttttttttttttttgagacagtgtctcactctgtcacccaggctggagggcagtagtgcagtctcagctcattgcaacctctgcctccca

SEQ ID NO: 50118 - DNA, 975 bp, Homo sapiens
gtcaacctcttggagctgctgatagatttacattcagagggctgcagtctgctggactattattttccctcatcccttcagcaaacagaattttggaggaaaaaaaaaatgtaatctgagactcagtattctgccttctcccgagctgcaatgttttttccaaatacatcatcaatgccaccagcctaggctgcattcctctatgtcaccagtaatcgccgaaacaacctctgaatcctgagaatgaatccatttgctcatccatattgggtgtaaaaagactcactcaaaacaagactggggatgggaaaaggtggggagtgggacgaagctttctttaagtgcagattaatgactgcaagcaggggtttccttctgcggtgattagcacacactgggtatttattgaacatcgggaacaggcaacctgctaatcactttacttgcatgagctcatttgatcctcacaacctccccgcgcggaggtaatacagttatcacccctttggtgcagatgaaggaggcacagcgaggtcctgtcactgcccaagttcgcccagctagcaggctgctgaccaggatgagaccccaccagcctgaccccgtgtcccctctcactttcctcgccccaggggctgtgcgctgaaggacgctcgcggacgcagcaaactacacgcagcagggtgctgcagagaggaggggtgcacctccttcggagggatcaaaggctcgccccaggactctggaggtggggacagcgacatggagtgggggcaggcttccaagaagctgtcgccttgttacgaaaatagtcgggtcgggaggcgagcttccttcctctctccggcccaggaactcgctcctcggcctccttgtccgggtcaagggggtgggcatccccaagggggcatttcagggacacgattcagcgacccatctccgggaaaaaaaccaaaactgtgtgtgtgtgtgtgt

SEQ ID NO: 50119 - DNA, 2026 bp, Homo sapiens
ctctccaggtacctgcggccaccaaaccgagacttccctggccaggtctgagttaattcccagcgcttaaagtatcttacccaaaaatggttgaaaaggaaaacaagtttttggtgaactttcaggcagtgatgaaaaaaaaaaatttccaagcgccactagggtctaaaatgttcccaaacagtaaactctcccggagttcactttgattttggactaagctggtgaatgacaggagatcagtacgagcgcagagcagtccccagaggaaaggaaggtagaaggcggtgtcgccgcgcccctcgagccagagccgcgagcccccgcccggctcaaggaggaaagtgaaccagggcttcccttcacgggttgcgaccgatccggagcccgcctggtgcgctggcccgcggtccccaggcaaaaggtaatcaagagtcactcctccaaaattcaaactccctccccaaactgcgagtcctgctatccccacaccacctccaagaaaatccggagactctgcagaaagcgtttaaagagcacagaacaggcaccgacttgacaaggcggggtgacactttctcgcggcgggtcccctccgcagcccgctcccgcggccagcccgacggcaagacgcaagtctagcttacgtgttaggatcatggtgtccggcttctttctgcacatcaagcacggcaggcggcggcggaagcgctgtggggaagtcgaggcaggcggaggcggctcggcttccgcgtcgggacccacggcggcacccgagacgcgcgccctcgcggtcctcaacgcatccttgctcgccgctccctgcccctcgtcacggccccagaaagaaagcggggttttctaaagatcgaaacgagggagcgctcagggagttgggcgagaagtccgtgagccggcgctcctgatgcggagaggtgcggccatgtcctggctgggagcgaagcgccctcgctcgggcagtcggagcgaactgtctcccgcgcgctccgccagccgggccctcccgctgggcccaccccccgaggggcggggccagagcgggcggcaccgcctcctccccgctgtctgggtcgcaggccttagcgacgggctgttctccggccccgccccattcccaggctccgccccccgcccctcttcctcgtggccgcagcctcaggccgccctctagccccgccccgcccaggccccgcctctcctctgtcccgccccctcggttccctcctcccccccgccccgccccgcgcctcctccgccgaaggctggaatgtttcccccacgggcctccacgttcccagcgggaagcgccgaaaagtcgccaactattggccccgggtgcaaaggcaaaggtcacaaggcatttacttggcggaggtgtccggcctggaccctagtgtgccttgagcgtcccttctttttcttggtagctctgcgtactttttacctgtcttttatcctggcgggaaccacgtaaatttgcgggaacggaggggaagcggagaggaagggatggtcagtgtttccagatctgtaaaaacgagcgaagggtacctgtcccttggacattggttatttattgctaaaacccgcatgggtacggagccaatgtaggtgataaatactgccttagaggaattgagctttcactcggcacgtgctgggggtcacagcccgtgtttctcaaactggcccttgggccacagtccgaatgcagctcctggaactgcccttagctggggtctgactgcataattccaatctttgatgatgagaatctgcaacttttacaagctctcagatgattctgatggcctgtagtttgaggacccctgatgtattaggaagcctaatgtgaagggatcacagctaaatatagttgcattaagagcctttaaaaaatccagaactggattccatgaaaatttacttcggggttaattgatgtttttgcctgctatctctgggcaaggaagactactgaactaaactcattcattcaacaaat

SEQ ID NO: 50120 - DNA, 2298 bp, Homo sapiens
tttcctctcaatttctatttaccacacaacatgctttacaacaaaaataaagcacattttaaaagggaaaacttactcatttagtttactcactagtttacagtagtagaattctttgaagtagaattgtttgaaacgagatatcatgggaatatttcagggtttggaacttgtgcatacaaaccagctgggctttgtttaaagttttaaagccttcagatatttcaatgagagaaactcaagacagctttttttatatatgtcaagaggtcacatttttattggttcatctgtgtgtcatataaaagcccatgtttttaaccatagtgtatctctggggtccccgcccaatcaccccatatcatcaagaggggttaattgtgtgtctgacttttgttaagtgtacacttatttatgggagccatattcagtgaaacttgttcatctttctacataataaacaaaagaaacagtattttacaatgcatttgctctacttggagtaactacagttgattttaatttagaaacggttgtgttgaaatcatttgtgtatttggggaaaattcatgattattcaattgtaccttgaccctaactttgtgacgcctatgaaaacaaaggtgaatcttgttagacaaggctggcgagaggttctgagacaggtaagagaagaggaaatgcatccagtaatatgtgcttgttcttcctcgggtcaaacagtatcttgtgatatctgtgaagctttcccatagtgaaatctggaacattttaaagggagggacagatacttccctccagatctagccctgcttttcttccagtgcttttcattaaggttcctcagtaatctttattgctagagttaatgttcacaaccaccaccctccccccccccccccgcccgccacacatctctcctctttttttcctctgtcttatttttctttgacacctctgcatcataagacaggttaggtagtttgtttagcttcattttatgacagagagaaacaaatccagggtcccctggtacacccaacagacatacaactaacactggagtctgggttgcagcccagggatgagtgccctgagcccctgaacctttgcgttgagatggaccactctgggaaccagcgctgtattcatacaaacagctgcagaatgtagcaaggaaatttatgtaattagtgaagcaggcagagataggagttttggcttcatattcaaattccactccatgagcccaaggtggagagtgttttgttatctacccacgtgggactgatttcccttttaggcctctaaatcaaataccagtacggtggcaggagcccaagaaactgtaagagattgaggccagaaaattctcatgcgtccactccctaaagctttgggttcccagtttctgccaagctacagaagctcctaagtgagagtatcacacgggatgccaagcgggcatttcgtaaaattgcccttgttaggcagtggtgccagccaccccagaggctcagtactgggtcactctgaaggactccagggcgctgcactttatcaaaggatcgggagacagctgcgcattctcacgttcaggtttttccaagggtggagagaggacttagtgggctctccgggctctgtgccctctcccttgctgaaggcaccatctcattcaacacctcctcttttgtttactattgtgaaacctctaggtgtatcacctcaattataaacccagactggggctttcctctccccataccccatcatctcataactttcctgggtgagctggcacaggtactacagaacagagcccacacatgtccaccgtctctccagacggcatccagggcaaagtctgtctccacccagtaggccttgatggcttagttggtgcttgttcctggggatgttcttccagggagtgtgtgaatctgaagggcaagtggcaagaagcaagaaggtaagggatggatggaggcatggagtggaaacctggtttgaaaaaaaaaaaaaaaggcgaggccaggtgtggaggctcaagtctgtaatcccagcactttgggaggctgaggcgggcagatgacgaggtcaggagttcgagaccagcctggacaatatggtgaaaccctgtctatactaaaaatacaaaaattagccgggtgtcctggcacacgcctataatcgcaactactcaggaggctgaggcaggagaatcgcttgagcccaagaggtgcagggtgcagtgagccgagattgtgccgctgcactccagtgtgggcaacagag

SEQ ID NO: 50121 - DNA, 2475 bp, Homo sapiens
gttagggcaggatcctgatccaataggactggtctcataagaagaggaagagacaccaacggtgcacaaagggatgaccctctgagggcaaagcagagagaaggtggtcgtcggcaagcaaaggagagaggcctcggaggaatccgacactgctggcgccttgatcttggacttctagcctccaggactatgaggaaataaatttcagttgtttgagccacccagtttgtggcgtttaatatggcagcccaagcaaactaatacagtgaccctcttgatgaatcttcctctgcctaaggactttattctttcatgtctgttcccttgtcccaaaccatccccctcctctctgttcctatccaatccaactcaggacttttcttctttaagtcttccttatggagagacctctcaatcttagaacacactgacacctattgactgtcactcatttgggaaacaaataggaatttccttgccacagctcttatattattatcctgttgtgttagtttgacttttcaaaagaccataacttttcttccttatcaggtcagtgttttgaagcctatcagggacaacatcttattatcaaatgttagaaaaaaattgagtgtcgctttttgagttaggggagaagagacccatttagggctatgtatgataagaccaaaaaagtcttaaaaatgttatttctaaagtaggacttagtaggaatccaccacacctctaatagtttagtgccacatctgtactaagtacagatataaagagcataacaactatggctggaatcccctactccctcccaccatttcctactaactcagtgggttagaagcatttatctttatttctgttgtggcaacccaattctggttgttgccttctgtttttctactgcttacaccagcaacggaagttcataggaatatcttccaaaaaagctctggccagaaccaaaggaagtgagtacattcaagggtgaaaggatgattcaacctctttgagtgcttaatttttggtatcccttctgaaattgctgaaaagaatgccaacaagttgtaattaccatagccctctctgggaggtggaaatctgccagtactcattggatttcaaccaacaatccatttcaaagaagtcatcaaaggaaatgagcacctattttggtaacttttagggaatatctgacgccgctaaaaaatccacatgcatgcttgatagagtttcataaaactgtgcttctttattagcattttaaattcaggcttatatgtgcactaaaaattgtatagtaatttattagagagtcaatgatagagagtggctagggcttggtctcagaataaaagaaacttctcagttcaccaaaatctgcattcgctacccacagagaaatgagcacttaatcttctaggaagaaaacatacctgtgttcaaatttttatcaaatgccacatttttccagtaaactaaggtcctcaagcggggacattcatcaccatcctcaggaaactgagaggactgcttttgcaatcagaacagcttccaaggcccttatgccaatagctatgtggaacgattcaacatcagcctcggaaacttccttgggagctgagtgggcagctatgaatcatcccctgccctttacacatattgttactgatctccttggaatattatatgaaaataacagcttgcatttttgtaaagaatgcttttgctgatggcatcaggcagtcctggagtaaaagaaggccctggtgaactgtgtatcctggaattggatatactccaaaaatgtttgcaaatgctgtttggaagctgagtcaacacacctgatttggaagaaagccacgggcagaggccagcattactggcaaaagcacaaggactccattctggggattaaaaataacagaactaagttttaaccttttcatagtcaacttgaagaaacattgtaggccgcaagcattccattttgttatggataagaaagcaggctgggcatggaggctcatgcctataatcccagcactttgggaggctgaggtgggaggatttcttgatctcagaagtttgagaccagcttgggcaacatagagagacccccatctttacaaaaatataggaaaattagctgggtgtggtggcatgcgcctgtggtagtagctagctgaaaggctgaggcgggaggatggattgtgcccaggagttttaggttacagtgagctatgattgtgccactgcactccagtgtgggtgacagagcaagatcctgtctcaaaaacagcaaaagaaagtaaacctagaaaaaccaaactctcctttaaaaaatgcttcaaatacactgagaaaattactgagcatggtttttccctttgatttggctatttctcatttatttggcccaaaccaatactatatgatattccttcacatgggaaagaatagctagaatctcaaagc

SEQ ID NO: 50122 - DNA, 709 bp, Homo sapiens
tatggttgctaaattttggtgtttggtgtggggtagggaggtagagaggaaatgtttttttcttactctcaaatttctatagttaaatgctactggagcaaggatagaaaaaattggaaacttgttgcccatgtgtcaatactgatttcttgcttttattttatttttttaaaatagctaacaaaacacagcatagtccaagagttctatcctgttcttttgtgcttagcaaatgtggtttcccacctccgctctcaattctgggtatctttaaatactgtttttagaagaccaggatatttattaaagggagaagatcaaagatcacagcactgaatgacatcaacaatgtcattgtcaacaaacttttactggaggcattgtcattgtcaatgtcaatgtcaacaaacttttattggagatgaaagtttagaagaaaaaaatcgaagtatgctaaccctgctaataggtgtaaaattgcatcataaagtaaacagaagcaataagatttgctcttctatagaggtctatctttcaaaaacctttttattgaaaattcatttactacattaaatcaattttagaaatactttctctgacttttggaaagaagaaaattgatattttgctattgtaacacagttggtcctcatcggttatttggtacctggtagttcaatagaaccgctttaggttttccactttcagt

SEQ ID NO: 50123 - DNA, 972 bp, Homo sapiens
tattttcctgtgcctttaagaaaagaagcagacactccttgggatcactcacagctcaatttttatggcatttgttttacaaatactgcgttactgtggaggaaagaagtggggacatgcacagcatatttattttttctatatccaaagtaaatccatacatcattactttaggaactaaatatgtataatttgccttggatttattacagcatcaaagtgcaactggaaatatacggagtttgaaattagaattgtcaactgttcacatggagatcaatagccttggaaagggtgactgtgggccctgccaggcaagctcagtgacagcctcacagccagtcaagaatgtcagcaagacaggctgtgggcagagtgatgaaatgcagccccacgtatgagggtgttaggtgatcacattttaaatttaatggtgtaggcttctgccaagggggtactagaggttactccagtgcacaataaaataaagggaatatcttttgagtcttcagtttttagccactttcaactcattgggttttctcagccttaaactaaggtcattagctttcacaagttctccctacaaacaaaacaaatgctgggtgtcaccaccgcattctttccatgggggatgttagacaccactgacccggatgattacgcagacagcacacccaaatagagacatctagattgggaagagccctcaaaagctggctgacaaccaggatccctgctcacgggcctattttactcaacaggaaaaattgcttccaaaggttttcttttcttttttttttttttgttttgagacggagccttgctctgtcacccaggctggagtgcagtggtgcaatctcagctcactgcaccttccaactcctgggttcaagctattctcctgtctcagcctcctgagtagctgggactacaggcatgcaccaccacgcccagctaacttttgtattt

SEQ ID NO: 50124 - DNA, 384 bp, Homo sapiens
gttgcaggagttgcatacattacaaataagtccctggccttcaagttctttaaattcttagttttatttctaggcctcaatgccttttaaatcctgacaggaagatgaaaaaaaaaaaatcaagtgcgggattttcattcttcttaactgatggaaacgattgccattttatgtttaatgttttcatgtgtcaccaaagagcattaaccttggagtcaaaggaacttggtcaggcttctagatttcccactgatgactgtgtgcatttgggcaaattaccaaaccttattcttcttctgtgatctcctttgttaaatgagatgatttctagagtttctattcctgtatattttacattttaaaaaatgattcgaatcagttatt

SEQ ID NO: 50125 - DNA, 516 bp, Homo sapiens
tcagcttttttcactgtgtaatgttcagggactgagtctaggatccaggccaatattataccatgctctaagcaaccaacgaaaaaattaaccagctcagatatacacatatgcacactcatacaggggcacagacctcaagagggagataatcctgatatgtaatctcaggcctgggctatgttctccaacttcaaaggagaatccagtggggtgatatattagaaatggggagttttccagaagaagactgtcaaaatattgactccggcagaattgtaacccagatagaaatgcactcctcaaacaacaaagcaatttacaaagtggcttgaagtccatcaggagggaaagcagaatttgggaggtaagccaaggagcttgcatttctgtaatgcttgttctggtgccagtgataaacattagtgcacccttcagacctctgcctgctggagaggtatctaagtgtctacagtgctctctaaacataaataatcttcatcttcaaatgcacag

SEQ ID NO: 50126 - DNA, 2342 bp, Homo sapiens
agtcagaaagcacgtcttttaaatatcttacacttcttttattttataagattgccaggtaactgttcagatgagattgattggcccaaaagaaaattaggcattaaggtgtcaatgatgatactattagtgtagtgtgaagttattaatgtttcaacatatagagtggttttcttttttctgcgtagattcactcatgtggcattcttacggagagagaaggagagagtatgactgtgtgtgtgtatgtgtgatcatctgaaatagaatttgatgctcagaaagcatttgaaaatgaagagttcacagcaattcatatcaatgcagtttctcatcaggttcataataaagatacctacaaaggtatagtacgacaaatgcttttttttttttctacgcgaccacattccatcacctgacacccacttgcatgccattgcttcactaacatctttatcacatttatctgagttcctatttaactatctggagatagtctacagagtagggctgtcacccaggatctagcagaggatctgagacatatttctaatatttgttgaatgaataaagcagtatcataaggccaatgcaccccatcatttagatcataaatactgttcatgcttgttttgttgtcagtagagtgccccacctagaagtgaccctggattgcaaaactgtaatgagcaaaacccagactgagtgtctctcttaaatacaggcagaaacagactcctctgttaacaagaatgccatcctgtgctctcaaccacattgtaaggagcgtcacctattgcccagaaagaaataagctgctttttataagtatttagtgcatggccactgaaaatattagagacaaaaggcaaaaatattgctgaaatgatggcaagaattcattggttggatgccaagtaaaagtcagttccagttgttccattagcagtgaaaacttcagacactgccagacattactatctgcttgtgcaatttggcacagttgttactaggtcagaagtacaattgcaaaactagtacagccaacactttgcaaagcagtatcaactatagaagacacaatacctttcaaagagtggcatgctctatgcaattatggtagttgttaacaattatttaggacttccagtgtgccaggcagcattctaagtgctttatttttagtgactcatttaattcttgcaacaacctcatgagacagatgtattcatatcctttccattttacaggtgaggacaccaaagcccagagaggttaagtatcctgcccataattccctacattctaagcacagaatggagatctaaatcccacaggtttatctccaagatccatgctctcaattgtcgcatgataccgtttcccataaccactatgcttaactgccctaacaccatgcaaatgcctgtctttgaagatatgtggaaaatatgatcaaacaagtgcaaaaaatagaactgctttatcttccaggctgattatcatagacttgaggctcaccatcgtgctacaagaatttcctaaccaaaccatgtgatattttactaatattatagctggccccatagtgctatccataaccgctcaaagttaaaagcatttttcagttctatattcattttaatgggatgttgtttacagtgagtctaataaacaatatgtaaatgattagctgtagttttacagcttgaaaccatgcatcggctgtctacaatgtttagttacaaaacacagtgcaagttatttggaactgaagctccaggaaagcaggcacctggttagtctcagtcctcagtgtgcttttgcacagggaagctgcccagttgttaaatgaaccacttccttgtgatgttgtccagcactcctttgctcctgtttctttgctccccttctcttcccagcccctttctctgtaccattgacatcatatttaattgataacacactctcttatatccacagtttttgcagcagcttctgcacctgttggtcctattggagacttggcttcccccttagcaaacctcttttcctgaagcctcattttgcttccatattctattaggttagttgcaggaagaaagactctctgactctgagaaagactctctgactctgagctgtttcccaatccttattctcccaactcttttgaagtgaggccgtcaagttcatgtcaatccaatccccagttactcccccttatttattaaagattctagccttttgttcatatacttccctttaactccaaccttggcagcctcaccgtgggaggcaaagtctctgcggacaccccccacatggtgtaaccctgcaat

SEQ ID NO: 50127 - DNA, 651 bp, Homo sapiens
ataggctgtgggttttttttccttcccttcttccttctcttcttccttccttcctctcctctcctcttctctcccctctcctcccctccccttccctcctttcctttcctccctccctcattccttccttccttgttaaatgttttaatttaaattaatttttccatcttccagtttattaacacttggctatgatatgctaatccttcgggtatgcacagggtggttggtcacagaatgttgttattgtctaaaatagtgcaaagggcatttacaatggattttcaggcactgctttgacataattattctgctgtttaccctctatgtttatcttcagttgtgcaatgattatgcggagccaaagagctttgctggaaacatagtcttaagttctaagtcatcaatttatacacataatcactgaaggactaaaggaaacttttctctgtcttcctttctttctttagcaaacaaaaaaaggaagaaaaaaaatactaagcagtaactcttgtacataaattggaattaattgctgaatgcatattttataaacttatgatattctaattataaaatttccagtgttagtgccatgacatagatgtgtgttccatctacaagggaagcattctgggttgtgatgttatc

SEQ ID NO: 50128 - DNA, 1927 bp, Homo sapiens
acactactttaaataaagaaagtcacagaagtcttgttgcagaaagggaggtgtgcgaaacatccctttcaagtggcagccttgacatttagcatattttttcccataccacagctgagccacgtgcttgaaagcccaggcctgctggtgctgctgctcttttccatgtttggctccatctatacagcaattttcaaagcaggtcccaacgtgcttaggaaaactttcagatatcgtatatctagcttgacaagctcatatgcaagaaccgattccctcatcaatgtgtggaatcagttattctccagtcatttccttttggagttcacaaagatcagcacaaaagtcacctccagtagatccttctttgtttctctccagagatacagaaatctattccatttgccattgacattttaccttttcttttctttttttttggactggttgaaccacttttgcccaaaagcccaaagccaattatagaggtgtcatgctaacaaggtgaaggccctcaggaagtagggtatcaagaactgaaactgaaggaatgcttagtatatgtcaatgactctctaagcactttgcagagtagctcatttaatccttaaaaccatttcatgacgtaggtgctgttatcctctttgtattggcaaggaatgctgacttgcctaatattacccagtgcaagaaccaggactcagccacaggcagcctgaggttgcaggtcaactctctaagccactatataatatattctctcatcaaagccacccttgacatcaacatgttcctctttttatcaaaacagtatcatttaacttaatctagatacatgttcacattgcaatatctcacgaagcttccctaacggttgtctgtctttaaaaatctcctctggtgttgcctatgattggaaaagtgtttgtttactagaggaggctgcatattttgaggcctacatcactcatggttaaaaggcattacatatgcccttacttgcttttcactgtgaaccaaaggagcagagaacagttcacaggagtcaatgtttttggttgcccttccttggaagtgggccagaattcccaatgccccactgaagtgagagccaatgtaccacagagtgtgtccagcactcattttgctagtgaattggaggactcatcagctgcaatgtaaaaatctattttgcaaaagacatatgatcctgaacactccgcaaaatacctcaggggatttcaacttaatgtagttacttgaagaatttattttatgtctgttgactctcacttgcatagaggtttgcctaaattttcttgccctcttcataggcaattcagttttttcttctttctcttaaatatttttgtttgtttttactttcctttttagaagatgaggtcttgctatgtcattcaagctggagtgcagtggcatgatcatagctcactgtaactttgaactcctgggctcaagtgattctcctgactcagctcctgggactacagatggtcaccaccacgcctggctaaatttttaaattttttggagagacaaggtcttgctctgttacccaggctggtcttgggttccaggcctcaagcagtcctcctgctgggcttccaaattgttgggattacaggcgtgagccactgtacccaggctcttaaatgtttagctatgggaataatgtgacgtcacatatctcaatcaggtggaggcatttagactttttcccttatatgtcatgttctccaaattgagagaagaaatcccttcttttaaaaagtcaatgtcattgatactatttagtaggtcttactttataagatgttgttaaataaagactagtattggccaggcccagtggctcatgcctgtaatctcggcaatttgcgaggccaaagtgggtggatcatttgaa

SEQ ID NO: 50129 - DNA, 2814 bp, Homo sapiens
ttattattctcatcagctgtcaaaggctatgtatgaaaatgtaagaggaaatctcagaagcataaatgtttgaattagtcttactttcaaattaaaacattaaaccacaacaagatatttttgcattatctttagtaagatattatttatagaatcttttcatttgcggcattgtttattaaacaagacaaatatgaagaaagtaccttttcttttaaattgtcaaccaattatagttttgaattttttactcccaaatcttacatcttaaacttcttctggttaattgcaaatgagatcatacaccttaaagagttaaataaaaaatcatattggaaagtcgtatttctttagggtgccacattttcctctaaacaataataaaatggttaaatttaaaatattttgctcccttccctacctaatggttcgacttgacattgtttactttctccgtcagtcctggggaatattgtttagtgcaacagacagaaagattttcatgtgcattcagaacaaattagagtttatgagggcatgaaactaccatgttatcttcacaatctgctttatcacaatcgcacactttaaatttcccctcttcaagtcatatcaggacaattatgtgaaaatcaaaagaccttttattaagaacacagcacagaactctgtattgactcttagaggccacctctaatatttgtaaattcagaccttccttcagtatacggaaaacaactggattgaccaaagaggttaagaaaacatagtctttgacccatccatgtagacggcataggaacacagacttagagagcaaacaagaaggcaccataaacgctattgggaaaccctaccctaattcggagagttttttcatatcgtagtgagatgctattttatcccaacgcaaaaatcggacagaagtccctatctcctcactggacccctgcaaacacagtctaccatttggtggctgtcacatgagccctagagcacttgaattgcaccactgtatttgctttattatatttcaaacgcctgcctctggcatacatgacaccgtcttggaaccgagagtagctccaggctgccagaggaaataccagcaggctttcactgggcagcgcccatcactccactgacacacagacctgccaggcccctctcctgcacacacgccagggcacctcacacctgatcagcttcagctccaaagctgacccgagacagccccgaggatctcagggcttttgcagcagttgttcatcactaccgatttcctgacagtcacaaggaccttgcttctcttttgaaggttaaaaaaccccacaactctcataattccttatctagaaataatcagaccagtaaccagagcggcgttacacaaaacaaacacacaaaaatctcaacactccatcaaggttaaatactagagaaagggagaccgaacacactgccatgacaagaatgaaacttcaaccagctgatgagatcattcatgaaccaagcttatcactgcgtcttcgcagtaaattgttttctttttaatacccctcacccccggtctccaatccccctctgcctctcacctgccagccgtctgtctctagtgtttttccaaatgacatccagggctctggccgtggagtccctgatgtgatcgctaaaggacctccggagaggggctcgcagggggcgcgccatcacgtgggccttggggtcccccatccgctcgcagacgccttcagcgcagcccgggcgccgcgaccatgcctcggtactccgccccgcgctgtgctcccggccgcaggctgtcgcctgccttcaggaggccggcattgcggctggcactgcggccccgggaagcgccaactgcaggcggcctcctggcccgcggccaagcgcgcgcggcggccacatctggaaagacttaccctgcgccggcgacaccctcgcggggcgcgcgagctgcagcacagctatccggaggcgtctcgcttcctgtgcaacccaatgactcacctgggtccgcgccgggctgctcctgggtcacatagcaggtcttcccttcaggggcagtccaggtgacctcgcgttttcaaagggaaacgcagcgccgcaggcaagcacgcaggggaggtgggagggtggggctggcaggtggccttgtctttaactttcaaggttgattctcaagaacgtttgcattttagtgactcatttttatctcattaactcatggttttagattaggcggttgatgagataggaagttcaacctttagttgtggttgtgggaaggaagatatggctggaaggagcactttacagatcaatctggattccctctaagaaatggagacctgagaggccagcactgtggctcacgcctgttcccagcacctggaaaggctgaggctggaggatcacttgaggccaggagcttgagaacagcttgggcaacaaacaagaccccacccctacaagaaattaggcgggtgtggtggcatgcacctgtggtcccagctgcttgggaggctgagagggaaaaatcgcttgagcccaggagttccaggctgcagtgacctgtggtcacccccactgctctccagcctgggggacagagcaagaccctgtctctaaaataaataaaataaggaaatggacacctgagttttaaacaaaatactgatcagctcctcacattttctctctaaccatacttctacttacagtggtttaatcaagtcactctaggttttgccccttaaaaagtttcaaatatcccctgattttatgaatcttcta

SEQ ID NO: 50130 - DNA, 1287 bp, Homo sapiens
aatctttctgcatattcttatatatacattagaatgtcatgccctgtttctccagcaaaactcttaggatccttaagaacaggagctgtgtatgtattttctttctttttgtcctctctataccagtgtggtaactttcatgtagtaagtaatggttattgattgatatatacacaagtgtacaaagtccatgtttaatacttaggttttatttgttgtagagtttgagaaaagaacattgcttcattatccagtgtttattttttatttttatttttacatttagagacagaattttgctctgttacccaggctggagtgcagtggcatgatcgtagctcactgcagcctctaactcctaggcttaagtgaccctcccacctcaacttcctcagtagctgggactacaggtgcacaccacaatgtctggataattttaaatttttttgtagagacagaatcttgctatgttgcccaggatggtcttcaactgatccccctttctcggcctcccaaaatgctgggattgcaggaataaaccaccgcacccagcctattatccagtgtttaaaaataagaccgattttttgcctttggctggttgactcatctgatatcaaaataacccagcacaacctggcagaggtggaacgttagcaaactatgtacacacatgttttgatttttacatattcaatggaatcctcatgaacttttgactgaacacaaaggtctaccttgctgagctaggttacaggtctgttgatctctgcctctttttccatgccaccctcctttagcagaatgttgtgtattctgtgagctctgagcaaatattaattctagataattatataggccagcacattcaaaccagtcactagctaccttcctctacgtcttctttgctaatcaagggccttcctatcatgaagctgtggtctctgcatcatgtttcaaggcccaggtcacaggtatagacaaaaaacacacagtgagaggggatgaggtgaccaggggttaggattactacatctgtctttcctcactaccttccttttgaattttttaatcttgtttacttgttaaacttttcttcagactctctgtgcctctacaaactgaacatgactcaaaatacctttccttacaaggctcattttcatgagcgtggaaacaggttagccttataggtaggtgttccaccctctgcaaaatgtttacacacttgaaattaggttaaaataaacataatggatagacatgaagaggaaaaaaaataaagca

SEQ ID NO: 50131 - DNA, 2046 bp, Homo sapiens
gtataaaaataatagattaactcagtcattattatgttaatatgcataatacactgtttttttggagaggaagaatcgttaagcaactgtgagaacagtgattaaggaaaatataaattaaactagtgatcaaaacatttacaatactgaatgcacacctaccaggaacacgagtattttaaaatacccaagtaataacctcattctgtggagaggataaacaaaatctgaaattacaatgtggaaatacactaaaaaaaatccatcttagtaaaacactaacaagcaaagccctaccataaatcaattttttatgaatcttagccctttttattttaaaataccatatatatatagtcccagatgatgttactctgcttccttagtttttcttagtaacataattaacctgaaaggtggctgaaaggtggctatacgtggctttcctcttgtctgcaaatgaggcaggttagagaagttaaacccaggtgaggcctgccctgcccatttcttgcaagacgaacacccagggagaggaaatggaggtggacattttgattaaaagttttagatcatctaaagatttttttttccctcaactacatatgtggcatttcctctgagtcagaaggagaaaatgtgtttgaattcctataatatctgtaaaagacttcactgtttgtgttcttaaaacaacaacaggccaggcgttctggttggttgccccattgagtaatgatgactagagtgggaatgagtgtggttttgaagagaatatagaatatgattagttctgtggcagtgaatgttataatcaaagaaatttgtaacctataatatctgtaaaagacttcactgtttgtgttcttaaaacaacaacaggccaggcgcgggtggctcatgtctgtaatcccagcactttgggaggcagagacgggcggctcacctgaggtcaggaattcaagaccagcctggccaacatggtgaaaccctgtctctaattaaaatataaaagttagccaggcctgttggcaggtgcctgtaaacccagctatttgggaggctgaggcaggagaattgcttgaacccgggaggcagaggttgcagtgagctgagattgtgccactgcactccagcctgggggacaagagtgagacttcgtctggaaaaaaaaaaaaaaagatttttctcaaatactttgtaacgtgccacactatgagtcaatggcatagttcttgatttattcagtgatggttgaaagtgaaagaggctgatgggttccttctgtgggtccactgactttcttcacatttccactcctttggactctgccatccagacatactgaactttttttttttcttttctgtaatcagctgtggttttgcccttcagaccttcaaacctagtgtttaccctgccccatgtctttgcttggctcattcctattgatcaatatttgttcatttcacatagttgctaagatcttacatatgccaacctttttccaggctttgctaaaatgactttttctaggaagcctttcatggccttctaactagccaaaactcctgcagaaatttgtacttctgtcttggcctgtaatatactttattgtctgtgacttctagttttattgtcttacaggcttgactttgagcttggtgaaagcagggaatgagactatcctcctcgccttagttatttccagggcctaacagtgtgtgtgtggcaacgactaggtgctgagaggatttatgtagagtgaatgacaaaataattataaaatattttagtatgggcatggaaataaatagaatgtctttagaagttaaaaaaataactgaacttgtttggttaaaatgcattcacgcatcaagctcattagcacatttcacttttcggaatgccactaatacttagctcattggtaaagttcagctatgtgcaaaaatgaaaattttaaatcgggtcaggtgtggtggctcacatctgtaatcccagcactttgggaggccgaagtgggtggattgcttgagcacagga

SEQ ID NO: 50132 - DNA, 696 bp, Homo sapiens
ccaagattgtaccactgcactccagcctgggcaacagagtgagagtctgtcaaactgaaagaaaagtcctgccctggctccagagattacatccaaattcactgtttgacacctatgtgtttcagatgcaccatgtcagagaaaactgttttatatgtctttggacaaatttaccccagtttgacttctgctgctaagactccagcttgcagagctctgccaggcctgagccccagcacgttgtgagatgctttatatagaagagcactgatgacccaaacagattaaaggtcagtgaagttaagcctggggtaattgttctctgaactctggcacattcttactgggtttctgctgttttactgcatgtgaccctttgtttatggtttagcaagggttgtgaaattctgaacacagtttcaagaaattacaagaagagtggtgaattctcttttcatgagtcaaatcccaattcttttcatcttcaggttttcttccttgagaattacagtagttgagatatgtttgcaatagatatgttgaactcttatgaaaatccagatggatgaagacacctatttttttcaatgctgtgtgaatatccagaattactaacatattagaaattttgcagttttctgaacatgtaaaatttcttggaagaaattagaagagagcctcttgatcacaaaaaat

SEQ ID NO: 50133 - DNA, 1528 bp, Homo sapiens
ggagcccagggctgaaggggcagtgaaaatagtagggcttcctattgttcctgccaggacaactctgctttcatctgctttctggattgtaatctactttaattcattgagaaaatgtctgttgagcatccactacatgcctggcgctgtcctaagtatgatgatatcgtagtgattaagatggacactgtccatggccccatgaaacttgcagtctatggaaggttctttgtgggcacatggtaggtgtgtgaatggggaggttctatggttaacactatgagtgatattctagcctttgaggataaataaacccaacaagttaaagccccacagcaaattaacagaaaagctggggaaagaacccagaggtcttgacttatacttcagtgttcttgttcccaagttcagacaagaagttcaaacaacaaaaaatttagaaatctgcttggttagagcagatataaattttgggccagaaacttcccctgactaggtcttctctccatttctctcctttcggatgccctctcaggactcagtgaaggctctatgctcatcctcagacacaggaaagatctttccagaccaaggtctccctttcccctctgggtcgaaggccacccagctgtactttgttccagaagctttcccatcagtcattctcccttctggccgggctctcccacacacactcatctctgtggaattgctgggctcttgcattcctcgatgtgttgcatcacttccttccttcctgtcttgcgtgcatggggcacacttttcaaccctcattcctgtctactcactctcccaaccacgaactttgcctcctttccctttcctctccatgtctccctggaggctgtattctgtattttataatgctaaaaatgagaatagaggccagatgacactcagtgtatttgtgtctctctccttaaaatcctttactcttttctaattttgggtttctactttagtcctggtcactcgttctggctgctgtcataccttgggtcttgcaaggctagatctgatcagttttacaaggagaaggggacctgcagggtttataactcaggacgtgaaatgcatctcactcaatccatccagatcatgaactgtgaggaaacctaacacagagaactgctggcagtgattctacactgtccttaaagatcctgtagtacagacagcctcctgttcttaggtgctgcctacatgttagcttgcatatctcaatcgtcattagggggcccaatagaagaaaagcaaaaagcagcctccacctaccaaagatcttcccatgaattgtttttttgtacaaccttgtttcttgattacaacaacaacaacaaaacaaaataagacaaagacgtgcttatttgtttttgtgaagggtgtgttttctttacatagtctagcacactgaatctttcctgtatcctttgaagtcatcatatcaggcactttgtgatgtttagtgaaatactctgtagtagaagtgaagtactctgcagtttat

SEQ ID NO: 50134 - DNA, 1469 bp, Homo sapiens
atagaaaactaaatgtctggaaaaaatggggccaaatagatataatttagttttatatagaggttattctaaaagtctcagaaaatcacgagccaaaggttcaaaatcatgctttccttactaattgcttataaggatcaaacacttatagagagaattgcaatcaataaaaagggtcatttccatgagtagcctgtttacaaccattttgtacacaaacagaagaaccgtttgaggattggtggtcagttcactagcactccaagaaaatgtccaaacaaattcttctgtgttgacatggaagaacatcagttcttcagagacgccaacacagtgcagaaatccttcctttaagtgtttgcattcatcactgatgaaacactggggctgacttgctgacatctgagttactacagttatcagatacagttcatgaactgtctgtcatattctaactaagcgctaaactatttcctcatctttgtgagtaaaaaggaacacgtcattgatagtggaaagttcaaggcatcccatttaaaaagaaatagttatattaactcatcttaatattttctttagcacaagagttttatttatatagaaaagggcctatatggtaagttatttagaatgcagggaaacaaattttccagaaatatatatctttataatttataataaatgttctttggaatattcctaataaggcaacagatttgaatgccatcaaacaccatgcccagcatccaccaggggttggctcagagaacagcagctaggaagtagctacaggaagcagcagacatggctgagcctaaacccaaattacaatttatttttattttttatttttgagacagggtctcattctgttgctcagactagagtgccgtggtgcgatcacagctcactacagctgcaaactcctaagctcaagcattcctccggcctagatgtcccaaagtgcagggattacaagggtgagcctggccccaaatgagaatttttaagatgggtgcaaacgggtgactgaattatgaatctttttcttaatccttgtcttcccagataatgaccacattcattagtgtcattttgaatacaaaagtgtgctgtgggcttttccctgatgataaaagccttcttcatcttttggttttccctgaggttgaatatttcaggctttctggatacttgattataaatcattgtttatcttattctcggatgtacaggacaaagttgtcctttctgggctgatgatctcctcatcttgttagttaaacccagttgtcctgatctgttccctttctcaattatatatgtgtctgtttaatacaccctagtacagaaaatatcagaatttgattcagcccaataaacagtttgccataggatttacacaacatgcaaataacattatttaaaattttattcaattctccaaaaataattgtatgtattacttt

SEQ ID NO: 50135 - DNA, 978 bp, Homo sapiens
agtagaaagagtctagacactatagaacacaatgtttaagtcatacatgaactttaacagacaaattatctgagataaaaatttttaattctagccaaaatttgagtgttatgtttattaccattagttgtgtaactttgatggagcaattttggcaagatccataattttagagttggaagaaactttaaccttgctccataaataagagcacaaaaaatgaggtgactttcccagaattaaactgagtaagaattagagcacagaattcttaactcccagcccattgatatttctactaattgaagttttgatttttttggagccttggtaagatacagtcagcaaaatgttctaacatagagtgagctcattaagtaattcccttgttatttgaaatgctaagttggcatttgaaaaaactccaaaataatactttgctctctgttaccacagagatcacactgtgcaatgtctaaaaacagtcatctgatagtaagtcactactacaattatgaaatcacaaatgttgctgtcacttcgtatgtcagtaggtgaaaatacttcaaataaccttttgaaataagggctaaatccataattatgatttctttccctcaaagcagatttggggacactgtcactactgtcctacctccatatgtgtaatataaaataatctaaaaaaccaagcccacagtctttcttcatttggaaaaaaaaaaagatgcgcttatgactattgttaaaaatcttaaaaagtttacttactcttgatttggaaattagttatgcacaatagcatatgaaagataaatcctcatgtgatataaacagcattttttgtagattaaagtccaactcactaaccagctaaaaattttgattcaattctatgaccacacatcaatctatttcttgcatccagctaatgaataatatttaataatgaaatatgatttttaaataacctaatga

SEQ ID NO: 50136 - DNA, 1265 bp, Homo sapiens
ccactgctaacactaatatatgtagctgtttagctctattcctgatggataaatatatgctaaatagttcttattactattacataacattagcagtaatactggtgtgtagccttccttcttccccaaaccaccttatttttgcataagttggttaaatctaaattctgtagaaataattaaaagttgtggtaaaggaatgaagagaaaggaaagaaacgatgaaaagattacctaggaatccctttggaagggctaactgcttaaccattgtcttagttcattttgttctgctacaacagaatacctgagactggctaatttattcaacaggagtttgtggggtgggcagaggcagaatatgatggtttgaatattttgcattcaaacaatgagtaaaaaacattcaaaccatcatattctgcccctaaccctaccaaactcatgtctttctcacactcagaatacattcattttgtcccaatactgccaaaagtctgaactcattctagtaccaactcaaaattccaaagtccaaagtcttaacaaaatcagatatagatgagactcaggacatgattcatcctgaggcaaattcccctccagctgtgtatctgaaatcaaacaaattaactacttctaaaataaaatggtagaacaggcattgaatagacattcccttccaaaagggagaaataggcaagaaaagaaaaaggggtaactggctccaagtaagtccaaaaactgactgggaaaacagtattacatctgaaagctggagattattttttttcattccacgtcccatcatctgggcacactggggcaaaggttgaaccctcaaggccttgggcagccccacccacctctatagctttgccaggcccaagcccacgcaacagctctcccaggcccaagcccacgcaacagctctcccaggctggtgttgcatgctgttggctctgtagtttgggatttcagcagaggccctgctgctgtagatccactaagggggattctttacaatggctctgcctctgcaacaagtctttatcaggactcttgggctctccacaaagtcatttgaaatttaggtgaaggaagacatacctcctcagctcttacattctgggcacgtgcagagctagtgcccagaatgctgccaaggctcatggcttgcaccctccagagtagtgggttgagcaacacttgagcctacttgatccttggtgagggcagctgaggagcactacagcagtatgcag

SEQ ID NO: 50137 - DNA, 565 bp, Homo sapiens
ttatctgaattgattcctcaactgaaaaatctaagtccaggagaaaattcctataaaatctatttgctttccatagttaggcaatgatcctagaaatatacatatacagatatatgtatatctgcagatacacacacacgcacacacacacacacagacatacacacacacacacattaaaaaccctctccttcacatcgaagggctctgacctaatttctgggcaccgtgccacatttctagtcattcaaatagatgagtcagtactccctgggcctcactctggctagatccactcagagaccaaaacctcttcatctcctggcagacattctcaatgatgttctcatttcatttaaaagcaagattccttcgatccgcctgtgaggactaaggaagaaagcattctcactccatttaatcattttacgccaccacagactacccagcaggggactcacggcccactctctgtactttcaggtaactaccctcgttcacaggtcaatagttgctctcttccttcagaaataaaaatatttacctcccacataaaagagtagtc

SEQ ID NO: 50138 - DNA, 1202 bp, Homo sapiens
tattatttaaagatgctctcttaccctaacctagtcttgaccatcaaaaatgtatttcaagtgtaagtagaggtgactgatcttggaattttagcaactccatggaacagcctcccaaaaacgcaaaggaaatcagagcctcatgtttattatataaccaaatgcttttataacatgtccggactttaaatcactaataaattctccttcataggagtaggacttcatttgccacattatactatttaaatggggatttttaaaatccccaaaggctgagtttaagaagagaaaacaaaaacatctatataagacagtatcattagagatgaaaagaaaagctgaaataattacagaccagaagcaaagctgtcatgaattaccttggaatttagctagatggtgctgcagcctgtgtgtggctagttgcacagtccagttgctgaatggaaatcaacaggcacgcagatggttcatatttttttagggtatagaattccgttaggaattaaagagactacctaccacaattagaattttttcaaaaatctaattcttctgagaatgacattttgcatctttgaaaaaaaggagacaccaatgaggatttattatatacatgttttgaccctgaaatagaaccatcagtatgaacattcagaagtttcatcctcttgaaattctttcttttttagaagtctttctctttcattaatcgtatcaacatgctctgtgtatttgtcaaattcttcagctgagataaccgctgtaatcaccccaaggatcttagggatttatagcattctgccagaagcttcacctttgatcaaaactggcagtcacccagctgatttctcaagaaatgtctccaaattacacaattttaaatagggccaatgcgcacacatggttctactctgcaccacacagtttcactacacattcggctacaatatggctaacgttttgtaacatgtcattattcagttttaattattgatttaatttaattgtttacatcttttctggtgctttgaagtttaaagatcggtcactttcatccggcagcccgctaaagaggaaattactccacgctactcacatctcatctcatgcattttaatttaaaagtgagtcagagaagcggggcccagtagctcacgcctataatcccaacactttgggaggccaaggtgggagga

SEQ ID NO: 50139 - DNA, 2356 bp, Homo sapiens
agggaagaaattgtaggacctgagccagaaaaaactcatttggtcgtctctgaaagcctttagtctttacaagaattgccagaatcaactgatggtgtattctcttgtcactgcagcccaattgagaccactgtatttagttgtctgtccccttagatccacaatattttagggactcctggcaccattccatagtaggaagaaaaagctaacataattcaagttaccaaaactggggtctggggagagaaactgataggaacttcatctacactttctcataaaaactgatactgataacatagcaaacaaaaagtacagtaaaaacaaaaagatgacacaatacgcttctcatttattttatatttatacaaacagcgcttccctgaaaaatcagggtatcgttcaagattttatctttattcacagaagttttaaaatttttaacttttatatgcacaagacagttctgatttgttgaattaagtgaccgcgggtgtgctaatgcttctaaaaaacagcattagccttctcccatcaaaagtccggaagctgcccttcagtcgtcaaagtgtttgccttaatttgcaatcgttatgacttgagccaaatgcttatacctcatttgtgtcgtatatgtgaagatacaattgcaaatcgttcacgaccttgagtcaagaccttgagtttcctgaggtcaggagaccgttagggaatgtgagtgtcccagacgggcgctgagcccagctcggagacccaccccgcccgtagcagcggcgcgggccccagagagccccgcactcggccgcgcctcagttacgctgactcggctgtgcccgcagtgtcgcgctgtcgcgtagccaggtgtcgccgggctggcgcggttatttatgactgcgtggttgggctgggggttcggggccggggagcagccgggatccgccgcctcttccatgatcttcccgggccgaaccacgggaccgctacgctgaaggtggcgtcgcgggtccccggggccgcgcgagtgtaggggtcgctctcggccggccgcgaagctcgcggcaccgacttctcgcgagatttcggcgacccccccccccgcccccgcccctccgttctctgccccctcccagctctggtgtgggcggcctccgctatggctgcgctgcgaaggctcttgtggccgccaccccgggtgtctcctccactctgcgctcaccagcccctccttgggccgtgggggcggcctgcggtgaccaccctgggccttcctggccggcccttctcctcccgagaggatgaggagagggctgtggcggaggcggcatggaggcggcggcggcgctggggggagctgagcgtggcggcggcggccggcggggggctggtcggcctggtatgctaccagctgtacggggaccccagggccggctcgccggcgaccgggcgaccctcaaagagcgcggccacggagcccgaggacccgccccgcggccgggggatgctgcccatcccagtggcggctgccaaggagacggtgagtgcgcgagcgcgcgtcacacctgcgcgggggatgtgaccttcgtgccgggtacgcaggaccctggaggctgtggggacggtgcaagcgctgtggccgcgggtgaggaacttcccgtgagcgaggctgacacctaggccggacagcctaggatccggtcacccacgtattgggaagaccagtgatgctgtccctgatgcatcaggaccttaaaggtggctgcagctaccaagtatcaatccaaacccaaaaccaacacccctccccctcttacaaaaaaagattcagaaatgaaggccatgacaggcagaaagtggaccgctgtaggtgtgggaaaaaggaactcctagattgcgcggggcgacagctaatgacccaggaggtctgttgcattagaatgagtttcgaagcagcggtctgagatctcaaaagccactactttagcatatgagaatttattagtcccaagaaaggaaatgctaaacctgcatgctaacgcccttatcatacccagggaatgttgatgttaccaggtctgaaaagaaataaaaaattgttcaaaaagagacataagtatttctctctttttccttcccccactaaagccagaatcccgttagtaggtaacgataaaacacaaaatggataggatagcaaatgtaggaggctgtgaatgacacaaactcctacagaagaaagtcacgtgaaaatgttcaactgtcattatgtagttaataatacaaggtaaagatgtgtgaaaggcaacagtgagtaaaggagcgtgattttttttgtcgcatcagtatatttaatagt

SEQ ID NO: 50140 - DNA, 1419 bp, Homo sapiens
attatttgatcattgtttgtcttctttacttgtcttagccccttaaggagaggcactgtgttcgtctttgtcacatttatgtcttcattgcctgttaagggtcctagcctgataggcacaatatgtatttgttgaataaataagctcatgctaaatatttgtatggaacatacactgagaaatgagtttaatattttgttcagctaaagcagttatttttagcatttgaattgggacgacttcagtaaaggtcaaaattccaggctttgggagatcagatcacgtggcactgtatttattttaattgtgcaagtttgggttgccaaaattttttagcaaactatggctttggcctttatttatattataaagagatgattctgattagaacctcaaagttttagccttaaagcactatttttattagtgggaaaaaattttgttctagaactgcctttttttttcatgcccagaataaaaaaacgattagattgcttaacatacttcagtgttttacttaattgtacagaagacatgatcttgttttatgatttgttcgccttaaaaagcttcaagcaacatatttgagtattactgtggagtggaaaactagttagacaaattttttatctctttcatatctgtaataattgcaaatagtcatacattattaagtttcctttaccatatgttttccagcctcttttgtcaaggcagcatatcttgagatgtgaggatataatgctttttcccagaatatcgaagaatttgccagatgcttacaggcatacgttttgccgtgcttcattttcttgtgcttcacagatactgcattttttacaagttcaagatttgtggcaacagtgaattgagcaaatcagttggcaccatttttccaacattatacgcgtacttaatgtttctgtgtcatgttttgataattcttgcagtatttcagactttttcgttattattttatctgttatggtaatctgtgatcatttatctttgaccttactattgtaattgtaccatgcaccatgaaccgcacccatataagacagcaaagaataaatgttatgtgtagtttcctccatgaaccagcttttccctagtctctttccctcttctcgggcctccctgttccctcagtcacaaaaatactgaaattaggtcagttactaatcctagaatggcctctaagtgttcacgtggaaggaagagttgcacatctctcactttaaatcaaaagctagaaatgattaagcttaatgaggaaggcatgttgaaatactacataagccaaaagataggtctcttgtggaaagagttagcgaagttgtgaatgcagcggaaaagtttttgaaggaaattaaaagtgctctttgtgaacacacagattataaggagacaaaacag

SEQ ID NO: 50141 - DNA, 725 bp, Homo sapiens
tagtgttccattgtatcctgggacactgagccaggaagaccgagggaagggtggtagagcatgaggcagtgaaacccacaagaaaaagccagacagtaggaatagttttatctccttggacatatttggagaatatctaacttatagtgccacagaggttctagatatttataaactttgtgcctggagttgagtagccaaacactatttctggacctagctagttaatagtacatcaagaggtagagtctcttgattctgtgggccaagggaaaaggcagtatttgcatgtagttttcatttaatctttacagtttgtgggcttagtatttatttgtccattttatagttgaaaatgctaaagtttgcagaaagttaagttatttttcccaaggtaacctaactaggaagggatgaagctggcatttgaacgtaggccggaaggattgcaaaacccatatactttcattccaatataacaagttgtgtaatgtgaaaaaacactgggttgtgtgttgtaatactgaagttctggtcccagacccatttgctgcctgtgtgaccctgttgaaggcccctatagattaagttaactcttttgtacagttgcactaataatatatgtctgcttgccttttaaaaaataatactccattccaaaatttatctacatctttacatacatatattcctataagacatgaacttttgtttttttactcatt

SEQ ID NO: 50142 - DNA, 876 bp, Homo sapiens
cataggtattggttttttaatattatgttttaatttttttatattttaatttttaaagcaatcaccatttaacaattatagtaagctttacacccacattcacttattcatttattcagcaaatagttgagagcctgctagaagccaaaaactcttctaggcactggggaaactaaagtgtaccaagtaaacaattcctgcgttcatggaatttatattgtggaatgcaggagacaaattttgtatttctcagcatatttataatatttgaaggctagatgagatcatcaagtgggtaattgtagatttaaaagaggaaaggaggtccaaggattggccctagggcagtgtagttgggaagtaccagcaaaaataccaaacaggaatacccagagggataggaggaaaagcaagacagtgaaatcttacaaacagaaaataaatgatttcaaggggaaatgagccaccaactgtgtcaaatgctataagaggaaaactgagaagtgacctttggatttagcaacaaggaggtcattgatgaccttgacaagcagttttggtggcatggtagagaagagagccttgctggagtaagatcaaaagagaatgagaggaaatgtaaacaacactctccagtagccttgctgtaaagggaaggagaaaaatggcagggaggagagcaaaggtagctaaatagagaggagggacagggcactttctaaggtgggaggaatagcaccgtgcgttatgctgaaggagaagtatacagtggaagaggaaaaaataggttggcagggccagggcagtattgctgaaccaaagtctgaataggcaggaaaagaggaggtctacatgctgaaccactatgctatactg

SEQ ID NO: 50143 - DNA, 2097 bp, Homo sapiens
aagtaatttcattcactgtggttgctgtgtggtgtaaatacacatattcactaatgttaagaaaaattgtgcctattatgtatagtagtgatgcacataatttacacacactcattgattgaaatgtttccctgtggatcaggtgcgttcataatcagatgaaggaaaagcaaaggaggcatttgtttattttccatttcgtgaatcataaaatcagaggtttgggctgactacctttaggttcccttacggtgttttttgggaaccgctttggagtcagctatctgctaagtttggaattgccaccacgaaagtaaacaccgtagtgaggagcgggttgaggaaaagaataaatagttggtggaaggaaccaccgtacttgagggaggggacagtgggaacggcccctgtcacaatcatttatccaaagcatcaacattctcagagcaaagaacttgtgtttctaactccagaggtgcctggattcacagccaaaaatgcttcttcctcgctctccacagcccctcccatgccagacgccggctcggcaccccctcttcgctgtgcatttctgcttcccccgaaagcccgagtagtaaagggaggctccttgcggcccccgcgggctcccagggacccgcaagttgaagcgcgagggttccacgcgggctgcggggacgcgggcctcggtgctgcagactttctcagggcgcctgggtcgcggcaggcgcggagtcccgagcgcagcagctgctccgccggcctcgcctccgacccccgccctgcgccaagcgcggaagcgctcgcgacctaactgccccgggtgccgggcgcctagggaggggccgccaccgcccgctccgccccgggggcctgcgcccagcagcccccgcctccccggaatccagaggccgagccggaggcggcggggccacggtgggagcccgcgaggtggcccgagcgagggccccgcatccccgcagagcccgcccgagggcgcagcctgccacgccaggggaggcggccgggcggcggggaacggcgggggcggagcgcagcctcccgacgccgccgcctcaccgcccccctccgcctcctcggcctccgctcgcagccgccgcctccgcctccgccgggctgaggagccgggagtccgccgcgccggctcggggctgcgggatggggagttagcgccacggcggcggcagtggccgcagcgcaccccgccgccgcccaggagcccgtccagccaggggtgccgggcccgcccagcccgccccggagccaggcccgcgggcggcggcggagctgggcaggtggatgcggctggaagatggcgccctcgggcccgggcagcagcgccaggcggcggtgccggcgggtgctgtactggatcccggtggtgttcatcaccctcctgctcggctggtcctactacgcctacgccatccagctgtgcataggtgagtgcgccccccgccgcggcgcccccagcgcagcgcagcccaccccgactgtcccgggacgctcagccgctcctccgctctcgccccccggatgcgccccgggcgctgccaacctgccgcgtcccgccggctccgccgctaaaagcagcctcggggcagcttcttccacgcgcacgcccctcgccctcccctcccaactctcgggttaaggtggcgcctccgccccgcactcgccgccgagcctcccgccgccttccgctcaccgccgccgcctcggccacaccccctagaggggcggaaggtccccgggaccgctgtggagaggggaggccgaggccggcgaggcgcgccgggggctgaagggctgagctgggcccggccccgagctgcgccagacccgcgcgggggtgctggccttggcggcggagctggatcccttgctggttggcgtcaatgcacttgttaaaaatttgtgacagcgctcaggggcgtttttgctgcctttatgatttgaggattgccagttggacacttttctagtttaaaaggatgtggaggaggtgagctactagaaagtatttttgaggacatgtgcaacacactaaaccataatttaggtgtttgaacagta

SEQ ID NO: 50144 - DNA, 591 bp, Homo sapiens
tgtactcacaaaattacaaaaagagaaaataataatttatcattatagtaattttgctaaatcaacagttaatttggcctcatgagatacttacagtctgatagcctttacagttttcacagattctgttaaataagtgaaggagaacaacagaaatgagaccctagaatttttaaaaataggttccatggcatgcctacacaccacctgctgttactccacccttaggtggcagtgtgggaaggtgaatgaactgactgcggtaccttttaacctgtgtcgttgttcacttccccatcacttcccttgcggcatccactgtctccaccactgtcctagctctgagtactcccttgcagaaagcagcagccatgttgacttgtgaaggatttgatgccaagggtctgttactcacttggtgccagctgaatggagcagccattgtatttaattttttaatttcaaattaaagttttaaataaaaaagtctataggtaataacatgcttttggttccaaattcaaaaataaaacaggtagccatgttcttcccagtccctctccccaccttcttccactatgcacagagaac

SEQ ID NO: 50145 - DNA, 3064 bp, Homo sapiens
aaaaaacatatacttaggcaagaagtagaggacagccccagaatggctacaatgaatggaaggaaagtctgtatacacacatatagctcaagaacaagtttttattatgcatgggtttcgcagtgatacaagacacctgctcacaacttacagtattaattttttagaaaaacaaaacaggtatatggcatgagtgaaacagttccccattaaaagcacttaaaacctatgacatggctagtaagatgtaaaatattaagtccccttggggtcttgcaaacttgtatttcctaacaatttggaagccatgatgatagtctgaagctaaaggaactccaatttcttggtatgatactaaataaagattcttatcttttgggagaaagagccaaaacagaagggtgtgaaagcagtgaatttcccctcctatgacaataaagcaagagggcagattatattcatgaatgcttctcatatacaaaaaattcctccataccaggaaggagagtattgaccagtttatctttaaaaagaaaatgagtaattctggagaaatgtagcttgttcattcacctacagactatggctacaaagcaatgaaatggacttctaaagagaaattgctcaattgcttttatactaaacgttaaatgtaactaatgctgtagaaaactgtttaaaacaaatggaaattgtctagtgataatgtacatgaatcttgttttcttggaattttcattctatggtgacatttttttaactttcaaaacctgaaatgaaaattctgcaggatttggatgtgtacagtcctacgtttctataatgtcttaatagaaaaataaatgacaggtaacgttgttataaaagaaactctcatataaattacaccaacatagcaaatggcatgtgtgaactggccttcactacaaagcaccgacacacagaataatcagcatttttcctatccctttatttataaattctaacacatttattttatagacatgagataacatatgcattcataatttgattccacctcaggttgcctacccagaggagccactgcatttggcaatgcagatgaaatagcaaacaggacagacatagacccttgagtttcttctagtagagaggtggacaagccttttttttttttttttttttttttttgaaaagggcaggtagcaaatattagaggctttgcaagctaagacaaaatgaaggacattatttaggtactcaaggaaacttttcaccaaatttttattctaaaaattgaaaactcaaaatattgagtacaatttttttttctttttttagtaatagagttctactaatgggaataatgggattttttggcaggggacgggaggtaacattttgctcaatttgggctgaaagttggtatcccctcattggaataaatagaaaatgttaatctgttaatgctgatgtgtaatgggatttcacgtatttcatctttgaaaatgtcttttcacacaaacaggtcaaggtactgctaaatactgacacatccacccatgagcatgtgattttagttaagcatattcatcacttgtaaggcatttgtaggattcatctttttggtatttgccctttagcatgtcattcattcaagatgattcatttccaacagaagattaagaggaaactttaaaagcatttaattgcagttaaatgcttttaaaatttaaaaattttctttgcactgcatcaaggtccaaaaaactgctacaggaaaatatatccactaaaaatggatttggcaatacagcgctgttttgacttctcatagcacagaaagtatataaagcagcttgacaatcttaagttttagtttttattgaaatgaatttaccatattatgttgttgtaccttgtaatttcaggtcaaattcattaagaaacattttcaagtctgtggcaaaagttaatttccaaagttactcagtgttaaaaaacagtggttgaggatggtttttctcattcagaaaaatttcaatgtcagcccagagcccaaaaaaataaaaataaatctttagcactgctaagccattgaacgcctgtgtggcaaatcaaatcaggatattcagcttctgtttctcacaaaaaaaaaaaaatcatggaactgaagatggttaagtccacaagagcaaatgaagttaactgttgaccagttcagtaacaccaatatttcctgtgaagtacctgctgatgaataatcaagtgagtaactacaggctttaaacaacttacgttttcacaagccttaaaatttgaccaaataaactttttttctgcttcatgcatttttcccagcatcggttgcatcacatcttagtagattccacttcaggttgtactgtttatcaacttttttgaaaatattcccacttgtagttccatacaaattcttcgatcacttcaaatccagcaatggtttctcaaaaaataaagctaggcagtactgactagtaagaggcaaagaattaacagtgtcatttgatgttgtgtccaaaatcctcattcttcaaactactgttctcatcaaagggctgatgtcttaattttctctggacacatgtctttgggttggttactatcttcaagcacgatgtaattcagcattagtaaatggttttctttgcttggctaacaaataggctacttgtaaacattttggttgcagcctcatttttattacttttgtgaaattttgctgtgatgtttcatttaaattttctaattcttctgactgttgctttcccaccagttgggaatattgtgatgttagtctgatactgtcagtctattcttttaccagttatggtgacactgcattataaacacaatgtaccagcatataataaaatagtccatattccaatgtgccttgaaagtgtaacattcaaaggtacttttcttgttctgagatacagggcatgaactggtagcagaaaaagtaataaatctagcaatacacagggcattccaaatgctttcaggtaatatctgcatcaccatgattctgtagcttgcc

SEQ ID NO: 50146 - DNA, 1776 bp, Homo sapiens
ttactggagaaagcatctccgtactgcagtttcccagagaaacgagaggacggcaccgaggtattcaagccatagataactctcttccctggcaaagcgccagtgcgaaggtgctgataacactgactggagctacactgactcccaagcactgccgcgtgaaacaatacgaagaggtgaggatctaggccaccgccctccactcccaatttccgtcccactgcgaagccccaggtacaaagcctttgcgtcatcactacgcgccaaccccttgacaaacccccagccccagttacccagcccccaacccgccgccaggctccttcctccgccagccgcactccagctggcgccatcgcgcaccctctcaggttcatcgtccccgccccctttctacttccctaacccgcccctccccccgtaaggctgcagcggatgcaagatctacttgtgtcgctgagctcgcgctcctcctcctcctcctcgccatagagacagcactcggcggcggtggcggtggcggtggcggtagcggcggcggcagcgggtgccccatagacacctctcgcccagcgaagggaaaggcgagcaggagctgcgccgcaccgtgctgcgccgtcgcttttcgcacgtcctgacgggggcgctagatgatgacgcgacacgcagagggggcggagagcgcccccgggggcggggcacgcaagtgacggcggcgcgggtggtggagcgctgggcggccaggctccctggctggccggtttgggcgtctgggccgtgaaggtgggacctcctgttccgggccgcaagtttccctctccagccgcccgccgttcgtagcatgtcccccagaactcggggagcgcaggcaggacaggcttagagaagacgcggtccccagcgcttgggccacggacgtcccaccccgctcctctgtcgctggagaaccgccgggccgagccactgggagaagcaggccagagccttccagggcctccggcccgtggacccgaggaggatgagctggctttttcccctgaccaagagcgcctcctcctccgcggctgggtcccccggtggcctcaccagcctccagcagcagaagcagcgcctgatcgagtccctccggaactcacactccaggtgactggtcgctgcctctccaccggaggaaaaagtagggtgggagggcgggcttgtcctaaccaccctcacagcgcctcagtctgctccccaccagctcctcatgtggtttacctcccttggttgtgggtcacacgcttgctctgccactcctgcccccttttactgttttcctccggaccctccctgcctcctgccgcaccactgctcagcgcttctaactcggatttcctcatccctcctgacacatagctgctgactgtaatctctcaatctctctcatagtctatttccagtatcccttgctgcccaggcttcgccactgatctttccctttgcccacctgattgccgcgtcagcagaattgttaaaatacaattgtgaagagtaatctccaggtttcacaaagaatggaaaatagaactgttgcaacatcaaaggaaagggaagccagagttttcatcagtgaatgcttctcgtctgagagtcacttatcacgtagtcagtcttcttgagtctctaagatttaccctgttggagcagtctctccccatctcacagcgaccagtgcatgtacatttctcacttctttcatagtcttgtccccacgctcaagaattactttatgttcat

SEQ ID NO: 50147 - DNA, 1036 bp, Homo sapiens
ctaagctctgacgcttagcccaggaacaaaagatccttttcaccaccttctcttcccacaaggcatggaaatgactgcaagtttaaaaataaagacactgggcttgccagctaacctggaaatggcctgtgccaaaagcaagagaggaatggatggccacaggaccaggccctagaatgtcctgccagagagaatgtccccacgcttctctgtccagttagctctcagcaatgggacaggctgctgtggctctcaccatgtcagcactaacaaggcttcttgttcaacatttctgttttcaggagcattaacattgcgtgtgctaagtaaaataaccccaccagtttctcaagcaaagttaaccactgagagggtgttttcttcccctgtgtgctgagtggcagtgtgaaaagcaaagaggtctgcagatgattaatagacatgggcagatggggatacacttgagaccaaagcgattagcgcctggatttttaaatataaaactgttgggtttgtttggataaactcaggataaggcagaaatacttatttgttcactcttgttgccaaacccaaaccaatatttacaaaccattttgctgaacaaagttcatttcagctgacatcagagacatatgccacaaattgcagagaatggggcttactaatcctgagtttcatgcccaggtctagtgatatttgttttatataaaaggacaactacatgtcacaaacatatataaactacagtaaaaaaataaaaaagcaaagacaaaagatataattttaggacctctgcaaatgtggaatttacttagaagaaaataagcctcagataatctgccttaggtatttcctataccactcttattttctcctatgcaattgctggtggggtcagtgagggtgcagaaaaagtctccatttgaaccctgtggggttggtctttcttgtaccctgagatctgaagttgaaacatatacagccctcccttgattaccagcccagcacttgtctgagttctgcctgttggctc

SEQ ID NO: 50148 - DNA, 1834 bp, Homo sapiens
tggcaaagagcagttgctcaatttttagtttaatgaatacattgatgaataagtggtcagtgaaacaatgaccaacagtattaatctaacagtcacgtggaaggtaggcaggcacaaagctactcgtggggagaaagtgaaattttctaggtgacctccaaaagatggcaagttgattggcagaggaggaagatgtccctgttgcttctttcctatcagtgcctgctgaccttcagggcagatatgaagggtgtcccagtggggcacaccctcaacaagtggagagatgcaagtaactccatacacctttccaccttcctcttcaccacttcctccccaacacccaggatgcctaagaggtaaaagctccacctctgctgataataataggctggccttgaaagggactattccaggctcttctacggactgttttaatggatggagctggaagccattatcctcagtaaactaactcaggaatagaaaaccaagcaccacatgttctcacttaaaagtgggagctgaacaatgagaacacatggccacacgtaggggaataacacacattggggcctgttggcgggggtgggggagtggagggagagcataaggaaaaatagctaatgcctgctaggcttaacagttagatgatgggttgacaggtgcagcaaaccatcatggcacacgttcacttatgtacatcctgcacataccccagaacttaaaaattttaaataaaaaaagaaaatacagggtatcctcttattacttgagggaaaagccagtatctatattatcaaaagggaaactatcgtgaaaatcacttcattaaataacaaaattgcttgctatgtgactgaaaggcatcattttctctccttacgaaatacagatcccacaaaaatagtttggttgagacttacaaatggaagttaaaattagatcatctctatagaggacctacacaggatgtgaacttggtcctagatttcagtttctgatgaaataccttgcagctcttgctcacagacagctgtttgaaaccagaacgcaaacaattttacttttctgttattcagaatctattctgattatatccataacagtagtaaaaaataattcagaaaataataatcatgaatgaaacgcatcattcattcctctgcctaccaagtgaccagtagtatgagccttcatatctctttgatgccaaggatagctgtttgaaggaggaaaagccttagaaggtgggtctgattgcaacacttcatcatcagctcagcctccgcaatggtttataatttactcggtaaaaacagatagtcaaacattggtcaagaccacgtacaggcatccagaaagatatcctagcctactgcactgcacgtagctggaaaagttacgtgcaagcaccatgttcccttatgaaacagacagctgccctccagaacttggtcagtttgcatgttctttagaaaacagtagtgtcagaccacaggcataagggcaggagaaatggttcctgacgagaaaccaaagattacccatttaaaaacaaaagccaaatgtgtatgctatcagcactggtaggagcaattttctgcaaagaagaatatttatgttctccaggtcatcttatgaaatgactaaataaaaaatttaaataacttaagggtcctgataaatgatgaacagtcttcagactaaagtcagactgcctttccaataacagtaccaaggagtccaatttttcaacacataaaaaacatagtttgtagcaggaacagccaaactctgcatgataatctccaaaagttgaagctgctcaaat

SEQ ID NO: 50149 - DNA, 4683 bp, Homo sapiens
caacacaaataacctcctgaacatcaatgtgcacttctcagaatgaacagaaggtggcaatatttcatctaccagctgaagtgtaatttcttaggatctccaccttttttacaggacctatcctgataatgtagcaaaagctgaaccctcaaagcaggagatacggttttacaattaataaaaattcaatgttatcttggacattttacgtgtatgtgtgcgcagtaagatacggcatcccttacataaacaaatcgctattactacatcaaatacggtcctctgtccctttgactgagaactccatttcacaactaaagaaaagctatgcatttcaggtcctaaaagttctcaagtagataaagcaataaaggtagtcacttcagttccaattcatgtttaagaaacacacaacagataggtgaaaagtaggactgcaaaaataccctgtttcctaacacaaggttcatttgctgtttgataatatcagtgtctttgggtgcagagaagttaataaatgaagcaaagtcaacactgtatagacacctactatggccaggcgttaagtggaatcaaaagaagctgttcctgttgccttcagcttagaactgacaatggaaaggaaagcacatggcacccagtggtcccagatgacatccaccaggactgggcaagagctgagcaacgggagagacagtgacaatgacaggagttgaaatctaaggaaactctgtcggcctggggatcaggggtaacgttttgtttaagagagaaagctagagctggactttaacacaatctgtaaggatggagagagaggggagggcattctacataaccaatgagcgaaccactccaggtgaagacgaaggttcctgtgtggcagctacagcaagagggaaggctagaaagcactgagggtccactacaacaggcccagccaaggaactgaggctccacctgtggcagcggagagcaactccaggattttgagcaagtctaactgaaaaactggagactgatttagtgtccacaacagagaagatgcacaggaataaggagcgagcagagagggatgggcacggaaaacctcagcgctgacagagaggagggacggagaacgcaggctccacgaggggccctgagtgtctcattgatggccacatccgtatccttcaaaccggcatggaacaggcactcaaggaagatttactgaccggctgagcaactgcataaatgactggataacagaatgaggcccggggagagcaggccaagactgtgaagaaacagcatgagattctcaccctaaccctgaatcaatcaaatgtagaaaaactcagtctgtgttcatcttggtatcaggttaaaggtcagcctggtcactgccttagtcctcaagtctaccatttccacagctacatttaatgcctgaagaatgacagtgcctacgctgacatggttgggaaatgaccgtacaagctgatcttggcaggagggggacttggtcttgccctaacacaggtggtcaaatgacggtctttctctctccctcctatataactggttacaggaagaaacttcacttgtggtgcagacacaaacatgtgagttgattttattccttgcaactattctctacaactgtgctagtcaaaatcctcctttctacccgctaaggacctcttgggcagatttaatagcatcaggtttacttacattcagatagaaaatctccatccggcctaacttagaattccagtcccgtatgtgacgcaaaattagctcttccccgccgccttacaggctgtgtggactgctgaggggtttgctccggcccaccctccctctcctctttattgtaggccctatctgtgtactgggaggatgggtgcagaggagggagaagagaagaggtaaatttctctttggaaagctcggcagggttccaattctctcttcatcggttgacatgagttggtcaccacttccctctctggcatagcgtccaagtgctcaatctcccaaggtatagatgcaggtttttggaggtagggagtacacatctcactgaaaaaggagatgcgccttggcttgagtctattccagtacgctcaacttccctcaccagcacacccaccccagtcacctacagctgaagacacccggcggctgagcccttttaggaatgctgaagcaagatggctcatgctcaacttccttcctcaggctccactggacccacaggaaatttctccatccttgccctgccaaaaggagggagcacagattgctccacggccactggacactgccctcgccccagttctcttcactctggttgctgccatgacggccaccagcaagtgtgagacccccgattcccctctctcaagcacccctcatctctaccactgactttcctaggtgacccctcccaggactcagcgagtaggaaccacctactcactaattccagagaaaaagaaaaacatcccacgtgacatcctgttacacaactaaaacctcgctgacctggtgaaatcacggggcagaaccacagcaaagtctctggagaaggagcaaggacaaaaggccaggcgtcacggaggcaagcgctgcctcgccctcggcccttctcttcatgcctcagcaccccctccgctggccctggctgcgtcagaggagctgctgggaggttctctggcctcgtcaggcgtgtgctcagaggtggtaaccccacagagcttccacgtggaaacgaggctctgctggagaatttttgtaaacagaaaaaacaccatggtcaaacggagcgagtgtgggctctggggttagataagcctggatgtgaatcctggaatgtaaactgtgagaccctgggcaaattacttaacctctttaagttctagcccttatccatgaaaagaaacaaaacaaaacaaaaccctcctaacttgccaggattcttaaaagaactaaatgagaaagtaccttggctgggcaccgtggctcacgcctgtaatcctagcactttgggaggccgagaagggcggatcacctgaggtcaggagttcgagaccagcctggtgaaaccccgtctctactaaaaatacaaaaaaattagccgggcgtggtggcgggcacctgtaaacccagctactcgggaggctgaggcaggagaatcacttgaacccgggagatggaggttgcagtgatccgagatcgtgccactgagctccagcctgggggcgagtaaaactccgtcccaaaaaaaaaaaaaaaaaaagtgcctgccatttttacaagctcagcaaagtcccagaacaaattaatgacaaagtcatgaacaaggctgcagtgagttagccctcatttgaaaattcagcgaagactgcgacaacaccttcatatgttcttaaagcgccacaccctagcactaatacgtgccctgaagagtataatttttttttggaattgacattcaatacatgcttgaagacttcattgactttgtctcccaattttttctttttctttcgagacagggtctcactctgttgcccaagctgcagtgcagtggcacaatcacaggtcagtgcagcctcaaactcctgggcttaagcaatcctcccacctcagcctcccaaatagctgggactacaggcccatgccaccacatccagctcatttttttctgttttttgtagagatgggggtctcactacgttgcccaggctggtgtctcccaaaaaatgtcaacaagtaattctgaggctttcatctgaacaggcagctctggaagttctcatgtggggctagccttgctcaaaggccaggaacgattcaggtcagctcctaatcctttttctttttaatgaaacctgtgagcaaacctgagaagtgcctgcttgccagggtccacaccttctagagcaaactcagtctcctggctaccaaggaggcctaacacactctggaacaaaaatcaacatacacagtctttaaaagaatgaaagctctaagtaaacagtttaaaactcacgtgaagtgtgcgtgcatggataaatatgagaagagggcatggcttgtacgaaaccccagttttctttaatggatcagtgtcaaactcatcgctgagagtaaacacacttagcactaaatatacccttcaaatcaaatcctttggattaacttattttaaatctggaatatgcctggctctacagctgccacgtttcctagaaggtttacacaacacagtacatatctggatcactggtcctaaaattagtaggtgaatctgtctggctttatttaaatctgaaaaaaacagggtaagaaacaggcttcccaatctctcctcagtaaagcccccgtcttttctcttccttttcttatcttgtcttcagtatatctaagcagctaatcattaaatcatctgtaactattaggaaattcaaaacagccccaccttgcttcaacaaagggtacgaagaagaggtgggaaggcagtcacattagaaggaagggtttaaacacaatgagccagagagaagggcacaaattgacagagaacagtaaaagccagagattttctggtatgtttcagtgaaaatcttccagcaaaggagctatttttttttttttcagtttgaaacttttatctgtgtgtcgtgctct

SEQ ID NO: 50150 - DNA, 718 bp, Homo sapiens
caagtcataggtatagattactacaagttgaatttgaaaaataatagctgagtacttcgcaacaattgaactgctggagctccagagtgaattttattgtcagagcagaaagggctgttttagaaagaaaccaagtactaatacggtatacttaggagcacaatctccaaaatgaagccacattcatttgggtgcccctgtgtgcccagcacaatgctaggggcaggggaaatatgaaatgtacttgtatagttggaggcttcaggtgcactagacctccaggaagtagccagcagggtgcccagacactgactatgccaagaggaaccgcccctttgcagatgaagcaacctgcacaagagatggcagtcggctagcctttgcctgtctccagtttcacaactcaggtgcaaagacatgcatcgcaacggtgacacttactttaggccgggtgtcaacgacataaacgaagtcacttcctggattggctttcctaatggcctggagcatctgctcgtcctctaggcaccgggcactgaagccggacaggggctggctgctccggcagatggaggcctagggggagaggtcacagcaacacagcaccatcaggtaactgtacccatgagagacactctacgtgtgtctccagaacaaagagcccttggctcactgatagtccacctcggcttatgaaaacgtgatacagctttctgga

SEQ ID NO: 50151 - DNA, 5021 bp, Homo sapiens
tgagatcttgtttccgaaaaaaaaaaaaaaaaatcacatcttcctttgcctctaaccagtgctccagctctgtgcaagctgaaatacattcagagttaataaaatactttagaccctaattcaaggctaggaaaagaagaagagcaatgagtataactaaaaataatttttatccaattcacagaactttcaccaccaaattaatattttccttcaaagtagcaacagagagggctatgtgctcactctgatgaagctggcattgctccagatatttttggaagcttctagaatctgactgagaccctgctctaccccccggctgtaggtgcaggcatgtggatacacactcacacaatctcctgtgtttatagcctcactcggctttgaatccagaagtatattatctagcttaaaaactaaagtttctctctcaccttgctagaaccaaagaacattttgtttttttaaaccaccttttttaaaggtggttttttgctaccttttaaaagtgggtgccaaagaccattcttgctcatccgaatttgttttcctatcctccgcagaaatggaactctaagttttagctattttaatggccacccataacactgtacttccacacctgccctgtgcaattctgatgaaagggaggtgtcacgtggcagtttttggaagccttccttaaaaagctgggcacacaacattagccctccgtcacctgccacctgcagtgtgtgggtggtgactgtactgaagtgacctcttgcaccaggcaggccatggccaaatccaggtggtggtagagcagaaaggtagaaggagcttgagtacctgaaggctaagtggggtggggccaggctaccaggctaggactgcgcaccctggtaattttacgcaacagaaaaaaattgtatcctcttagagccactgttacttagagtctctattacagacaaacccaattctggcttttataaataatattttaaaaataaaacccatgctctctataaccaaagatttcttatactgaagatactcaaaagaacatgaaatttaaaaacaggtaataaggccgggcacagtggctcacgcctgtaatcccagcactttgtgaggccgaggcaggtgggtcacctgtggtcgggagttcaagaccaccctggccaacatggtgaaaccccttctttactaaaaatacaaaaaaaaaacccaaaattagctgggcatgttggcaggtgcctgtaatcccagctacaaaagaggctgaggcaggagaattgcttgaacctgggaggcagaggttgcagtgagccgagattgcaccactgcactctagcccaggtgacagagtgagactctgtctcaaaaaaaaaaaaaaaaaaacgtaatagagaaaaagaatgggccatggacttcgggggcttttctaaaataggcatgccacagatctccagcactgaataagcaaagagattcccaaggtgcccacttaggacagtattcacttgcatgattagctttaggggttttctgaatctattgagtcattttctgaatcattacattactgtcaaataaacataggaagtctacatgagataaggacttagcatagttgtatcatgtcataccatgcacaggaatatccacataccttctgaagaattcaaacacacacacacgcacagcagaaggcagctagaaaatgcctgcttatgataaactagaaaagcaaagtgtaaaacaaaaacacgcctcgagacttacgtggttatctttataatagtaagaaaggacaggaaatcgccgtctactccggaatttggaactccccactatgatgtgtgccgtggccgatttgggaacgtacagttcagtaggataagagtcacagacctgtcaccagaaaatacaaagagatttttaggccatctagtaatgccctgcgaactgcccccagaaattccacttcaccacgcttacaggtacatccttaagttcccttaaccatgttacagaggaggctatttcgaggaaactcaaagccacttcagaggaaggaagtgccgctgattctatgtaatcattctgaaggaacgcaagctacccttagtgttctgtccccgtgcactgtcccctctctccaagggctctttgtgcaagaccagtgacaatgaagccttcctttcatcaaaaagagacaaactgccattttgcaccctggctgagaaaatctgagctgccaggatttgcttgaaagacagaatgacaccaggagacagttttcctaaaacataagcacactggttaagccagcaggttaactctgtggctctgacacgcccagtgtgcattcctgaccctgacacatcacacaagctgatgcctccccggacactcctgccctccaccttcccaaatcccatccgttcttcaagggccaatcgaagttccacctccttcgggaagcttcttccttgacctttcagcccatgcagatttcctaatgtgccacagattaccgcgcaatgtaacagcttgatttttgtttcttatgtgttgagttgataagtggtaaggatcgatgtactctttctacgcattcctgagagtgactaccacagtggaagggtgccttggaaggatcttgcaattaagaaccagaaatcagcagtttaggacctggctctgactgagcaacttcatgaccctggggaagccaaactacacggtgcactgtggtttgctaatctctagaagtgatactgcagcaacaatatctcatggggttgacagatggatcaaatccggcaacacccatggcaaagcactttataaaccactaaatccaaaacaaatgttagtggtagcaacagtgatagcagttgaggctactgttgctcaacacattttgctttcacttcagtccatcagtcttttcgcaatgtgaagatcacccacatggaagtgtcctgggatatgtcaggcacctctttacttcctggatgtcaaacatcttcctcgtcatctcaagggagtcctcaagtacgtctaacaacaggggtgtactagtccattttcatacggttataaagaaacacttgagactgggtaatttataaaggaaaaggtttaatggactcacagttccacatggctgggaggcctcataagcatggcaaaaggtgaaggaggagcagaggcacgtcttacgtggtagcaggcaagacagcgtgtgtaggggaactgccctttataaagcattagatcttgtgagacttattcactatcatgagaacaccatgggaaagaccagctcccatgatccaattacctcccaccgggtccctcccatgacatgttgggattatgggagctacgatctaagatgagatttgggtggggacacagaaacccacatcaaggggaaatactttatctgcaggccctgtgtccatctccacccacctttatcactctggaagatgggtttgtaggggttgaaaacccacaactgaaatccaagcctcttataaagtcttctgtgatgatgcctcccttgctgacctccactgtctttgttagcagaatagaaaactacatagagcagggaataaaagggccacagaagagatgttcacaggcccaaagtctaatttcagggttctaccagacattttaggaaagaagattaccaaagagtttaacatggcctgtggcactgacactctaaaggaaaatctgccaagaacagaaggctcaaccaacttggactcagagagctttagctgggaagactgccataaaacacggcactccctcccccttgccaatctggtgtctgaacctccatgaagtcagccagctagaagactatgacgtggaccacacctgtttgtttgaggttcaagagacatgtagtcattgcaccagaccaacaacattttcctaaaataacagtttttaaaaggaaatgagtaggttttcagcaagttgggaattacctacattcttccttgtaacaacactaaggaactgcaaagtttcatgattaaataacagtaacatgcaagatttgtcaacatgcttatttcagacagcctctttgaagagcaagagataagctcctgctaggcccttttatggtcttctaaggctaaataaacacctaggttcactggcatcaaggccctgtgtgcaccatagctggaatgagaccaaacagagaaaatcaacacccagaggcccactctccttggccccaactcagggccctcttgattcacaaaggagcaagaagaccacctcctgccctctaagagcaccagagctctcactctgcagagtagaggtatgtagattttgatggcttggcatgtgccaggacaaagagctcaacaacctgcgcccagtcaccaatggccaggcttgcatcagatgtggaggcctcccctctatgaacacaataccagttatgaggatttctgccttccccagagcactgggtctaggggaaaaagctccatgggtcacagcttaagttataaggcattctgatgagtacttgctcggggaactctaagaagctagaatgcatttgagaaaagcagatttagggtgtcagttaacacgggaagatacaacctcttaccaagctagaagcatggatatttgtcctgctttcatcaaagtagacagcactctcaagtggaaattaaaataacaatcctaccttgaaaatataaaacaccactgaaaggaattaaagacacaagtaaatggtaagatacctgtgttcatgcactggaagacttaatattgtgaagatgtccatcctacacaaagcaaccacaaggcaatccctatcaaaatctcaagggcattttgtgcagaagtagaaaaattcatcctaaaatttacatggattctccagggaccccaaatagcaaaaaacgattttgaaaaagaacaaagaggacttacacttcataatttcaaaatatagtacaaagcca

SEQ ID NO: 50152 - DNA, 2580 bp, Homo sapiens
ttgtcaaaacatattctgggaaaagcctggtacagtgtttctctcaatcaaacccaatgaaattactttcattttttcctcgtgaattccagtaataacttggcacagcattgaattttacttttccctattttaaagtttcgtttgaggattacccgttactttaaaatggacactttatgggtgaccattgcattgcttactattttctattgaatacatgagacttaaaaaattctgtgttcagatttattaatttaaatggaaatgaggttgactatgcttgctttctttaggggtaagcggatgggtgggaataaaacattttatttatataaaatcaactaccgtgtttgaaaggggattcaagcgtgtggatcttgccgtatttttcctgtgtttgctgtagagtttcatatccaaatgttgtcctacatgttgatttaattgaccacaattttcaactgcaaacttttggagagcagagactgtgtaagttttatccatcagtatggtgtttagaaagcccatcgttctctacggattgggtaatgacccatgcaattacattaaaagaattttctaagcattataagcctacatttatttttgaaaacctcaaaaccccaataattcattattcctttattacaaagtttaatttttaagcgccagccatatgtcagcttctttcagaatccaatagcgtttctttcactctcataaaatcaagttaccacgattaagatttattttaaggaaagtggtttaggtcttatagattttcctagagacattatttattattagcctgacatttatttgcaggatggcatcaaactactcttaactgtgtatagcagagaatttgtcacgggtgggtctctgaataagagagcatatcccattctgcaccctttatctcaaccatctgctgagatgcagtgtatacaggacatggagcaaaaactgattagccttcaggcattccagctagtggatatttacagtgtttttcacttaggtgtttgctaagaggagaaacttgaactaagttatcaaaagaattgcccaacacacatgacttgtcaactggtttttgacacctgcgtcaacaccagatagaaagcaatgattgcaattcaccagtcacacccctccacacgccccttagtatcactaatcacagggctgccagatgggatgaacagttcaaatttactttattttttcttaaattttgtttgaatctttgccccctttgtattatattctcttttaaactaagcataaggaagtttttttaatcccttaggagaaaaaattaggcagcatgttagaaatagataaaggaaagttagaaaatttgtcttttaaaatatttactttattttacaaactaaaagaaaatttgccttttaaataagtatcccaagcattttcccttctgtatttttacaggcttgtaacacatttcatttcattgacagatagttttgacaaatgcctaaggattgtcttgctgtctttccagctacatttccactaacatctctgaaatcacaaagttaaggacaagttgtcctaagtactgaaatagtgtatttatctagcgggaagcatatttgaggcaggtactaatctcctgccaactgcttcagccttgactcacaggatatctgccgtcttcattacgagagtagtgatgtcgtcaaggaactcccttgcatacattatgtttatttctttttttttttttttctgagacagagtctcactctgtcatccagactggagtgcaatggcgtgatctcagcttactgcaacctctgcctacccggttcaagcaattctcctgcctcagcctcctgagtagctgggattacaggcacgcgccaccacaccctgctaatttgtgtatttagaagagacggggtttcaccatgttggtcaggctggtctcgaactcccgacctcgtgatctgcctgcctcggcctcccaaagtgctgggattacaggcgtgagccactgtacccggccttatgtttcttatgtcttgctgttttcagtattctttccttgtctttgatttttgataatttgattatcatatgtctcggtgaattcctctttaggttgaatttaaagggagacttctgagtttcctatacctcgatgttgtcatctttccccagatttggaaactttcaagccattattctcttaaatatgctttctagggctttctctctcacttctccttcaggaattcttatcgtgcataagttagttctcttgatagggttccataatcccataggccttctccattttttttcactcctctgactagaaaatttcaaatgtcttatcttcaagtgcactgattctttcttctttgattaagcctgctgttgaaactttttattgaaaattttagtttactgtattttttatagctaggatttctgtttttttttgtttccactttatcaaacattttgtcaataagttattttccaaattttatttaattttctatctttattttcttgtagttctctgaacttaagaggatt

SEQ ID NO: 50153 - DNA, 647 bp, Homo sapiens
tcagcaaggtctttgtgatctgtatcttatgctgacctcctatgtcatcctgtgtcttagaatgccttacccatctgggaatgcagcccagtagatctcagtttcattttacccagctcctatttaagatgaggttgctctggttcaaatgcctctaacacctacataggctgtgacatgattgagcatttaaaattaaaacattataatttcatgatgtttctcccctctcctatttttcttcttcttgttatttttttgtaccaatagtctctgatctccaagtatgccgggaagcaggtagacacaaggtcagcagggcaggaggggaaacagcaagagcagcatgctgacgacctttctgccagttaacgctcataggtcacgctctggcaatcactgctgttgacacacaaaggtggcctcatagatggaactagtgttgaacaactccttggatagagcaatctggtttaaaaatgtcaggttttttaaagcattagtttatttgtcttaatgtaatggataaagataatccctcattacatgatttacatctatgacctgagaagagttagatttttaactttaaattgtatttggaaccaaattttagactgatgaaggtataaacggatataagagta
